United States Patent Application Publication US 2011/0183924 A1 - sequence listing, part 160

SEQ ID NO: 415644 - DNA, 2868 bp, Homo sapiens
cccgcgggaacacagctagggagtgggtaggagcaggatctgccgacgagggcagaggcggaaaatcctcgggcgatgagctgaagagggccgggtccgggagggatgctgggagcttgactcactcgcacaccatgtgtccctccgcgcgcagcacgggggacttttcggtggggattttgggcgccgaccagacgcggcattttcggaaaatagcgccctgtgcagctgaagcgctttgtgtgtagcggggccgcgtcagcccggccgggtacgaggcgcctcgggtccccgcaccacctcctgctgccttcccgtcgccgctcccgaagcttttccagatgtccctggtagatttgggaaagaagcttttagaagcggcacgagcaggtcaagatgatgaagttcgtattttgatggcaaatggagctccctttactacagactggctgggaacttctccacttcatctagcagcacagtatggtcattattccaccacagaggtactgctgcgagctggtgtgagcagagatgccagaaccaaagtggaccgaacaccattacatatggcagcttctgagggccatgccagcatagtagaggttttacttaagcatggtgctgatgtcaatgcaaaggacatgttaaagatgacagctctccattgggccacagaacacaatcatcaagaggtggtggaacttttaatcaaatatggtgctgatgtacacacgcaaagtaaattttgtaaaactgcatttgatatttcaatagacaatggaaatgaagatttagcagagatattacagattgctatgcagaaccaaatcaacacaaacccagagagtcctgacactgtgacaatacatgctgcaacaccacagtttatcattggacctggaggggtggtgaacctaacagatgaaacgggtgtatctgctgttcagtttggaaactcttctacatcagtattagctacattagctgccttagctgaagcatctgctccattgtccaattcttcagaaactccagtagtggccacagaagaagtagttactgcagaatctgtggatggtgccattcagcaagtagttagttcagggggtcagcaagtcatcacaatagttacagatggaattcagcttggaaatttgcactctattccaaccagtggaattggtcagcccatcattgtgaccatgccagatggacaacaagtattaacagtaccagcaacagacattgctgaagaaactgttataagtgaagaaccaccagctaagagacaatgtatcgaaataattgaaaaccgggtggaatctgcagaaatagaagagagagaagctcttcagaaacagctggatgaagcaaatcgagaagcacaaaaatatcgacagcagctcctaaagaaagaacaggaagcagaggcctacagacagaagttggaagctatgactcgtcttcagactaataaagaagctgtttaattgaaatgaacatgtagtttgattttacttttggtcaagaaagaatacaatcttgaactgtacacaacaaaggtacagccatgggaatacagaatgatagaagagactacagatggataattggacttaagccatgagctctgagttcttgtaacataaaactttactttagaagttgtgaaatgtatttaaaactgaattctgtaaatagtttttttttttttacagttccaaatgagttgataaagattgttgaagagatccaaaaccagaataagccactgtttttgtgaattctttttgattttagtacaaaccttaatttctcagaaacggaacagttttaagggtgatcgttgttggttaggccaaatgttgtgtaataattatggtggactgatgctggaattactcctgtaggtataaacctctgtatgaagagaagatttctcccaggaaatctttgtacagctttaagttgtgtcagattctctgaaaacattttttagaaagcaaaatttttatatttgttcaatttcagctatacccaagtagatttacatgtatatgaagcaaatatttttaaaaatttctgtttgtacatattctgcatgttttataatttcaaaatgcatcacttacataggtatttctcccacagaaatgatgaaagtgaccagaaaaaaacaaaaacaaaacccctttactctgtaggtcattgaaacgaagtaagctggcagctggttttattggaatgacagtgttctcggaaggagcagcctacaagataacttgaatttgccaattctgcaaaatctgtgcttttttgaaaatttaagagtggggacgtgaaactgtattctgtgccttccatcatgatttccacatgaaagcactttaaggcactgattttaagataatgtttttggaaaacccaatgcatatgggtttctgaaatattttatggacttatttctccccaggaaatgattcttacggaaaaaaattgcttttgtatgtagaacaggaactttttgtattacagtgatgcaatagacatgtctaatgtaacttctacttttccttttgaaagctcagtgtctgtgctatgacttgctctcatcacaatattgttgaattccacaatgtatggacattaaacactggcagactgttcactttttcttttttttttttggtaaaatattacttcaaacccctttttcttgctttatttttcagtgttttattgctttatgaactgtttaaccctgaaatccctctaggttatctatactgtataaaaaagcaattacccttaaaactgtactctggcctacttttctattttgcaattaaatatctttttcacata

SEQ ID NO: 415645 - DNA, 2904 bp, Homo sapiens
cccgcgggaacacagctagggagtgggtaggagcaggatctgccgacgagggcagaggcggaaaatcctcgggcgatgagctgaagagggccgggtccgggagggatgctgggagcttgactcactcgcacaccatgtgtccctccgcgcgcagcacgggggacttttcggtggggattttgggcgccgaccagacgcggcattttcggaaaatagcgccctgtgcagctgaagcgctttgtgtgtagcggggccgcgtcagcccggccgggtacgaggcgcctcgggtccccgcaccacctcctgctgccttcccgtcgccgctcccgaagcttttccagatgtccctggtagatttgggaaagaagcttttagaagcggcacgagcaggtcaagatgatgaagttcgtattttgatggcaaatggagctccctttactacagactggctgggaacttctccacttcatctagcagcacagtatggtcattattccaccacagaggtactgctgcgagctggtgtgagcagagatgccagaaccaaagtggaccgaacaccattacatatggcagcttctgagggccatgccagcatagtagaggttttacttaagcatggtgctgatgtcaatgcaaaggacatgttaaagatgacagctctccattgggccacagaacacaatcatcaagaggtggtggaacttttaatcaaatatggtgctgatgtacacacgcaaagtaaattttgtaaaactgcatttgatatttcaatagacaatggaaatgaagatttagcagagatattacagattgctatgcagaaccaaatcaacacaaacccagagagtcctgacactgtgacaatacatgctgcaacaccacagtttatcattggacctggaggggtggtgaacctaacaggtctggtatcttcagaaaattcatccaaggcaacagatgaaacgggtgtatctgctgttcagtttggaaactcttctacatcagtattagctacattagctgccttagctgaagcatctgctccattgtccaattcttcagaaactccagtagtggccacagaagaagtagttactgcagaatctgtggatggtgccattcagcaagtagttagttcagggggtcagcaagtcatcacaatagttacagatggaattcagcttggaaatttgcactctattccaaccagtggaattggtcagcccatcattgtgaccatgccagatggacaacaagtattaacagtaccagcaacagacattgctgaagaaactgttataagtgaagaaccaccagctaagagacaatgtatcgaaataattgaaaaccgggtggaatctgcagaaatagaagagagagaagctcttcagaaacagctggatgaagcaaatcgagaagcacaaaaatatcgacagcagctcctaaagaaagaacaggaagcagaggcctacagacagaagttggaagctatgactcgtcttcagactaataaagaagctgtttaattgaaatgaacatgtagtttgattttacttttggtcaagaaagaatacaatcttgaactgtacacaacaaaggtacagccatgggaatacagaatgatagaagagactacagatggataattggacttaagccatgagctctgagttcttgtaacataaaactttactttagaagttgtgaaatgtatttaaaactgaattctgtaaatagtttttttttttttacagttccaaatgagttgataaagattgttgaagagatccaaaaccagaataagccactgtttttgtgaattctttttgattttagtacaaaccttaatttctcagaaacggaacagttttaagggtgatcgttgttggttaggccaaatgttgtgtaataattatggtggactgatgctggaattactcctgtaggtataaacctctgtatgaagagaagatttctcccaggaaatctttgtacagctttaagttgtgtcagattctctgaaaacattttttagaaagcaaaatttttatatttgttcaatttcagctatacccaagtagatttacatgtatatgaagcaaatatttttaaaaatttctgtttgtacatattctgcatgttttataatttcaaaatgcatcacttacataggtatttctcccacagaaatgatgaaagtgaccagaaaaaaacaaaaacaaaacccctttactctgtaggtcattgaaacgaagtaagctggcagctggttttattggaatgacagtgttctcggaaggagcagcctacaagataacttgaatttgccaattctgcaaaatctgtgcttttttgaaaatttaagagtggggacgtgaaactgtattctgtgccttccatcatgatttccacatgaaagcactttaaggcactgattttaagataatgtttttggaaaacccaatgcatatgggtttctgaaatattttatggacttatttctccccaggaaatgattcttacggaaaaaaattgcttttgtatgtagaacaggaactttttgtattacagtgatgcaatagacatgtctaatgtaacttctacttttccttttgaaagctcagtgtctgtgctatgacttgctctcatcacaatattgttgaattccacaatgtatggacattaaacactggcagactgttcactttttcttttttttttttggtaaaatattacttcaaacccctttttcttgctttatttttcagtgttttattgctttatgaactgtttaaccctgaaatccctctaggttatctatactgtataaaaaagcaattacccttaaaactgtactctggcctacttttctattttgcaattaaatatctttttcacata

SEQ ID NO: 415646 - DNA, 1526 bp, Homo sapiens
cccgcgggaacacagctagggagtgggtaggagcaggatctgccgacgagggcagaggcggaaaatcctcgggcgatgagctgaagagggccgggtccgggagggatgctgggagcttgactcactcgcacaccatgtgtccctccgcgcgcagcacgggggacttttcggtggggattttgggcgccgaccagacgcggcattttcggaaaatagcgccctgtgcagctgaagcgctttgtgtgtagcggggccgcgtcagcccggccgggtacgaggcgcctcgggtccccgcaccacctcctgctgccttcccgtcgccgctcccgaagcttttccagatgtccctggtagatttgggaaagaagcttttagaagcggcacgagcaggtcaagatgatgaagttcgtattttgatggcaaatggagctccctttactacagactggctgggaacttctccacttcatctagcagcacagtatggtcattattccaccacagaggtactgctgcgagctggtgtgagcagagatgccagaaccaaagtggaccgaacaccattacatatggcagcttctgagggccatgccagcatagtagaggttttacttaagcatggtgctgatgtcaatgcaaaggacatgttaaagatgacagctctccattgggccacagaacacaatcatcaagaggtggtggaacttttaatcaaatatggtgctgatgtacacacgcaaagtaaattttgtaaaactgcatttgatatttcaatagacaatggaaatgaagatttagcagagatattacagattgctatgcagaaccaaatcaacacaaacccagagagtcctgacactgtgacaatacatgctgcaacaccacagtttatcattggacctggaggggtggtgaacctaacagatgaaacgggtgtatctgctgttcagtttggaaactcttctacatcagtattagctacattagctgccttagctgaagcatctgctccattgtccaattcttcagaaactccagtagtggccacagaagaagtagttactgcagaatctgtggatggtgccattcagcaagtagttagttcagggggtcagcaagtcatcacaatagttacagatggaattcagcttggaaatttgcactctattccaaccagtggaattggtcagcccatcattgtgaccatgccagatggacaacaagtattaacagtaccagcaacagacattgctgaagaaactgttataagtgaagaaccaccagctaagagacaatgtatcgaaataattgaaaaccgggtggaatctgcagaaatagaagtaaggagtcttttacccggtgtgctttgccgcagtcatccaaaataaattcaattttttttgtcttttatatttattactgacagtattgttttgatacagaatgaaagtgcgtagtattttcattttgtttatttttgccttatacatatagcaagccctcaataaataaatattgaatgaatg

SEQ ID NO: 415647 - DNA, 1562 bp, Homo sapiens
cccgcgggaacacagctagggagtgggtaggagcaggatctgccgacgagggcagaggcggaaaatcctcgggcgatgagctgaagagggccgggtccgggagggatgctgggagcttgactcactcgcacaccatgtgtccctccgcgcgcagcacgggggacttttcggtggggattttgggcgccgaccagacgcggcattttcggaaaatagcgccctgtgcagctgaagcgctttgtgtgtagcggggccgcgtcagcccggccgggtacgaggcgcctcgggtccccgcaccacctcctgctgccttcccgtcgccgctcccgaagcttttccagatgtccctggtagatttgggaaagaagcttttagaagcggcacgagcaggtcaagatgatgaagttcgtattttgatggcaaatggagctccctttactacagactggctgggaacttctccacttcatctagcagcacagtatggtcattattccaccacagaggtactgctgcgagctggtgtgagcagagatgccagaaccaaagtggaccgaacaccattacatatggcagcttctgagggccatgccagcatagtagaggttttacttaagcatggtgctgatgtcaatgcaaaggacatgttaaagatgacagctctccattgggccacagaacacaatcatcaagaggtggtggaacttttaatcaaatatggtgctgatgtacacacgcaaagtaaattttgtaaaactgcatttgatatttcaatagacaatggaaatgaagatttagcagagatattacagattgctatgcagaaccaaatcaacacaaacccagagagtcctgacactgtgacaatacatgctgcaacaccacagtttatcattggacctggaggggtggtgaacctaacaggtctggtatcttcagaaaattcatccaaggcaacagatgaaacgggtgtatctgctgttcagtttggaaactcttctacatcagtattagctacattagctgccttagctgaagcatctgctccattgtccaattcttcagaaactccagtagtggccacagaagaagtagttactgcagaatctgtggatggtgccattcagcaagtagttagttcagggggtcagcaagtcatcacaatagttacagatggaattcagcttggaaatttgcactctattccaaccagtggaattggtcagcccatcattgtgaccatgccagatggacaacaagtattaacagtaccagcaacagacattgctgaagaaactgttataagtgaagaaccaccagctaagagacaatgtatcgaaataattgaaaaccgggtggaatctgcagaaatagaagtaaggagtcttttacccggtgtgctttgccgcagtcatccaaaataaattcaattttttttgtcttttatatttattactgacagtattgttttgatacagaatgaaagtgcgtagtattttcattttgtttatttttgccttatacatatagcaagccctcaataaataaatattgaatgaatg

SEQ ID NO: 415648 - DNA, 1550 bp, Homo sapiens
cccgcgggaacacagctagggagtgggtaggagcaggatctgccgacgagggcagaggcggaaaatcctcgggcgatgagctgaagagggccgggtccgggagggatgctgggagcttgactcactcgcacaccatgtgtccctccgcgcgcagcacgggggacttttcggtggggattttgggcgccgaccagacgcggcattttcggaaaatagcgccctgtgcagctgaagcgctttgtgtgtagcggggccgcgtcagcccggccgggtacgaggcgcctcgggtccccgcaccacctcctgctgccttcccgtcgccgctcccgaagcttttccaggtcagtgcgggtctgtgtagggccatgtccctggtagatttgggaaagaagcttttagaagcggcacgagcaggtcaagatgatgaagttcgtattttgatggcaaatggagctccctttactacagactggctgggaacttctccacttcatctagcagcacagtatggtcattattccaccacagaggtactgctgcgagctggtgtgagcagagatgccagaaccaaagtggaccgaacaccattacatatggcagcttctgagggccatgccagcatagtagaggttttacttaagcatggtgctgatgtcaatgcaaaggacatgttaaagatgacagctctccattgggccacagaacacaatcatcaagaggtggtggaacttttaatcaaatatggtgctgatgtacacacgcaaagtaaattttgtaaaactgcatttgatatttcaatagacaatggaaatgaagatttagcagagatattacagattgctatgcagaaccaaatcaacacaaacccagagagtcctgacactgtgacaatacatgctgcaacaccacagtttatcattggacctggaggggtggtgaacctaacagatgaaacgggtgtatctgctgttcagtttggaaactcttctacatcagtattagctacattagctgccttagctgaagcatctgctccattgtccaattcttcagaaactccagtagtggccacagaagaagtagttactgcagaatctgtggatggtgccattcagcaagtagttagttcagggggtcagcaagtcatcacaatagttacagatggaattcagcttggaaatttgcactctattccaaccagtggaattggtcagcccatcattgtgaccatgccagatggacaacaagtattaacagtaccagcaacagacattgctgaagaaactgttataagtgaagaaccaccagctaagagacaatgtatcgaaataattgaaaaccgggtggaatctgcagaaatagaagtaaggagtcttttacccggtgtgctttgccgcagtcatccaaaataaattcaattttttttgtcttttatatttattactgacagtattgttttgatacagaatgaaagtgcgtagtattttcattttgtttatttttgccttatacatatagcaagccctcaataaataaatattgaatgaatg

SEQ ID NO: 415649 - DNA, 608 bp, Homo sapiens
cccgcgggaacacagctagggagtgggtaggagcaggatctgccgacgagggcagaggcggaaaatcctcgggcgatgagctgaagagggccgggtccgggagggatgctgggagcttgactcactcgcacaccatgtgtccctccgcgcgcagcacgggggacttttcggtggggattttgggcgccgaccagacgcggcattttcggaaaatagcgccctgtgcagctgaagcgctttgtgtgtagcggggccgcgtcagcccggccgggtacgaggcgcctcgggtccccgcaccacctcctgctgccttcccgtcgccgctcccgaagcttttccaggtcagtgcgggtctgtgtagggccctgttaccaccggatgtggaagttgatctcttcgctggtaaaaaataattccacttcccccggaacccagatcatccccgcgatttcctgtttattgcattaaggcgccgggtttccggggctcctggccccgcttattccgcgggggtcggcggggtcggcctgggcgcccgcgccgccgctgcgctttgtccgctgggcacactgcttctgggaggggcgggcagacatggtggcggccgc

SEQ ID NO: 415650 - DNA, 2933 bp, Homo sapiens
cccgcgggaacacagctagggagtgggtaggagcaggatctgccgacgagggcagaggcggaaaatcctcgggcgatgagctgaagagggccgggtccgggagggatgctgggagcttgactcactcgcacaccatgtgtccctccgcgcgcagcacgggggacttttcggtggggattttgggcgccgaccagacgcggcattttcggaaaatagcgccctgtgcagctgaagcgctttgtgtgtagcggggccgcgtcagcccggccgggtacgaggcgcctcgggtccccgcaccacctcctgctgccttcccgtcgccgctcccgaagcttttccagatgtccctggtagatttgggaaagaagcttttagaagcggcacgagcaggtcaagatgatgaagttcgtattttgatggcaaatggagctccctttactacagactggctgggaacttctccacttcatctagcagcacagtatggtcattattccaccacagaggtactgctgcgagctggtgtgagcagagatgccagaaccaaagtggaccgaacaccattacatatggcagcttctgagggccatgccagcatagtagaggttttacttaagcatggtgctgatgtcaatgcaaaggacatgttaaagatgacagctctccattgggccacagaacacaatcatcaagaggtggtggaacttttaatcaaatatggtgctgatgtacacacgcaaagtaaattttgtaaaactgcatttgatatttcaatagacaatggaaatgaagatttagcagagatattacagattgctatgcagaaccaaatcaacacaaacccagagagtcctgacactgtgacaatacatgctgcaacaccacagtttatcattggacctggaggggtggtgaacctaacagatgaaacgggtgtatctgctgttcagtttggaaactcttctacatcagtattagctacattagctgccttagctgaagcatctgctccattgtccaattcttcagaaactccagtagtggccacagaagaagtagttactgcagaatctgtggatggtgccattcagcaagtagttagttcagggggtcagcaagtcatcacaatagttacagatggaattcagcttggaaatttgcactctattccaaccagtggaattggtcagcccatcattgtgaccatgccagatggacaacaagtattaacagtaccagcaacagacattgctgaagaaactgttataagtgaagaaccaccagctaagagacaatgtatcgaaataattgaaaaccgggtggaatctgcagaaatagaagagagagaagctcttcagaaacagctggatgaagcaaatcgagaagcacaaaaatatcgacagcagctcctaaagaaagaacaggaagcagaggcctacagacagaagttggaagctatgactcgtcttcagactaataaagaagctgtttaattgaaatgaacatgtagtttgattttacttttggtcaagaaagaatacaatcttgaactgtacacaacaaaggtacagccatgggaatacagaatgatagaagagactacagatggataattggacttaagccatgagctctgagttcttgtaacataaaactttactttagaagttgtgaaatgtatttaaaactgaattctgtaaatagtttttttttttttacagttccaaatgagttgataaagattgttgaagagatccaaaaccagaataagccactgtttttgtgaattctttttgattttagtacaaaccttaatttctcagaaacggaacagttttaagggtgatcgttgttggttaggccaaatgttgtgtaataattatggtggactgatgctggaattactcctgtaggtataaacctctgtatgaagagaagatttctcccaggaaatctttgtacagctttaagttgtgtcagattctctgaaaacattttttagaaagcaaaatttttatatttgttcaatttcagctatacccaagtagatttacatgtatatgaagcaaatatttttaaaaatttctgtttgtacatattctgcatgttttataatttcaaaatgcatcacttacataggtatttctcccacagaaatgatgaaagtgaccagaaaaaaacaaaaacaaaacccctttactctgtaggtcattgaaacgaagtaagctggcagctggttttattggaatgacagtgttctcggaaggagcagcctacaagataacttgaatttgccaattctgcaaaatctgtgcttttttgaaaatttaagagtggggacgtgaaactgtattctgtgccttccatcatgatttccacatgaaagcactttaaggcactgattttaagataatgtttttggaaaacccaatgcatatgggtttctgaaatattttatggacttatttctccccaggaaatgattcttacggaaaaaaattgcttttgtatgtagaacaggaactttttgtattacagtgatgcaatagacatgtctaatgtaacttctacttttccttttgaaagctcagtgtctgtgctatgacttgctctcatcacaatattgttgaattccacaatgtatggacattaaacactggcagactgttcactttttcttttttttttttggtaaaatattacttcaaacccctttttcttgctttatttttcagtgttttattgctttatgaactgtttaaccctgaaatccctctaggttatctatactgtataaaaaagcaattacccttaaaactgtactctggcctacttttctattttgcaattaaatatctttttcacataaaaaaattgtagacttatgtttttatcacatcttattaacacattaaaaatgttatcctactgca

SEQ ID NO: 415651 - DNA, 2844 bp, Homo sapiens
atcatgcgtaacgactctcttaataaccagcgctaccggtcacagcatatttgtggaggaaggattattccctcctttgctggacctctagtatccatggcacttgcccattaaatgctagcagagcatcctcaccttcagtctccaaaatgcctctataaacatacaaagggccctgaagggggcagtgctgctaccaatgagaaccactgatttccaagaatccatctacattaatctaccatatggcggccgggcgcggtggctcacgcctgtaatcccagcactatgggaggccgaggcgggcagatcacgagatgtccctggtagatttgggaaagaagcttttagaagcggcacgagcaggtcaagatgatgaagttcgtattttgatggcaaatggagctccctttactacagactggctgggaacttctccacttcatctagcagcacagtatggtcattattccaccacagaggtactgctgcgagctggtgtgagcagagatgccagaaccaaagtggaccgaacaccattacatatggcagcttctgagggccatgccagcatagtagaggttttacttaagcatggtgctgatgtcaatgcaaaggacatgttaaagatgacagctctccattgggccacagaacacaatcatcaagaggtggtggaacttttaatcaaatatggtgctgatgtacacacgcaaagtaaattttgtaaaactgcatttgatatttcaatagacaatggaaatgaagatttagcagagatattacagattgctatgcagaaccaaatcaacacaaacccagagagtcctgacactgtgacaatacatgctgcaacaccacagtttatcattggacctggaggggtggtgaacctaacagatgaaacgggtgtatctgctgttcagtttggaaactcttctacatcagtattagctacattagctgccttagctgaagcatctgctccattgtccaattcttcagaaactccagtagtggccacagaagaagtagttactgcagaatctgtggatggtgccattcagcaagtagttagttcagggggtcagcaagtcatcacaatagttacagatggaattcagcttggaaatttgcactctattccaaccagtggaattggtcagcccatcattgtgaccatgccagatggacaacaagtattaacagtaccagcaacagacattgctgaagaaactgttataagtgaagaaccaccagctaagagacaatgtatcgaaataattgaaaaccgggtggaatctgcagaaatagaagagagagaagctcttcagaaacagctggatgaagcaaatcgagaagcacaaaaatatcgacagcagctcctaaagaaagaacaggaagcagaggcctacagacagaagttggaagctatgactcgtcttcagactaataaagaagctgtttaattgaaatgaacatgtagtttgattttacttttggtcaagaaagaatacaatcttgaactgtacacaacaaaggtacagccatgggaatacagaatgatagaagagactacagatggataattggacttaagccatgagctctgagttcttgtaacataaaactttactttagaagttgtgaaatgtatttaaaactgaattctgtaaatagtttttttttttttacagttccaaatgagttgataaagattgttgaagagatccaaaaccagaataagccactgtttttgtgaattctttttgattttagtacaaaccttaatttctcagaaacggaacagttttaagggtgatcgttgttggttaggccaaatgttgtgtaataattatggtggactgatgctggaattactcctgtaggtataaacctctgtatgaagagaagatttctcccaggaaatctttgtacagctttaagttgtgtcagattctctgaaaacattttttagaaagcaaaatttttatatttgttcaatttcagctatacccaagtagatttacatgtatatgaagcaaatatttttaaaaatttctgtttgtacatattctgcatgttttataatttcaaaatgcatcacttacataggtatttctcccacagaaatgatgaaagtgaccagaaaaaaacaaaaacaaaacccctttactctgtaggtcattgaaacgaagtaagctggcagctggttttattggaatgacagtgttctcggaaggagcagcctacaagataacttgaatttgccaattctgcaaaatctgtgcttttttgaaaatttaagagtggggacgtgaaactgtattctgtgccttccatcatgatttccacatgaaagcactttaaggcactgattttaagataatgtttttggaaaacccaatgcatatgggtttctgaaatattttatggacttatttctccccaggaaatgattcttacggaaaaaaattgcttttgtatgtagaacaggaactttttgtattacagtgatgcaatagacatgtctaatgtaacttctacttttccttttgaaagctcagtgtctgtgctatgacttgctctcatcacaatattgttgaattccacaatgtatggacattaaacactggcagactgttcactttttcttttttttttttggtaaaatattacttcaaacccctttttcttgctttatttttcagtgttttattgctttatgaactgtttaaccctgaaatccctctaggttatctatactgtataaaaaagcaattacccttaaaactgtactctggcctacttttctattttgcaattaaatatctttttcacata

SEQ ID NO: 415652 - DNA, 3017 bp, Homo sapiens
cccgcgggaacacagctagggagtgggtaggagcaggatctgccgacgagggcagaggcggaaaatcctcgggcgatgagctgaagagggccgggtccgggagggatgctgggagcttgactcactcgcacaccatgtgtccctccgcgcgcagcacgggggacttttcggtggggattttgggcgccgaccagacgcggcattttcggaaaatagcgccctgtgcagctgaagcgctttgtgtgtagcggggccgcgtcagcccggccgggtacgaggcgcctcgggtccccgcaccacctcctgctgccttcccgtcgccgctcccgaagcttttccagatgtccctggtagatttgggaaagaagcttttagaagcggcacgagcaggtcaagatgatgaagttcgtattttgatggcaaatggagctccctttactacagactggctgggaacttctccacttcatctagcagcacagtatggtcattattccaccacagaggtactgctgcgagctggtgtgagcagagatgccagaaccaaagtggaccgaacaccattacatatggcagcttctgagggccatgccagcatagtagaggttttacttaagcatggtgctgatgtcaatgcaaaggacatgttaaagatgacagctctccattgggccacagaacacaatcatcaagaggtggtggaacttttaatcaaatatggtgctgatgtacacacgcaaagtaaattttgtaaaactgcatttgatatttcaatagacaatggaaatgaagatttagcagagatattacagattgctatgcagaaccaaatcaacacaaacccagagagtcctgacactgtgacaatacatgctgcaacaccacagtttatcattggacctggaggggtggtgaacctaacaggtctggtatcttcagaaaattcatccaaggcaacagatgaaacgggtgtatctgctgttcagtttggaaactcttctacatcagtattagctacattagctgccttagctgaagcatctgctccattgtccaattcttcagaaactccagtagtggccacagaagaagtagttactgcagaatctgtggatggtgccattcagcaagtagttagttcagggggtcagcaagtcatcacaatagttacagatggaattcagcttggaaatttgcactctattccaaccagtggaattggtcagcccatcattgtgaccatgccagatggacaacaagtattaacagtaccagcaacagacattgctgaagaaactgttataagtgaagaaccaccagctaagagacaatgtatcgaaataattgaaaaccgggtggaatctgcagaaatagaaagagggtgtcttgctatgttgcccaggctggtcttggactcctggcctcaagtgatcctcccacctcagcctcctgaagagttgagattactggcataagtcaccatatccaggagagagaagctcttcagaaacagctggatgaagcaaatcgagaagcacaaaaatatcgacagcagctcctaaagaaagaacaggaagcagaggcctacagacagaagttggaagctatgactcgtcttcagactaataaagaagctgtttaattgaaatgaacatgtagtttgattttacttttggtcaagaaagaatacaatcttgaactgtacacaacaaaggtacagccatgggaatacagaatgatagaagagactacagatggataattggacttaagccatgagctctgagttcttgtaacataaaactttactttagaagttgtgaaatgtatttaaaactgaattctgtaaatagtttttttttttttacagttccaaatgagttgataaagattgttgaagagatccaaaaccagaataagccactgtttttgtgaattctttttgattttagtacaaaccttaatttctcagaaacggaacagttttaagggtgatcgttgttggttaggccaaatgttgtgtaataattatggtggactgatgctggaattactcctgtaggtataaacctctgtatgaagagaagatttctcccaggaaatctttgtacagctttaagttgtgtcagattctctgaaaacattttttagaaagcaaaatttttatatttgttcaatttcagctatacccaagtagatttacatgtatatgaagcaaatatttttaaaaatttctgtttgtacatattctgcatgttttataatttcaaaatgcatcacttacataggtatttctcccacagaaatgatgaaagtgaccagaaaaaaacaaaaacaaaacccctttactctgtaggtcattgaaacgaagtaagctggcagctggttttattggaatgacagtgttctcggaaggagcagcctacaagataacttgaatttgccaattctgcaaaatctgtgcttttttgaaaatttaagagtggggacgtgaaactgtattctgtgccttccatcatgatttccacatgaaagcactttaaggcactgattttaagataatgtttttggaaaacccaatgcatatgggtttctgaaatattttatggacttatttctccccaggaaatgattcttacggaaaaaaattgcttttgtatgtagaacaggaactttttgtattacagtgatgcaatagacatgtctaatgtaacttctacttttccttttgaaagctcagtgtctgtgctatgacttgctctcatcacaatattgttgaattccacaatgtatggacattaaacactggcagactgttcactttttcttttttttttttggtaaaatattacttcaaacccctttttcttgctttatttttcagtgttttattgctttatgaactgtttaaccctgaaatccctctaggttatctatactgtataaaaaagcaattacccttaaaactgtactctggcctacttttctattttgcaattaaatatctttttcacata

SEQ ID NO: 415653 - DNA, 1929 bp, Homo sapiens
cccgcgggaacacagctagggagtgggtaggagcaggatctgccgacgagggcagaggcggaaaatcctcgggcgatgagctgaagagggccgggtccgggagggatgctgggagcttgactcactcgcacaccatgtgtccctccgcgcgcagcacgggggacttttcggtggggattttgggcgccgaccagacgcggcattttcggaaaatagcgccctgtgcagctgaagcgctttgtgtgtagcggggccgcgtcagcccggccgggtacgaggcgcctcgggtccccgcaccacctcctgctgccttcccgtcgccgctcccgaagcttttccagatgtccctggtagatttgggaaagaagcttttagaagcggcacgagcaggtcaagatgatgaagttcgtattttgatggcaaatggagctccctttactacagactggctgggaacttctccacttcatctagcagcacagtatggtcattattccaccacagaggtactgctgcgagctggtgtgagcagagatgccagaaccaaagtggaccgaacaccattacatatggcagcttctgagggccatgccagcatagtagaggttttacttaagcatggtgctgatgtcaatgcaaaggacatgttaaagatgacagctctccattgggccacagaacacaatcatcaagaggtggtggaacttttaatcaaatatggtgctgatgtacacacgcaaagtaaattttgtaaaactgcatttgatatttcaatagacaatggaaatgaagatttagcagagatattacagattgctatgcagaaccaaatcaacacaaacccagagagtcctgacactgtgacaatacatgctgcaacaccacagtttatcattggacctggaggggtggtgaacctaacagatgaaacgggtgtatctgctgttcagtttggaaactcttctacatcagtattagctacattagctgccttagctgaagcatctgctccattgtccaattcttcagaaactccagtagtggccacagaagaagtagttactgcagaatctgtggatggtgccattcagcaagtagttagttcagggggtcagcaagtcatcacaatagttacagatggaattcagcttggaaatttgcactctattccaaccagtggaattggtcagcccatcattgtgaccatgccagatggacaacaagtattaacagtaccagcaacagacattgctgaagaaactgttataagtgaagaaccaccagctaagagacaatgtatcgaaataattgaaaaccgggtggaatctgcagaaatagaagtaaggagtcttttacccggtgtgctttgccgcagtcatccaaaataaattcaattttttttgtcttttatatttattactgacagtattgttttgatacagaatgaaagtgcgtagtattttcattttgtttatttttgccttatacatatagcaagccctcaataaataaatattgaatgaatgaatgagtgagtgaagaatttgtttataacagtctgtcatcttgataacactggaatgtctttggttcttccacttcatcctttatgttttaaacttacacacaccattcttacacgtcactaaaggaaaataccagtatatattggctaaaattttttttttgttgttcaaaactgaaactcaaatgcctaattgggctaggggtcctcttaaaggaggttgatgtttgtcaaatgggttattttttaaaagcagtagataattgcttatttcaaggcaagtaaatgaatttagactagctgttcataggattcatcattttttcccctctcccaaagtaatttgtaagcgtaaaccagtttgtaggtgtaacaaaaccatagttgcttcacaggtttttttc

SEQ ID NO: 415654 - DNA, 249 bp, Homo sapiens
gtgaattgattgaaaaggcaagatgtctaggaaatttcaataggtggctgcttttagctactacggtttttttttttaatttgaaggatgcatgcttatatgtattaataatgtatttttgcaaaaattaaaaaaaaaaccctcttcttttaattaggagagagaagctcttcagaaacagctggatgaagcaaatcgagaagcacaaaaatatcgacagcagctcctaaagaaagaacaggaagcaga

SEQ ID NO: 415655 - DNA, 3776 bp, Homo sapiens
cattcataagactcagagctacggccacggcagggacacgcggaaccaagacttggaaacttgattgttgtggttcttcttgggggttatgaaatttcattaatcttttttttttccggggagaaagtttttggaaagattcttccagatatttcttcattttcttttggaggaccgacttactttttttggtcttctttattactcccctccccccgtgggacccgccggacgcgtggaggagaccgtagctgaagctgattctgtacagcgggacagcgctttctgcccctgggggagcaacccctccctcgcccctgggtcctacggagcctgcactttcaagaggtacagcggcatcctgtgggggcctgggcaccgcaggaagactgcacagaaactttgccattgttggaacgggacgttgctccttccccgagcttccccggacagcgtactttgaggactcgctcagctcaccggggactcccacggctcaccccggacttgcaccttacttccccaacccggccatagccttggcttcccggcgacctcagcgtggtcacaggggcccccctgtgcccagggaaatgtttcaggctttccccggagactacgactccggctcccggtgcagctcctcaccctctgccgagtctcaatatctgtcttcggtggactccttcggcagtccacccaccgccgcggcctcccaggagtgcgccggtctcggggaaatgcccggttccttcgtgcccacggtcaccgcgatcacaaccagccaggacctccagtggcttgtgcaacccaccctcatctcttccatggcccagtcccaggggcagccactggcctcccagcccccggtcgtcgacccctacgacatgccgggaaccagctactccacaccaggcatgagtggctacagcagtggcggagcgagtggcagtggtgggccttccaccagcggaactaccagtgggcctgggcctgcccgcccagcccgagcccggcctaggagaccccgagaggagacgctcaccccagaggaagaggagaagcgaagggtgcgccgggaacgaaataaactagcagcagctaaatgcaggaaccggcggagggagctgaccgaccgactccaggcggagacagatcagttggaggaagaaaaagcagagctggagtcggagatcgccgagctccaaaaggagaaggaacgtctggagtttgtgctggtggcccacaaaccgggctgcaagatcccctacgaagaggggcccgggccgggcccgctggcggaggtgagagatttgccgggctcagcaccggctaaggaagatggcttcagctggctgctgccgcccccgccaccaccgcccctgcccttccagaccagccaagacgcaccccccaacctgacggcttctctctttacacacagtgaagttcaagtcctcggcgaccccttccccgttgttaacccttcgtacacttcttcgtttgtcctcacctgcccggaggtctccgcgttcgccggcgcccaacgcaccagcggcagtgaccagccttccgatcccctgaactcgccctccctcctcgctctgtgaactctttagacacacaaaacaaacaaacacatgggggagagagacttggaagaggaggaggaggaggagaaggaggagagagaggggaagagacaaagtgggtgtgtggcctccctggctcctccgtctgaccctctgcggccactgcgccactgccatcggacaggaggattccttgtgttttgtcctgcctcttgtttctgtgccccggcgaggccggagagctggtgactttggggacagggggtgggaaggggatggacacccccagctgactgttggctctctgacgtcaacccaagctctggggatgggtggggaggggggcgggtgacgcccaccttcgggcagtcctgtgtgaggatgaagggacgggggtgggaggtaggctgtggggtgggctggagtcctctccagagaggctcaacaaggaaaaatgccactccctacccaatgtctcccacacccaccctttttttggggtgcctaggttggtttcccctgcactcccgaccttagcttattgatcccacatttccatggtgtgagatcctctttactctgggcagaagtgagcccccccttaaagggaattcgatgcccccctagaataatctcatccccccacccgacttcttttgaaatgtgaacgtccttccttgactgtctagccactccctcccagaaaaactggctctgattggaatttctggcctcctaaggctccccaccccgaaatcagcccccagccttgtttctgatgacagtgttatcccaagaccctgccccctgccagccgaccctcctggccttcctcgttgggccgctctgatttcaggcagcaggggctgctgtgatgccgtcctgctggagtgatttatactgtgaaatgagttggccagattgtggggtgcagctgggtggggcagcacacctctggggggataatgtccccactcccgaaagcctttcctcggtctcccttccgtccatcccccttcttcctcccctcaacagtgagttagactcaagggggtgacagaaccgagaagggggtgacagtcctccatccacgtggcctctctctctctcctcaggaccctcagccctggcctttttctttaaggtcccccgaccaatccccagcctaggacgccaacttctcccaccccttggcccctcacatcctctccaggaagggagtgaggggctgtgacatttttccggagaagatttcagagctgaggctttggtacccccaaacccccaatatttttggactggcagactcaaggggctggaatctcatgattccatgcccgagtccgcccatccctgaccatggttttggctctcccaccccgccgttccctgcgcttcatctcatgaggatttctttatgaggcaaatttatattttttaatatcggggggtggaccacgccgccctccatccgtgctgcatgaaaaacattccacgtgccccttgtcgcgcgtctcccatcctgatcccagacccattccttagctatttatccctttcctggtttccgaaaggcaattatatctattatgtataagtaaatatattatatatggatgtgtgtgtgtgcgtgcgcgtgagtgtgtgagcgcttctgcagcctcggcctaggtcacgttggccctcaaagcgagccgttgaattggaaactgcttctagaaactctggctcagcctgtctcgggctgacccttttctgatcgtctcggcccctctgattgttcccgatggtctctctccctctgtcttttctcctccgcctgtgtccatctgaccgttttcacttgtctcctttctgactgtccctgccaatgctccagctgtcgtctgactctgggttcgttggggacatgagattttattttttgtgagtgagactgagggatcgtagatttttacaatctgtatctttgacaattctgggtgcgagtgtgagagtgtgagcagggcttgctcctgccaaccacaattcaatgaatccccgacccccctaccccatgctgtacttgtggttctctttttgtattttgcatctgaccccggggggctgggacagattggcaatgggccgtcccctctccccttggttctgcactgttgccaataaaaagctcttaaaaacgca

SEQ ID NO: 415656 - DNA, 1298 bp, Homo sapiens
cattcataagactcagagctacggccacggcagggacacgcggaaccaagacttggaaacttgattgttgtggttcttcttgggggttatgaaatttcattaatcttttttttttccggggagaaagtttttggaaagattcttccagatatttcttcattttcttttggaggaccgacttactttttttggtcttctttattactcccctccccccgtgggacccgccggacgcgtggaggagaccgtagctgaagctgattctgtacagcgggacagcgctttctgcccctgggggagcaacccctccctcgcccctgggtcctacggagcctgcactttcaagaggtacagcggcatcctgtgggggcctgggcaccgcaggaagactgcacagaaactttgccattgttggaacgggacgttgctccttccccgagcttccccggacagcgtactttgaggactcgctcagctcaccggggactcccacggctcaccccggacttgcaccttacttccccaacccggccatagccttggcttcccggcgacctcagcgtggtcacaggggcccccctgtgccctgcaggtgtcgtgcttccgtgaggagagggacgtgttggtgaatggggaccggcggtggatcacgcagctgcacttcgccttccaggatgagaactacctggtgagctccgggccggggtgactaggaagagggacaagagcccgtgctgtcactggacgaggaggtggggagaggaagctctaggattgggggtgctgcccggaaacgtctgtgggaaagtctgtgtgcggtaagagggtgtgtcaggtggatgaggggccttccctatctgagacggggatggtgtccttcactgcccgtttctggggtgatctgggggactcttataaagatgtctctgttgcggggggtctcttacctggaatgggataggtcttcaggaattctaacggggccactgcctagggaaggagtgtctgggacctattctctgggtgttgggtggcctctgggttctctttcccagaacatctcagggggagtgaatctgcccagtgacatcccaggaaagtttttttgtttgtgtttttttttgaggggcgggggcgggggccgcaggtggtctctgatttggcccggcagatctctatggttatctctgggctggggctgcaggtctctgcccaaggatggggtgtctctgggaggggttgtcccagccatccgtgatggatcagggcctcaggggactaccaaccacccatgacga

SEQ ID NO: 415657 - DNA, 829 bp, Homo sapiens
cattcataagactcagagctacggccacggcagggacacgcggaaccaagacttggaaacttgattgttgtggttcttcttgggggttatgaaatttcattaatcttttttttttccggggagaaagtttttggaaagattcttccagatatttcttcattttcttttggaggaccgacttactttttttggtcttctttattactcccctccccccgtgggacccgccggacgcgtggaggagaccgtagctgaagctgattctgtacagcgggacagcgctttctgcccctgggggagcaacccctccctcgcccctgggtcctacggagcctgcactttcaagaggtacagcggcatcctgtgggggcctgggcctacagcgcctttgggacctgtgctacattcctaaccacagcaatagtaagaatcttgatgtggaatttttcaagagagtgcggtcttcctactacgtggtgagtgggaatgacccttgctgttgaggagcccagccgggctgtcctggacgcttggtgggaaggaaaggctcaggggggcagcaacatgcaggtgacactgatcccaactcatgactcagaagtgatgagggaatggtaccaggagacccatgagaaacagcaagatctcaacatcagggttttagcaagcagcagcacaggggttatgcaagatgattccttcctggcatgcaagatggacctgtaaaaaccagggccagccacaccacaggatctgaactttgtttccagaaattcttcaatttgaaatcaccttttctaaaaagtcaatccatctagtaaaggcgctg

SEQ ID NO: 415658 - DNA, 3636 bp, Homo sapiens
cattcataagactcagagctacggccacggcagggacacgcggaaccaagacttggaaacttgattgttgtggttcttcttgggggttatgaaatttcattaatcttttttttttccggggagaaagtttttggaaagattcttccagatatttcttcattttcttttggaggaccgacttactttttttggtcttctttattactcccctccccccgtgggacccgccggacgcgtggaggagaccgtagctgaagctgattctgtacagcgggacagcgctttctgcccctgggggagcaacccctccctcgcccctgggtcctacggagcctgcactttcaagaggtacagcggcatcctgtgggggcctgggcaccgcaggaagactgcacagaaactttgccattgttggaacgggacgttgctccttccccgagcttccccggacagcgtactttgaggactcgctcagctcaccggggactcccacggctcaccccggacttgcaccttacttccccaacccggccatagccttggcttcccggcgacctcagcgtggtcacaggggcccccctgtgcccagggaaatgtttcaggctttccccggagactacgactccggctcccggtgcagctcctcaccctctgccgagtctcaatatctgtcttcggtggactccttcggcagtccacccaccgccgcggcctcccaggagtgcgccggtctcggggaaatgcccggttccttcgtgcccacggtcaccgcgatcacaaccagccaggacctccagtggcttgtgcaacccaccctcatctcttccatggcccagtcccaggggcagccactggcctcccagcccccggtcgtcgacccctacgacatgccgggaaccagctactccacaccaggcatgagtggctacagcagtggcggagcgagtggcagtggtgggccttccaccagcggaactaccagtgggcctgggcctgcccgcccagcccgagcccggcctaggagaccccgagaggagacgctcaccccagaggaagaggagaagcgaagggtgcgccgggaacgaaataaactagcagcagctaaatgcaggaaccggcggagggagctgaccgaccgactccaggcggagacagatcagttggaggaagaaaaagcagagctggagtcggagatcgccgagctccaaaaggagaaggaacgtctggagtttgtgctggtggcccacaaaccgggctgcaagatcccctacgaagaggggcccgggccgggcccgctggcggagtgaagttcaagtcctcggcgaccccttccccgttgttaacccttcgtacacttcttcgtttgtcctcacctgcccggaggtctccgcgttcgccggcgcccaacgcaccagcggcagtgaccagccttccgatcccctgaactcgccctccctcctcgctctgtgaactctttagacacacaaaacaaacaaacacatgggggagagagacttggaagaggaggaggaggaggagaaggaggagagagaggggaagagacaaagtgggtgtgtggcctccctggctcctccgtctgaccctctgcggccactgcgccactgccatcggacaggaggattccttgtgttttgtcctgcctcttgtttctgtgccccggcgaggccggagagctggtgactttggggacagggggtgggaaggggatggacacccccagctgactgttggctctctgacgtcaacccaagctctggggatgggtggggaggggggcgggtgacgcccaccttcgggcagtcctgtgtgaggatgaagggacgggggtgggaggtaggctgtggggtgggctggagtcctctccagagaggctcaacaaggaaaaatgccactccctacccaatgtctcccacacccaccctttttttggggtgcctaggttggtttcccctgcactcccgaccttagcttattgatcccacatttccatggtgtgagatcctctttactctgggcagaagtgagcccccccttaaagggaattcgatgcccccctagaataatctcatccccccacccgacttcttttgaaatgtgaacgtccttccttgactgtctagccactccctcccagaaaaactggctctgattggaatttctggcctcctaaggctccccaccccgaaatcagcccccagccttgtttctgatgacagtgttatcccaagaccctgccccctgccagccgaccctcctggccttcctcgttgggccgctctgatttcaggcagcaggggctgctgtgatgccgtcctgctggagtgatttatactgtgaaatgagttggccagattgtggggtgcagctgggtggggcagcacacctctggggggataatgtccccactcccgaaagcctttcctcggtctcccttccgtccatcccccttcttcctcccctcaacagtgagttagactcaagggggtgacagaaccgagaagggggtgacagtcctccatccacgtggcctctctctctctcctcaggaccctcagccctggcctttttctttaaggtcccccgaccaatccccagcctaggacgccaacttctcccaccccttggcccctcacatcctctccaggaagggagtgaggggctgtgacatttttccggagaagatttcagagctgaggctttggtacccccaaacccccaatatttttggactggcagactcaaggggctggaatctcatgattccatgcccgagtccgcccatccctgaccatggttttggctctcccaccccgccgttccctgcgcttcatctcatgaggatttctttatgaggcaaatttatattttttaatatcggggggtggaccacgccgccctccatccgtgctgcatgaaaaacattccacgtgccccttgtcgcgcgtctcccatcctgatcccagacccattccttagctatttatccctttcctggtttccgaaaggcaattatatctattatgtataagtaaatatattatatatggatgtgtgtgtgtgcgtgcgcgtgagtgtgtgagcgcttctgcagcctcggcctaggtcacgttggccctcaaagcgagccgttgaattggaaactgcttctagaaactctggctcagcctgtctcgggctgacccttttctgatcgtctcggcccctctgattgttcccgatggtctctctccctctgtcttttctcctccgcctgtgtccatctgaccgttttcacttgtctcctttctgactgtccctgccaatgctccagctgtcgtctgactctgggttcgttggggacatgagattttattttttgtgagtgagactgagggatcgtagatttttacaatctgtatctttgacaattctgggtgcgagtgtgagagtgtgagcagggcttgctcctgccaaccacaattcaatgaatccccgacccccctaccccatgctgtacttgtggttctctttttgtattttgcatctgaccccggggggctgggacagattggcaatgggccgtcccctctccccttggttctgcactgttgccaataaaaagctcttaaaaacgca

SEQ ID NO: 415659 - DNA, 3152 bp, Homo sapiens
ccccgaggagaaggaggaggtagaagccagttgagcagaaatcctctcattaaccactgcgtcacggtgtagtggaagggtgggtgttgtggctttttccctgtgacacacacatccacactcgctcaccctgtgctcactcacggggtcggtgtgtgttatgtgtgttgggtgtgtgtgtgtcggtgtctttgtttgtgtgtctacgcctgtgtgtgtatgtgtcaccccgtaggagtgcgccggtctcggggaaatgcccggttccttcgtgcccacggtcaccgcgatcacaaccagccaggacctccagtggcttgtgcaacccaccctcatctcttccatggcccagtcccaggggcagccactggcctcccagcccccggtcgtcgacccctacgacatgccgggaaccagctactccacaccaggcatgagtggctacagcagtggcggagcgagtggcagtggtgggccttccaccagcggaactaccagtgggcctgggcctgcccgcccagcccgagcccggcctaggagaccccgagaggagacgctcaccccagaggaagaggagaagcgaagggtgcgccgggaacgaaataaactagcagcagctaaatgcaggaaccggcggagggagctgaccgaccgactccaggcggagacagatcagttggaggaagaaaaagcagagctggagtcggagatcgccgagctccaaaaggagaaggaacgtctggagtttgtgctggtggcccacaaaccgggctgcaagatcccctacgaagaggggcccgggccgggcccgctggcggagtgaagttcaagtcctcggcgaccccttccccgttgttaacccttcgtacacttcttcgtttgtcctcacctgcccggaggtctccgcgttcgccggcgcccaacgcaccagcggcagtgaccagccttccgatcccctgaactcgccctccctcctcgctctgtgaactctttagacacacaaaacaaacaaacacatgggggagagagacttggaagaggaggaggaggaggagaaggaggagagagaggggaagagacaaagtgggtgtgtggcctccctggctcctccgtctgaccctctgcggccactgcgccactgccatcggacaggaggattccttgtgttttgtcctgcctcttgtttctgtgccccggcgaggccggagagctggtgactttggggacagggggtgggaaggggatggacacccccagctgactgttggctctctgacgtcaacccaagctctggggatgggtggggaggggggcgggtgacgcccaccttcgggcagtcctgtgtgaggatgaagggacgggggtgggaggtaggctgtggggtgggctggagtcctctccagagaggctcaacaaggaaaaatgccactccctacccaatgtctcccacacccaccctttttttggggtgcctaggttggtttcccctgcactcccgaccttagcttattgatcccacatttccatggtgtgagatcctctttactctgggcagaagtgagcccccccttaaagggaattcgatgcccccctagaataatctcatccccccacccgacttcttttgaaatgtgaacgtccttccttgactgtctagccactccctcccagaaaaactggctctgattggaatttctggcctcctaaggctccccaccccgaaatcagcccccagccttgtttctgatgacagtgttatcccaagaccctgccccctgccagccgaccctcctggccttcctcgttgggccgctctgatttcaggcagcaggggctgctgtgatgccgtcctgctggagtgatttatactgtgaaatgagttggccagattgtggggtgcagctgggtggggcagcacacctctggggggataatgtccccactcccgaaagcctttcctcggtctcccttccgtccatcccccttcttcctcccctcaacagtgagttagactcaagggggtgacagaaccgagaagggggtgacagtcctccatccacgtggcctctctctctctcctcaggaccctcagccctggcctttttctttaaggtcccccgaccaatccccagcctaggacgccaacttctcccaccccttggcccctcacatcctctccaggaagggagtgaggggctgtgacatttttccggagaagatttcagagctgaggctttggtacccccaaacccccaatatttttggactggcagactcaaggggctggaatctcatgattccatgcccgagtccgcccatccctgaccatggttttggctctcccaccccgccgttccctgcgcttcatctcatgaggatttctttatgaggcaaatttatattttttaatatcggggggtggaccacgccgccctccatccgtgctgcatgaaaaacattccacgtgccccttgtcgcgcgtctcccatcctgatcccagacccattccttagctatttatccctttcctggtttccgaaaggcaattatatctattatgtataagtaaatatattatatatggatgtgtgtgtgtgcgtgcgcgtgagtgtgtgagcgcttctgcagcctcggcctaggtcacgttggccctcaaagcgagccgttgaattggaaactgcttctagaaactctggctcagcctgtctcgggctgacccttttctgatcgtctcggcccctctgattgttcccgatggtctctctccctctgtcttttctcctccgcctgtgtccatctgaccgttttcacttgtctcctttctgactgtccctgccaatgctccagctgtcgtctgactctgggttcgttggggacatgagattttattttttgtgagtgagactgagggatcgtagatttttacaatctgtatctttgacaattctgggtgcgagtgtgagagtgtgagcagggcttgctcctgccaaccacaattcaatgaatccccgacccccctaccccatgctgtacttgtggttctctttttgtattttgcatctgaccccggggggctgggacagattggcaatgggccgtcccctctccccttggttctgcactgttgccaataaaaagctcttaaaaacgca

SEQ ID NO: 415660 - DNA, 2800 bp, Homo sapiens
ttgccccaactcccatggccaccaggactccatctcaggaggtgttttttctcagcccggggctgccttccagcagcaagtccaagggagccatgacccgagtttcccggtcactgacatgcttttttctccttcctctctctcttctgtgacctggcctccctggcctcaggagacagatcagttggaggaagaaaaagcagagctggagtcggagatcgccgagctccaaaaggagaaggaacgtctggagtttgtgctggtggcccacaaaccgggctgcaagatcccctacgaagaggggcccgggccgggcccgctggcggaggtgagagatttgccgggctcagcaccggctaaggaagatggcttcagctggctgctgccgcccccgccaccaccgcccctgcccttccagaccagccaagacgcaccccccaacctgacggcttctctctttacacacagtgaagttcaagtcctcggcgaccccttccccgttgttaacccttcgtacacttcttcgtttgtcctcacctgcccggaggtctccgcgttcgccggcgcccaacgcaccagcggcagtgaccagccttccgatcccctgaactcgccctccctcctcgctctgtgaactctttagacacacaaaacaaacaaacacatgggggagagagacttggaagaggaggaggaggaggagaaggaggagagagaggggaagagacaaagtgggtgtgtggcctccctggctcctccgtctgaccctctgcggccactgcgccactgccatcggacaggaggattccttgtgttttgtcctgcctcttgtttctgtgccccggcgaggccggagagctggtgactttggggacagggggtgggaaggggatggacacccccagctgactgttggctctctgacgtcaacccaagctctggggatgggtggggaggggggcgggtgacgcccaccttcgggcagtcctgtgtgaggatgaagggacgggggtgggaggtaggctgtggggtgggctggagtcctctccagagaggctcaacaaggaaaaatgccactccctacccaatgtctcccacacccaccctttttttggggtgcctaggttggtttcccctgcactcccgaccttagcttattgatcccacatttccatggtgtgagatcctctttactctgggcagaagtgagcccccccttaaagggaattcgatgcccccctagaataatctcatccccccacccgacttcttttgaaatgtgaacgtccttccttgactgtctagccactccctcccagaaaaactggctctgattggaatttctggcctcctaaggctccccaccccgaaatcagcccccagccttgtttctgatgacagtgttatcccaagaccctgccccctgccagccgaccctcctggccttcctcgttgggccgctctgatttcaggcagcaggggctgctgtgatgccgtcctgctggagtgatttatactgtgaaatgagttggccagattgtggggtgcagctgggtggggcagcacacctctggggggataatgtccccactcccgaaagcctttcctcggtctcccttccgtccatcccccttcttcctcccctcaacagtgagttagactcaagggggtgacagaaccgagaagggggtgacagtcctccatccacgtggcctctctctctctcctcaggaccctcagccctggcctttttctttaaggtcccccgaccaatccccagcctaggacgccaacttctcccaccccttggcccctcacatcctctccaggaagggagtgaggggctgtgacatttttccggagaagatttcagagctgaggctttggtacccccaaacccccaatatttttggactggcagactcaaggggctggaatctcatgattccatgcccgagtccgcccatccctgaccatggttttggctctcccaccccgccgttccctgcgcttcatctcatgaggatttctttatgaggcaaatttatattttttaatatcggggggtggaccacgccgccctccatccgtgctgcatgaaaaacattccacgtgccccttgtcgcgcgtctcccatcctgatcccagacccattccttagctatttatccctttcctggtttccgaaaggcaattatatctattatgtataagtaaatatattatatatggatgtgtgtgtgtgcgtgcgcgtgagtgtgtgagcgcttctgcagcctcggcctaggtcacgttggccctcaaagcgagccgttgaattggaaactgcttctagaaactctggctcagcctgtctcgggctgacccttttctgatcgtctcggcccctctgattgttcccgatggtctctctccctctgtcttttctcctccgcctgtgtccatctgaccgttttcacttgtctcctttctgactgtccctgccaatgctccagctgtcgtctgactctgggttcgttggggacatgagattttattttttgtgagtgagactgagggatcgtagatttttacaatctgtatctttgacaattctgggtgcgagtgtgagagtgtgagcagggcttgctcctgccaaccacaattcaatgaatccccgacccccctaccccatgctgtacttgtggttctctttttgtattttgcatctgaccccggggggctgggacagattggcaatgggccgtcccctctccccttggttctgcactgttgccaataaaaagctcttaaaaacgca

SEQ ID NO: 415661 - DNA, 3582 bp, Homo sapiens
cattcataagactcagagctacggccacggcagggacacgcggaaccaagacttggaaacttgattgttgtggttcttcttgggggttatgaaatttcattaatcttttttttttccggggagaaagtttttggaaagattcttccagatatttcttcattttcttttggaggaccgacttactttttttggtcttctttattactcccctccccccgtgggacccgccggacgcgtggaggagaccgtagctgaagctgattctgtacagcgggacagcgctttctgcccctgggggagcaacccctccctcgcccctgggtcctacggagcctgcactttcaagaggtacagcggcatcctgtgggggcctgggcaccgcaggaagactgcacagaaactttgccattgttggaacgggacgttgctccttccccgagcttccccggacagcgtactttgaggactcgctcagctcaccggggactcccacggctcaccccggacttgcaccttacttccccaacccggccatagccttggcttcccggcgacctcagcgtggtcacaggggcccccctgtgcccagggaaatgtttcaggctttccccggagactacgactccggctcccggtgcagctcctcaccctctgccgagtctcaatatctgtcttcggtggactccttcggcagtccacccaccgccgcggcctcccaggagtgcgccggtctcggggaaatgcccggttccttcgtgcccacggtcaccgcgatcacaaccagccaggacctccagtggcttgtgcaacccaccctcatctcttccatggcccagtcccaggggcagccactggcctcccagcccccggtcgtcgacccctacgacatgccgggaaccagctactccacaccaggcatgagtggctacagcagtggcggagcgagtggcagtggtgggccttccaccagcggaactaccagtgggcctgggcctgcccgcccagcccgagcccggcctaggagaccccgagaggagacgctcaccccagaggaagaggagaagcgaagggtgcgccgggaacgaaataaactagcagcagctaaatgcaggaaccggcggagggagctgaccgaccgactccaggcggagacagatcagttggaggaagaaaaagcagagctggagtcggagatcgccgagctccaaaaggagaaggaacgtctggagtttgtgctggtggcccacaaaccgggctgcaagatcccctacgaagaggggcccgggccgggcccgctggcggagtgaagttcaagtcctcggcgaccccttccccgttgttaacccttcgtacacttcttcgtttgtcctcacctgcccggaggtctccgcgttcgccggcgcccaacgcaccagcggcagtgaccagccttccgatcccctgaactcgccctccctcctcgctctgtgaactctttagacacacaaaacaaacaaacacatgggggagagagacttggaagaggaggaggaggaggagaaggaggagagagaggggaagagacaaagtgggtgtgtggcctccctggctcctccgtctgaccctctgcggccactgcgccactgccatcggacaggaggattccttgtgttttgtcctgcctcttgtttctgtgccccggcgaggccggagagctggtgactttggggacagggggtgggaaggggatggacacccccagctgactgttggctctctgacgtcaacccaagctctggggatgggtggggaggggggcgggtgacgcccaccttcgggcagtcctgtgtgaggatgaagggacgggggtgggaggtaggctgtggggtgggctggagtcctctccagagaggctcaacaaggaaaaatgccactccctacccaatgtctcccacacccaccctttttttggggtgcctaggttggtttcccctgcactcccgaccttagcttattgatcccacatttccatggtgtgagatcctctttactctgggcagaagtgagcccccccttaaagggaattcgatgcccccctagaataatctcatccccccacccgacttcttttgaaatgtgaacgtccttccttgactgtctagccactccctcccagaaaaactggctctgattggaatttctggcctcctaaggctccccaccccgaaatcagcccccagccttgtttctgatgacagtgttatcccaagaccctgccccctgccagccgaccctcctggccttcctcgttgggccgctctgatttcaggcagcaggggctgctgtgatgccgtcctgctggagtgatttatactgtgaaatgagttggccagattgtggggtgcagctgggtggggcagcacacctctggggggataatgtccccactcccgaaagcctttcctcggtctcccttccgtccatcccccttcttcctcccctcaacagtgagttagactcaagggggtgacagaaccgagaagggggtgacagtcctccatccacgtggcctctctctctctcctcaggaccctcagccctggcctttttctttaaggtcccccgaccaatccccagcctaggacgccaacttctcccaccccttggcccctcacatcctctccaggaagggagtgaggggctgtgacatttttccggagaagatttcagagctgaggctttggtacccccaaacccccaatatttttggactggcagactcaaggggctggaatctcatgattccatgcccgagtccgcccatccctgaccatggttttggctctcccaccccgccgttccctgcgcttcatctcatgaggatttctttatgaggcaaatttatattttttaatatcggggggtggaccacgccgccctccatccgtgctgcatgatccttagctatttatccctttcctggtttccgaaaggcaattatatctattatgtataagtaaatatattatatatggatgtgtgtgtgtgcgtgcgcgtgagtgtgtgagcgcttctgcagcctcggcctaggtcacgttggccctcaaagcgagccgttgaattggaaactgcttctagaaactctggctcagcctgtctcgggctgacccttttctgatcgtctcggcccctctgattgttcccgatggtctctctccctctgtcttttctcctccgcctgtgtccatctgaccgttttcacttgtctcctttctgactgtccctgccaatgctccagctgtcgtctgactctgggttcgttggggacatgagattttattttttgtgagtgagactgagggatcgtagatttttacaatctgtatctttgacaattctgggtgcgagtgtgagagtgtgagcagggcttgctcctgccaaccacaattcaatgaatccccgacccccctaccccatgctgtacttgtggttctctttttgtattttgcatctgaccccggggggctgggacagattggcaatgggccgtcccctctccccttggttctgcactgttgccaataaaaagctcttaaaaacgca

SEQ ID NO: 415662 - DNA, 3656 bp, Homo sapiens
cattcataagactcagagctacggccacggcagggacacgcggaaccaagacttggaaacttgattgttgtggttcttcttgggggttatgaaatttcattaatcttttttttttccggggagaaagtttttggaaagattcttccagatatttcttcattttcttttggaggaccgacttactttttttggtcttctttattactcccctccccccgtgggacccgccggacgcgtggaggagaccgtagctgaagctgattctgtacagcgggacagcgctttctgcccctgggggagcaacccctccctcgcccctgggtcctacggagcctgcactttcaagaggtacagcggcatcctgtgggggcctgggcaccgcaggaagactgcacagaaactttgccattgttggaacgggacgttgctccttccccgagcttccccggacagcgtactttgaggactcgctcagctcaccggggactcccacggctcaccccggacttgcaccttacttccccaacccggccatagccttggcttcccggcgacctcagcgtggtcacaggggcccccctgtgcccagggaaatgtttcaggctttccccggagactacgactccggctcccggtgcagctcctcaccctctgccgagtctcaatatctgtcttcggtggactccttcggcagtccacccaccgccgcggcctcccaggagtgcgccggtctcggggaaatgcccggttccttcgtgcccacggtcaccgcgatcacaaccagccaggacctccagtggcttgtgcaacccaccctcatctcttccatggcccagtcccaggggcagccactggcctcccagcccccggtcgtcgacccctacgacatgccgggaaccagctactccacaccaggcatgagtggctacagcagtggcggagcgagtggcagtggtgggccttccaccagcggaactaccagtgggcctgggcctgcccgcccagcccgagcccggcctaggagaccccgagaggagacgctcaccccagaggaagaggagaagcgaagggtgcgccgggaacgaaataaactagcagcagctaaatgcaggaaccggcggagggagctgaccgaccgactccaggcggagacagatcagttggaggaagaaaaagcagagctggagtcggagatcgccgagctccaaaaggagaaggaacgtctggagtttgtgctggtggcccacaaaccgggctgcaagatcccctacgaagaggggcccgggccgggcccgctggcggagtgaagttcaagtcctcggcgaccccttccccgttgttaacccttcgtacacttcttcgtttgtcctcacctgcccggaggtctccgcgttcgccggcgcccaacgcaccagcggcagtgaccagccttccgatcccctgaactcgccctccctcctcgctctgtgaactctttagacacacaaaacaaacaaacacatgggggagagagacttggaagaggaggaggaggaggagaaggaggagagagaggggaagagacaaagtgggtgtgtggcctccctggctcctccgtctgaccctctgcggccactgcgccactgccatcggacaggaggattccttgtgttttgtcctgcctcttgtttctgtgccccggcgaggccggagagctggtgactttggggacagggggtgggaaggggatggacacccccagctgactgttggctctctgacgtcaacccaagctctggggatgggtggggaggggggcgggtgacgcccaccttcgggcagtcctgtgtgaggatgaagggacgggggtgggaggtaggctgtggggtgggctggagtcctctccagagaggctcaacaaggaaaaatgccactccctacccaatgtctcccacacccaccctttttttggggtgcctaggttggtttcccctgcactcccgaccttagcttattgatcccacatttccatggtgtgagatcctctttactctgggcagaagtgagcccccccttaaagggaattcgatgcccccctagaataatctcatccccccacccgacttcttttgaaatgtgaacgtccttccttgactgtctagccactccctcccagaaaaactggctctgattggaatttctggcctcctaaggctccccaccccgaaatcagcccccagccttgtttctgatgacagtgttatcccaagaccctgccccctgccagccgaccctcctggccttcctcgttgggccgctctgatttcaggcagcaggggctgctgtgatgccgtcctgctggagtgatttatactgtgaaatgagttggccagattgtggggtgcagctgggtggggcagcacacctctggggggataatgtccccactcccgaaagcctttcctcggtctcccttccgtccatcccccttcttcctcccctcaacagtgagttagactcaagggggtgacagaaccgagaagggggtgacagtcctccatccacgtggcctctctctctctcctcaggaccctcagccctggcctttttctttaaggtcccccgaccaatccccagcctaggacgccaacttctcccaccccttggcccctcacatcctctccaggaagggagtgaggggctgtgacatttttccggagaagatttcagagctgaggctttggtacccccaaacccccaatatttttggactggcagactcaaggggctggaatctcatgattccatgcccgagtccgcccatccctgaccatggttttggctctcccaccccgccgttccctgcgcttcatctcatgaggatttctttatgaggcaaatttatattttttaatatcggggggtggaccacgccgccctccatccgtgctgcatgaaaaacattccacgtgccccttgtcgcgcgtctcccatcctgatcccagacccattccttagctatttatccctttcctggtttccgaaaggcaattatatctattatgtataagtaaatatattatatatggatgtgtgtgtgtgcgtgcgcgtgagtgtgtgagcgcttctgcagcctcggcctaggtcacgttggccctcaaagcgagccgttgaattggaaactgcttctagaaactctggctcagcctgtctcgggctgacccttttctgatcgtctcggcccctctgattgttcccgatggtctctctccctctgtcttttctcctccgcctgtgtccatctgaccgttttcacttgtctcctttctgactgtccctgccaatgctccagctgtcgtctgactctgggttcgttggggacatgagattttattttttgtgagtgagactgagggatcgtagatttttacaatctgtatctttgacaattctgggtgcgagtgtgagagtgtgagcagggcttgctcctgccaaccacaattcaatgaatccccgacccccctaccccatgctgtacttgtggttctctttttgtattttgcatctgaccccggggggctgggacagattggcaatgggccgtcccctctccccttggttctgcactgttgccaataaaaagctcttaaaaacgcaaaaaaaaaggatttaaaaaa

SEQ ID NO: 415663 - DNA, 3539 bp, Homo sapiens
cattcataagactcagagctacggccacggcagggacacgcggaaccaagacttggaaacttgattgttgtggttcttcttgggggttatgaaatttcattaatcttttttttttccggggagaaagtttttggaaagattcttccagatatttcttcattttcttttggaggaccgacttactttttttggtcttctttattactcccctccccccgtgggacccgccggacgcgtggaggagaccgtagctgaagctgattctgtacagcgggacagcgctttctgcccctgggggagcaacccctccctcgcccctgggtcctacggagcctgcactttcaagaggtacagcggcatcctgtgggggcctgggcaccgcaggaagactgcacagaaactttgccattgttggaacgggacgttgctccttccccgagcttccccggacagcgtactttgaggactcgctcagctcaccggggactcccacggctcaccccggacttgcaccttacttccccaacccggccatagccttggcttcccggcgacctcagcgtggtcacaggggcccccctgtgcccagggaaatgtttcaggctttccccggagactacgactccggctcccggtgcagctcctcaccctctgccgagtctcaatatctgtcttcggtggactccttcggcagtccacccaccgccgcggcctcccaggagtgcgccggtctcggggaaatgcccggttccttcgtgcccacggtcaccgcgatcacaaccagccaggacctccagtggcttgtgcaacccaccctcatctcttccatggcccagtcccaggggcagccactggcctcccagcccccggtcgtcgacccctacgacatgccgggaaccagctactccacaccaggcatgagtggctacagcagtggcggagcgagtggcagtggtgggccttccaccagcggaactaccagtgggcctgggcctgcccgcccagcccgagcccggcctaggagaccccgagaggagacgctcaccccagaggaagaggagaagcgaagggtgcgccgggaacgaaataaactagcagcagctaaatgcaggaaccggcggagggagctgaccgaccgactccaggcggagacagatcagttggaggaagaaaaagcagagctggagtcggagatcgccgagctccaaaaggagaaggaacgtctggagtttgtgctggtggcccacaaaccgggctgcaagatcccctacgaagaggggcccgggccgggcccgctggcggagtgaagttcaagtcctcggcgaccccttccccgttgttaacccttcgtacacttcttcgtttgtcctcacctgcccggaggtctccgcgttcgccggcgcccaacgcaccagcggcagtgaccagccttccgatcccctgaactcgccctccctcctcgctctgtgaactctttagacacacaaaacaaacaaacacatgggggagagagacttggaagaggaggaggaggaggagaaggaggagagagaggggaagagacaaagtgggtgtgtggcctccctggctcctccgtctgaccctctgcggccactgcgccactgccatcggacaggaggattccttgtgttttgtcctgcctcttgtttctgtgccccggcgaggccggagagctggtgactttggggacagggggtgggaaggggatggacacccccagctgactgttggctctctgacgtcaacccaagctctggggatgggtggggaggggggcgggtgacgcccaccttcgggcagtcctgtgtgaggatgaagggacgggggtgggaggtaggctgtggggtgggctggagtcctctccagagaggctcaacaaggaaaaatgccactccctacccaatgtctcccacacccaccctttttttggggtgcctaggttggtttcccctgcactcccgaccttagcttattgatcccacatttccatggtgtgagatcctctttactctgggcagaagtgagcccccccttaaagggaattcgatgcccccctagaataatctcatccccccacccgacttcttttgaaatgtgaacgtccttccttgactgtctagccactccctcccagaaaaactggctctgattggaatttctggcctcctaaggctccccaccccgaaatcagcccccagccttgtttctgatgacagtgttatcccaagaccctgccccctgccagccgaccctcctggccttcctcgttgggccgctctgatttcaggcagcaggggctgctgtgatgccgtcctgctggagtgatttatactgtgaaatgagttggccagattgtggggtgcagctgggtggggcagcacacctctggggggataatgtccccactcccgaaagcctttcctcggtctcccttccgtccatcccccttcttcctcccctcaacagtgagttagactcaagggggtgacagaaccgagaagggggtgacagtcctccatccacgtggcctctctctctctcctcaggaccctcagccctggcctttttctttaaggtcccccgaccaatccccagcctaggacgccaacttctcccaccccttggcccctcacatcctctccaggaagggagtgaggggctgtgacatttttccggagaagatttcagagctgaggctttggtacccccaaacccccaatatttttggactggcagactcaaggggctggaatctcatgattccatgcccgagtccgcccatccctgaccatggttttggctctcccaccccgccgttccctgcgcttcatctcatgaggatttctttatgaggcaaatttatattttttaatatcggggggtggaccacgccgccctccatccgtgctgcatgaaaaacattccacgtgccccttgtcgcgcgtctcccatcctgatcccagacccattccttagctatttatccctttcctggtttccgaaaggcaattatatctattatgtataagtaaatatattatatatggatgtgtgtgtgtgcgtgcgcgtgagtgtgtgagcgcttctgcagcctcggcctaggtcacgttggccctcaaagcgagccgttgaattggaaactgcttctagaaactctggctcagcctgtctcgggctgacccttttctgatcgtctcggcccctctgattgttcccgatggtctctctccctctgtcttttctcctccgcctgtgtccatctgaccgttttcacttgtctcctttctgactgtccctgccaatgctccagctgtcgtctgactctgggttcgttggggacatgagattttattttttgtgagtgagactgagggatcgtagatttttacaatctgtatctttgacaattctgggtgcgagtgtgagagtgtgagcagggcttgctcctgccaaccacaattcaatgaatccccgacccccctaccatatgcatgcaccagcacatgcatgacacatag

SEQ ID NO: 415664 - DNA, 3050 bp, Homo sapiens
cattcataagactcagagctacggccacggcagggacacgcggaaccaagacttggaaacttgattgttgtggttcttcttgggggttatgaaatttcattaatcttttttttttccggggagaaagtttttggaaagattcttccagatatttcttcattttcttttggaggaccgacttactttttttggtcttctttattactcccctccccccgtgggacccgccggacgcgtggaggagaccgtagctgaagctgattctgtacagcgggacagcgctttctgcccctgggggagcaacccctccctcgcccctgggtcctacggagcctgcactttcaagaggtacagcggcatcctgtgggggcctgggcaccgcaggaagactgcacagaaactttgccattgttggaacgggacgttgctccttccccgagcttccccggacagcgtactttgaggactcgctcagctcaccggggactcccacggctcaccccggacttgcaccttacttccccaacccggccatagccttggcttcccggcgacctcagcgtggtcacaggggcccccctgtgcccagggaaatgtttcaggctttccccggagactacgactccggctcccggtgcagctcctcaccctctgccgagtctcaatatctgtcttcggtggactccttcggcagtccacccaccgccgcggcctcccaggagtgcgccggtctcggggaaatgcccggttccttcgtgcccacggtcaccgcgatcacaaccagccaggacctccagtggcttgtgcaacccaccctcatctcttccatggcccagtcccaggggcagccactggcctcccagcccccggtcgtcgacccctacgacatgccgggaaccagctactccacaccaggcatgagtggctacagcagtggcggagcgagtggcagtggtgggccttccaccagcggaactaccagtgggcctgggcctgcccgcccagcccgagcccggcctaggagaccccgagaggagacgctcaccccagaggaagaggagaagcgaagggtgcgccgggaacgaaataaactagcagcagctaaatgcaggaaccggcggagggagctgaccgaccgactccaggcggagacagatcagttggaggaagaaaaagcagagctggagtcggagatcgccgagctccaaaaggagaaggaacgtctggagtttgtgctggtggcccacaaaccgggctgcaagatcccctacgaagaggggcccgggccgggcccgctggcggagtgaagttcaagtcctcggcgaccccttccccgttgttaacccttcgtacacttcttcgtttgtcctcacctgcccggaggtctccgcgttcgccggcgcccaacgcaccagcggcagtgaccagccttccgatcccctgaactcgccctccctcctcgctctgtgaactctttagacacacaaaacaaacaaacacatgggggagagagacttggaagaggaggaggaggaggagaaggaggagagagaggggaagagacaaagtgggtgtgtggcctccctggctcctccgtctgaccctctgcggccactgcgccactgccatcggacaggaggattccttgtgttttgtcctgcctcttgtttctgtgccccggcgaggccggagagctggtgactttggggacagggggtgggaaggggatggacacccccagctgactgttggctctctgacgtcaacccaagctctggggatgggtggggaggggggcgggtgacgcccaccttcgggcagtcctgtgtgaggatgaagggacgggggtgggaggtaggctgtggggtgggctggagtcctctccagagaggctcaacaaggaaaaatgccactccctacccaatgtctcccacacccaccctttttttggggtgcctaggttggtttcccctgcactcccgaccttagcttattgatcccacatttccatggtgtgagatcctctttactctgggcagaagtgagcccccccttaaagggaattcgatgcccccctagaataatctcatccccccacccgacttcttttgaaatgtgaacgtccttccttgactgtctagccactccctcccagaaaaactggctctgattggaatttctggcctcctaaggctccccaccccgaaatcagcccccagccttgtttctgatgacagtgttatcccaagaccctgccccctgccagccgaccctcctggccttcctcgttgggccgctctgatttcaggcagcaggggctgctgtgatgccgtcctgctggagtgatttatactgtgaaatgagttggccagattgtggggtgcagctgggtggggcagcacacctctggggggataatgtccccactcccgaaagcctttcctcggtctcccttccgtccatcccccttcttcctcccctcaacagtgagttagactcaagggggtgacagaaccgagaagggggtgacagtcctccatccacgtggcctctctctctctcctcaggaccctcagccctggcctttttctttaaggtcccccgaccaatccccatgcgtggattgccagctggcaatccacgcatggcccgatggtctctctccctctgtcttttctcctccgcctgtgtccatctgaccgttttcacttgtctcctttctgactgtccctgccaatgctccagctgtcgtctgactctgggttcgttggggacatgagattttattttttgtgagtgagactgagggatcgtagatttttacaatctgtatctttgacaattctgggtgcgagtgtgagagtgtgagcagggcttgctcctgccaaccacaattcaatgaatccccgacccccctaccccatgctgtacttgtggttctctttttgtattttgcatctgaccccggggggctgggacagattggcaatgggccgtcccctctccccttggttctgcactgttgccaataaaaagctcttaaaaacgca

SEQ ID NO: 415665 - DNA, 2811 bp, Homo sapiens
  misc_feature (2724)..(2724): n is a, c, g, or t
cattcataagactcagagctacggccacggcagggacacgcggaaccaagacttggaaacttgattgttgtggttcttcttgggggttatgaaatttcattaatcttttttttttccggggagaaagtttttggaaagattcttccagatatttcttcattttcttttggaggaccgacttactttttttggtcttctttattactcccctccccccgtgggacccgccggacgcgtggaggagaccgtagctgaagctgattctgtacagcgggacagcgctttctgcccctgggggagcaacccctccctcgcccctgggtcctacggagcctgcactttcaagaggtacagcggcatcctgtgggggcctgggcaccgcaggaagactgcacagaaactttgccattgttggaacgggacgttgctccttccccgagcttccccggacagcgtactttgaggactcgctcagctcaccggggactcccacggctcaccccggacttgcaccttacttccccaacccggccatagccttggcttcccggcgacctcagcgtggtcacaggggcccccctgtgcccagggaaatgtttcaggctttccccggagactacgactccggctcccggtgcagctcctcaccctctgccgagtctcaatatctgtcttcggtggactccttcggcagtccacccaccgccgcggcctcccaggagtgcgccggtctcggggaaatgcccggttccttcgtgcccacggtcaccgcgatcacaaccagccaggacctccagtggcttgtgcaacccaccctcatctcttccatggcccagtcccaggggcagccactggcctcccagcccccggtcgtcgacccctacgacatgccgggaaccagctactccacaccaggcatgagtggctacagcagtggcggagcgagtggcagtggtgggccttccaccagcggaactaccagtgggcctgggcctgcccgcccagcccgagcccggcctaggagaccccgagaggagacgctcaccccagaggaagaggagaagcgaagggtgcgccgggaacgaaataaactagcagcagctaaatgcaggaaccggcggagggagctgaccgaccgactccaggcggagacagatcagttggaggaagaaaaagcagagctggagtcggagatcgccgagctccaaaaggagaaggaacgtctggagtttgtgctggtggcccacaaaccgggctgcaagatcccctacgaagaggggcccgggccgggcccgctggcggagtgaagttcaagtcctcggcgaccccttccccgttgttaacccttcgtacacttcttcgtttgtcctcacctgcccggaggtctccgcgttcgccggcgcccaacgcaccagcggcagtgaccagccttccgatcccctgaactcgccctccctcctcgctctgtgaactctttagacacacaaaacaaacaaacacatgggggagagagacttggaagaggaggaggaggaggagaaggaggagagagaggggaagagacaaagtgggtgtgtggcctccctggctcctccgtctgaccctctgcggccactgcgccactgccatcggacaggaggattccttgtgttttgtcctgcctcttgtttctgtgccccggcgaggccggagagctggtgactttggggacagggggtgggaaggggatggacacccccagctgactgttggctctctgacgtcaacccaagctctggggatgggtggggaggggggcgggtgacgcccaccttcgggcagtcctgtgtgaggatgaagggacgggggtgggaggtaggctgtggggtgggctggagtcctctccagagaggctcaacaaggaaaaatgccactccctacccaatgtctcccacacccaccctttttttggggtgcctaggttggtttcccctgcactcccgaccttagcttattgatcccacatttccatggtgtgagatcctctttactctgggcagaagtgagcccccccttaaagggaattcgatgcccccctagaataatctcatccccccacccgacttcttttgaaatgtgaacgtccttccttgactgtctagccactccctcccagaaaaactggctctgattggaatttctggcctcctaaggctccccaccccgaaatcagcccccagccttgtttctgatgacagtgttatcccaagaccctgccccctgccagccgaccctcctggccttcctcgttgggccgctctgatttcaggcagcaggggctgctgtgatgccgtcctgctggagtgatttatactgtgaaatgagttggccagattgtggggtgcagctgggtggggcagcacacctctggggggataatgtccccactcccgaaagcctttcctcggtctcccttccgtccatcccccttcttcctcccctcaacagtgagttagactcaagggggtgacagaaccgagaagggggtgacagtcctccatccacgtggcctctctctctctcctcaggaccctcagccctggcctttttctttaaggtcccccgaccaatccccatgcgtggattgccagctggcaatccacgcatggggccagtggcagggcaggttctccctgccagaacccgatcctagcccttcagaaggactggacctctgtgtccctncagtgggaagccaccttggacacacgcagtcattcaggtggacataagccactcttctcgcctgaccttgaggaactcaccagcgtt

SEQ ID NO: 415666 - DNA, 2225 bp, Homo sapiens
cattcataagactcagagctacggccacggcagggacacgcggaaccaagacttggaaacttgattgttgtggttcttcttgggggttatgaaatttcattaatcttttttttttccggggagaaagtttttggaaagattcttccagatatttcttcattttcttttggaggaccgacttactttttttggtcttctttattactcccctccccccgtgggacccgccggacgcgtggaggagaccgtagctgaagctgattctgtacagcgggacagcgctttctgcccctgggggagcaacccctccctcgcccctgggtcctacggagcctgcactttcaagaggtacagcggcatcctgtgggggcctgggcaccgcaggaagactgcacagaaactttgccattgttggaacgggacgttgctccttccccgagcttccccggacagcgtactttgaggactcgctcagctcaccggggactcccacggctcaccccggacttgcaccttacttccccaacccggccatagccttggcttcccggcgacctcagcgtggtcacaggggcccccctgtgcccagggaaatgtttcaggctttccccggagactacgactccggctcccggtgcagctcctcaccctctgccgagtctcaatatctgtcttcggtggactccttcggcagtccacccaccgccgcggcctcccaggagtgcgccggtctcggggaaatgcccggttccttcgtgcccacggtcaccgcgatcacaaccagccaggacctccagtggcttgtgcaacccaccctcatctcttccatggcccagtcccaggggcagccactggcctcccagcccccggtcgtcgacccctacgacatgccgggaaccagctactccacaccaggcatgagtggctacagcagtggcggagcgagtggcagtggtgggccttccaccagcggaactaccagtgggcctgggcctgcccgcccagcccgagcccggcctaggagaccccgagaggagacgctcaccccagaggaagaggagaagcgaagggtgcgccgggaacgaaataaactagcagcagctaaatgcaggaaccggcggagggagctgaccgaccgactccaggcggtgaggacaggccctggggtgggagaggggatgttgaggggagctctctccccattctctgccccctctccacctgtacccttatcctgggttgagaactagacgttccacacatggaactaggtactgctgtggccagactgggtagcccagggcacaaacacagacccccatggacttaagtcaactcctggtcccccccccatttcctgaccccacggactactctcctagcccttcatttcatcccaaggggccacatggggcccttgaggagaggggcgcccccatcatttctcccatctggtcttcagcaagtaacaacccatttgcctcagtttctccatctctgcaaaccctcatcaaatctcccgggctctttctacccttaacactctggaaagcctgtgaaatgaaattattccacctcctgccctagccacccacagctctcctggtgctggtggcatcccccaaaacccactcccttcctacgtcctcccttggtctgagagttccctgctgtatgcctgcagggtgagctgttactccttgagggaacaagggaattgtcaactttccttctctactttttctcttccccgggaggtagagagggaggggtaatagaagggaacacattaaaaacacataacagtggctcatgcctgtgatcccagcactttgagaggccaaggcaggaggattgcttgagcccaggagtttgagaccagcctgggaaacatagggaggacttgtctctaccaagaaaaaaaaaaattagttgggcatggtggtgcacaccactgtggtcccagctactatggaggctttagtgggaggatcgcttgagccgaggaggtccaggctgcagtgagccatgattgcactattgcactccagcctgggggacagagcgagactctggctcaaaagcaaaacaaaaccaaccacataacgattgttcattcattcaacaaacctcctgcacaccagaaacttccccataaacctggccccttctgtaccatcctttggacagatgtgatggtcctgaaggcagactcacgctggatc

SEQ ID NO: 415667 - DNA, 547 bp, Homo sapiens
tcaggcagtgcgtctgggtagcatggggctgcgcttccccctacgcaacatctaggttcttaggaaacttcagttgttgtaaaaatcggaaatgaaaagacagttggtgccatgcgtggattgccagctggcaatccacgcatggcccgatggtctctctccctctgtcttttctcctccgcctgtgtccatctgaccgttttcacttgtctcctttctgactgtccctgccaatgctccagctgtcgtctgactctgggttcgttggggacatgagattttattttttgtgagtgagactgagggatcgtagatttttacaatctgtatctttgacaattctgggtgcgagtgtgagagtgtgagcagggcttgctcctgccaaccacaattcaatgaatccccgacccccctaccccatgctgtacttgtggttctctttttgtattttgcatctgaccccggggggctgggacagattggcaatgggccgtcccctctccccttggttctgcactgttgccaataaaaagctcttaaaaacgca

SEQ ID NO: 415668 - DNA, 2729 bp, Homo sapiens
  misc_feature (2594)..(2594): n is a, c, g, or t
  misc_feature (2600)..(2600): n is a, c, g, or t
  misc_feature (2608)..(2608): n is a, c, g, or t
  misc_feature (2618)..(2618): n is a, c, g, or t
  misc_feature (2626)..(2626): n is a, c, g, or t
  misc_feature (2632)..(2632): n is a, c, g, or t
  misc_feature (2634)..(2634): n is a, c, g, or t
  misc_feature (2638)..(2639): n is a, c, g, or t
  misc_feature (2642)..(2642): n is a, c, g, or t
  misc_feature (2649)..(2651): n is a, c, g, or t
  misc_feature (2655)..(2655): n is a, c, g, or t
  misc_feature (2663)..(2664): n is a, c, g, or t
  misc_feature (2671)..(2671): n is a, c, g, or t
  misc_feature (2694)..(2694): n is a, c, g, or t
  misc_feature (2706)..(2706): n is a, c, g, or t
cattcataagactcagagctacggccacggcagggacacgcggaaccaagacttggaaacttgattgttgtggttcttcttgggggttatgaaatttcattaatcttttttttttccggggagaaagtttttggaaagattcttccagatatttcttcattttcttttggaggaccgacttactttttttggtcttctttattactcccctccccccgtgggacccgccggacgcgtggaggagaccgtagctgaagctgattctgtacagcgggacagcgctttctgcccctgggggagcaacccctccctcgcccctgggtcctacggagcctgcactttcaagaggtacagcggcatcctgtgggggcctgggcaccgcaggaagactgcacagaaactttgccattgttggaacgggacgttgctccttccccgagcttccccggacagcgtactttgaggactcgctcagctcaccggggactcccacggctcaccccggacttgcaccttacttccccaacccggccatagccttggcttcccggcgacctcagcgtggtcacaggggcccccctgtgcccagggaaatgtttcaggctttccccggagactacgactccggctcccggtgcagctcctcaccctctgccgagtctcaatatctgtcttcggtggactccttcggcagtccacccaccgccgcggcctcccaggagtgcgccggtctcggggaaatgcccggttccttcgtgcccacggtcaccgcgatcacaaccagccaggacctccagtggcttgtgcaacccaccctcatctcttccatggcccagtcccaggggcagccactggcctcccagcccccggtcgtcgacccctacgacatgccgggaaccagctactccacaccaggcatgagtggctacagcagtggcggagcgagtggcagtggtgggccttccaccagcggaactaccagtgggcctgggcctgcccgcccagcccgagcccggcctaggagaccccgagaggagacgctcaccccagaggaagaggagaagcgaagggtgcgccgggaacgaaataaactagcagcagctaaatgcaggaaccggcggagggagctgaccgaccgactccaggcggagacagatcagttggaggaagaaaaagcagagctggagtcggagatcgccgagctccaaaaggagaaggaacgtctggagtttgtgctggtggcccacaaaccgggctgcaagatcccctacgaagaggggcccgggccgggcccgctggcggagtgaagttcaagtcctcggcgaccccttccccgttgttaacccttcgtacacttcttcgtttgtcctcacctgcccggaggtctccgcgttcgccggcgcccaacgcaccagcggcagtgaccagccttccgatcccctgaactcgccctccctcctcgctctgtgaactctttagacacacaaaacaaacaaacacatgggggagagagacttggaagaggaggaggaggaggagaaggaggagagagaggggaagagacaaagtgggtgtgtggcctccctggctcctccgtctgaccctctgcggccactgcgccactgccatcggacaggaggattccttgtgttttgtcctgcctcttgtttctgtgccccggcgaggccggagagctggtgactttggggacagggggtgggaaggggatggacacccccagctgactgttggctctctgacgtcaacccaagctctggggatgggtggggaggggggcgggtgacgcccaccttcgggcagtcctgtgtgaggatgaagggacgggggtgggaggtaggctgtggggtgggctggagtcctctccagagaggctcaacaaggaaaaatgccactccctacccaatgtctcccacacccaccctttttttggggtgcctaggttggtttcccctgcactcccgaccttagcttattgatcccacatttccatggtgtgagatcctctttactctgggcagaagtgagcccccccttaaagggaattcgatgcccccctagaataatctcatccccccacccgacttcttttgaaatgtgaacgtccttccttgactgtctagccactccctcccagaaaaactggctctgattggaatttctggcctcctaaggctccccaccccgaaatcagcccccagccttgtttctgatgacagtgttatcccaagaccctgccccctgccagccgaccctcctggccttcctcgttgggccgctctgatttcaggcagcaggggctgctgtgatgccgtcctgctggagtgatttatactgtgaaatgagttggccagattgtggggtgcagctgggtggggcagcacacctctggggggataatgtccccactcccgaaagcctttcctcggtctcccttccgtccatcccccttcttcctcccctcaacagtgagttaggtctacctggccaggtagacctaacccagatagacctaacgagctaaaaaaaaaaaaaaaaaaaaaaaaatctcctggggattaaaaaaagcttataanttggtntggggccnctttcaaagntgccctgncccccngnttgnncangcttggnnnaaanccaaagcnnttggaanacaggatgcagggcaggaagtanggcctctgccanaactctttaagccaggtgccatg

SEQ ID NO: 415669 - DNA, 309 bp, Homo sapiens
cagcccgagcccggcctaggagaccccgagaggagacggtgagtaagggacatcagaacttggcctgggtagggggaagcaagagaggcaggaagtttcttatgaatggaggggggctccactaaggcctcagtgttacagaaaccccaagatccttgctacacgagcgaggaccggaggcttgttttttggctcttgggggttctgaaagaagtagaggttcgggatgggtggaggagtgctgtatccccaaatctcatggcctctatctccctgactcagctcaccccagaggaagaggagaagcga

SEQ ID NO: 415670 - DNA, 647 bp, Homo sapiens
tttggcttttctatcctagtccccattttttgacagttgaattcacattcttccagtctctgagattagaaaccttgcagacatctgttaactcttttctcttcatcaaccccattttcaatctgtcattgagttcttttgttcttcagagtttctcttaaatttgtctttttctccccattctctattccatgactctagtccagtcacttatcactttgtacctgaattacagcaaccgcctcatattttgttttctgtgtcctgtttctctcttcagttaacaccgaagtagcagctactttcctagtatttcctattactgaaagtctaaatttgttacaaagaccttttatggctggacctggtggcccatgcctgtaatcccagcacttttggaggctgaggcagaaggattgcttgaggtcaggagtctgagaccaggctaggcaacatagggaaactgtgtctctacaagaaaaaaacatttttttttaagtagccagacctggtggtgtgtgcctgtagtcccagctactcaggaggatgaagtgggaggattgcttgaagcccaggaggtccaggctgcagtgagccatgaccctgtcactgcactgtagcttggggacagagcaagaccctgtctc

SEQ ID NO: 415671 - DNA, 1936 bp, Homo sapiens
ggtttgcggggaagatggagtatcccgcgccggccacggtgcaggccgcggacggcggagcggccgggccttacagcagctcggagttgctggagggccaggagccggacggggtgcgctttgaccgcgagagggcgcgccgcctgtgggaagccgtgtccggtgcccagccggtgggtagagaggaagccttgcaccagaatagagagatgatagacccagacaagttctgcagcctctgccatgcaactttcaacgaccctgtcatggctcaacaacattatgtgggcaagaaacacagaaaacaggagaccaagctcaaactaatggcacgctatgggcggctggcggaccctgctgtcactgactttccagctggaaagggctacccctgcaaaacatgtaagatagtgctgaactccatagaacagtaccaagctcatgtcagcggcttcaaacacaagaaccagtcaccaaaaacagtggcatcatccctgggccagattccaatgcaaaggcaacccattcagaaagactcaaccaccttggaagactagaggtgattctgcccagcatcccatattgggccagccatgagccagcttcccgtgactgctcagcccttggctccctcttgctcgttgttctcaccaggaaagtacacgggcctgaggcaggattgggccacagacagcctctcattggtccgggctaattcactcctgctgctcccctttggcaggggtcctgtaggtcatgacaggggaggcaagggtattgagagactcggggtctcgcggggtggtagtttggagggtggctttccccatttcccaacccctctgggccttaggtgctgaggcccctgccacctgtctttcctctaaaggtcagttttgggccagttcttgcaactaaagagcagagatctctctgggccctagacatttccagcaaaacctggaactttcatgccaaacctggggcagggcaggaaacagaggaaatggctgcaacatgggagcttggagctaatacgacactctgccttcccccagaaggtgcaggctttcctgagtcttagaccagatatggccagttgcgcaggtttctgccaactgtgaagtatcctcctggagcagtgacacaatcttggcggagcattgctacccccgctgccccctccacagttcctgaatggtgctaaggatctgcagcagttggcaacgagctggggctgggggcggcctccatgtccactgagatcataggacactccaatggggatgggacctttcccctcctccatcagaggtgctctgaccctaggttacacgggaaagtgccccacatgcaagtctccctgagggttctgcccctaaaggcagactgcctcatgcccgctagctgtgaggttcattgctaccctcggccctactagccctctcttcccccttgtgcagcggaccacttgcccagtttgctgtggtgctagccttccccatcatccaccgggtgatttctgggtcccagggaaagaaagagagagctgatgcaggtttctacagtgaggaacaggcgtttcccaggccccacacccagatttctctatctttgctgtgttttatggcctgggactgagtccacacggatagatttttccttgtaaccttgagacgagaattccaaggagtgtcaccatcagaggcttctcttcattgtgtcaaagaagcccctagctgctctcgtggcctccttcccccactccctatcccttcacctgtgaaatgcctttgctttgcatattgtgtgtggatgtgtgtgtgtgtgtgtgtgtgtgtgtgtgtgtatgtgtgtgcttctgtgtgtgcctaatgctctgtctcttggtcactgaagcatccaaataaagaatttccctcatgggccagactac

SEQ ID NO: 415672 - DNA, 2278 bp, Homo sapiens
ggtttgcggggaagatggagtatcccgcgccggccacggtgcaggccgcggacggcggagcggccgggccttacagcagctcggagttgctggagggccaggagccggacggggtgcgctttgaccgcgagagggcgcgccgcctgtgggaagccgtgtccggtgcccagccggtgggtagagaggaagtggagcacatgatccagaagaaccaatgtctcttcaccaacacccagtgtaaggtttgctgcgccttgcttatttctgagtcccagaagctggcacattaccagagcaaaaaacatgccaacaaagtgaagagatacctagcaatccatggaatggagacattaaagggggaaacgaagaagctagactcagatcagaagagcagcagaagcaaagacaagaaccagtgctgccccatctgtaacatgaccttttcctcccctgtcgtggcccagtcgcactacctggggaagacccacgcaaagaacttaaagctgaagcagcagtccactaaggtggaagccttgcaccagaatagagagatgatagacccagacaagttctgcagcctctgccatgcaactttcaacgaccctgtcatggctcaacaacattatgtgggcaagaaacacagaaaacaggagaccaagctcaaactaatggcacgctatgggcggctggcggaccctgctgtcactgactttccagctggaaagggctacccctgcaaaacatgtaagatagtgctgaactccatagaacagtaccaagctcatgtcagcggcttcaaacacaagaaccagtcaccaaaaacagtggcatcatccctgggccagattccaatgcaaaggcaacccattcagaaagactcaaccaccttggaagactagaggtgattctgcccagcatcccatattgggccagccatgagccagcttcccgtgactgctcagcccttggctccctcttgctcgttgttctcaccaggaaagtacacgggcctgaggcaggattgggccacagacagcctctcattggtccgggctaattcactcctgctgctcccctttggcaggggtcctgtaggtcatgacaggggaggcaagggtattgagagactcggggtctcgcggggtggtagtttggagggtggctttccccatttcccaacccctctgggccttaggtgctgaggcccctgccacctgtctttcctctaaaggtcagttttgggccagttcttgcaactaaagagcagagatctctctgggccctagacatttccagcaaaacctggaactttcatgccaaacctggggcagggcaggaaacagaggaaatggctgcaacatgggagcttggagctaatacgacactctgccttcccccagaaggtgcaggctttcctgagtcttagaccagatatggccagttgcgcaggtttctgccaactgtgaagtatcctcctggagcagtgacacaatcttggcggagcattgctacccccgctgccccctccacagttcctgaatggtgctaaggatctgcagcagttggcaacgagctggggctgggggcggcctccatgtccactgagatcataggacactccaatggggatgggacctttcccctcctccatcagaggtgctctgaccctaggttacacgggaaagtgccccacatgcaagtctccctgagggttctgcccctaaaggcagactgcctcatgcccgctagctgtgaggttcattgctaccctcggccctactagccctctcttcccccttgtgcagcggaccacttgcccagtttgctgtggtgctagccttccccatcatccaccgggtgatttctgggtcccagggaaagaaagagagagctgatgcaggtttctacagtgaggaacaggcgtttcccaggccccacacccagatttctctatctttgctgtgttttatggcctgggactgagtccacacggatagatttttccttgtaaccttgagacgagaattccaaggagtgtcaccatcagaggcttctcttcattgtgtcaaagaagcccctagctgctctcgtggcctccttcccccactccctatcccttcacctgtgaaatgcctttgctttgcatattgtgtgtggatgtgtgtgtgtgtgtgtgtgtgtgtgtgtgtgtatgtgtgtgcttctgtgtgtgcctaatgctctgtctcttggtcactgaagcatccaaataaagaatttccctcatgggccagactac

SEQ ID NO: 415673 - DNA, 809 bp, Homo sapiens
cagagaataaagtgggggatggtgagtagagtctgggacaaagtagctggagaagaatctagaaagtaggttggggttaatgtgtgaggggggccataaatgcctgttctgttatgggcagtggggaaccattgaagattttctggtggggcagtggtatgatcagacctgtgttctttcttccaaccagaagagcagcagaagcaaagacaagaaccagtgctgccccatctgtaacatgaccttttcctcccctgtcgtggcccagtcgcactacctggggaagacccacgcaaagaacttaaagctgaagcagcagtccactaaggtggaaggtactggttttcctgagtagtgctatagtgggacccctgccgtcctcagggcactattgccaggggctcacagagatcctcactgaggccacagacttgaagaagttgaattgcttttgagaacccttaaaaatctccaagtagacccagcttcactgaaatgcaatctcagaattatgctcacctaacctccctttctttggttataggtttttctctataggctgagcttttgtcctgactaataattataactcaggagtgccaaagtcctccaggccacgcataccatgagagcattctatctcctacctctcccactagatttttccatcccagcatccacctgcccttattactgcatgttccaagttgaaagctaaatccttgtctttttcacatgctcaggttatggcctactcactttaatcctcaaaagctgcctgttctcctcaagacagggacttgcctttc

SEQ ID NO: 415674 - DNA, 3248 bp, Homo sapiens
ggtttgcggggaagatggagtatcccgcgccggccacggtgcaggccgcggacggcggagcggccgggccttacagcagctcggagttgctggagggccaggagccggacggggtgcgctttgaccgcgagagggcgcgccgcctgtgggaagccgtgtccggtgcccagccggtgggtagagaggaagtggagcacatgatccagaagaaccaatgtctcttcaccaacacccagtgtaaggtttgctgcgccttgcttatttctgagtcccagaagctggcacattaccagagcaaaaaacatgccaacaaagtgaagagatacctagcaatccatggaatggagacattaaagggggaaacgaagaagctagactcagatcagaagagcagcagaagcaaagacaagaaccagtgctgccccatctgtaacatgaccttttcctcccctgtcgtggcccagtcgcactacctggggaagacccacgcaaagaacttaaagctgaagcagcagtccactaaggtggaagccttgcaccagaatagagagatgatagacccagacaagttctgcagcctctgccatgcaactttcaacgaccctgtcatggctcaacaacattatgtgggcaagaaacacagaaaacaggagaccaagctcaaactaatggcacgctatgggcggctggcggaccctgctgtcactgactttccagctggaaagggctacccctgcaaaacatgtaagatagtgctgaactccatagaacagtaccaagctcatgtcagcggcttcaaacacaagaaccagtcaccaaaaacagtggcatcatccctgggccagattccaatgcaaaggcaacccattcagaaagactcaaccaccttggaagactagaggtgattctgcccagcatcccatattgggccagccatgagccagcttcccgtgactgctcagcccttggctccctcttgctcgttgttctcaccaggaaagtacacgggcctgaggcaggattgggccacagacagcctctcattggtccgggctaattcactcctgctgctcccctttggcaggggtcctgtaggtcatgacaggggaggcaagggtattgagagactcggggtctcgcggggtggtagtttggagggtggctttccccatttcccaacccctctgggccttaggtgctgaggcccctgccacctgtctttcctctaaaggtcagttttgggccagttcttgcaactaaagagcagagatctctctgggccctagacatttccagcaaaacctggaactttcatgccaaacctggggcagggcaggaaacagaggaaatggctgcaacatgggagcttggagctaatacgacactctgccttcccccagaaggtgcaggctttcctgagtcttagaccagatatggccagttgcgcaggtttctgccaactgtgaagtatcctcctggagcagtgacacaatcttggcggagcattgctacccccgctgccccctccacagttcctgaatggtgctaaggatctgcagcagttggcaacgagctggggctgggggcggcctccatgtccactgagatcataggacactccaatggggatgggacctttcccctcctccatcagaggtgctctgaccctaggttacacgggaaagtgccccacatgcaagtctccctgagggttctgcccctaaaggcagactgcctcatgcccgctagctgtgaggttcattgctaccctcggccctactagccctctcttcccccttgtgcagcggaccacttgcccagtttgctgtggtgctagccttccccatcatccaccgggtgatttctgggtcccagggaaagaaagagagagctgatgcaggtttctacagtgaggaacaggcgtttcccaggccccacacccagatttctctatctttgctgtgttttatggcctgggactgagtccacacggatagatttttccttgtaaccttgagacgagaattccaaggagtgtcaccatcagaggcttctcttcattgtgtcaaagaagcccctagctgctctcgtggcctccttcccccactccctatcccttcacctgtgaaatgcctttgctttgcatattgtgtgtggatgtgtgtgtgtgtgtgtgtgtgtgtgtgtgtgtatgtgtgtgcttctgtgtgtgcctaatgctctgtctcttggtcactgaagcatccaaataaagaatttccctcatgggccagactacaacttaacagacctagggttttgagccatattgccattggatctagtatgtctgtcttgacccctcacccccaccccattcagacctcagtagtccccagtagtcactttaggagttgggacagagtcgagcaccctgtgaaagtctcccttgagttcaggtgccctgaactcagtacagcctcatcttctcatccaccaccttctcctgcttctcctgtcacatagggcctcatgaaggtctttaaagggtttaagctggggatctgctttatgtttgagagaactgttctggctgttatgtaaaggagtgcagggaggggcaggaaaggagacaaggaggccagtatggacactgtgtccagtatggctttccaggctaatcacttagggcagagacccagccttattcatctctacttcctgatgtccatagtggtgtgtcatgaatttttattgaatgaacaaatgaggtgtatgaggagagatggttttctcctgctcagctcttacacagtgataggtttgttccatgggacttatcataggcctggtgattcttgaaagagcatttttcatgactcaaaaatgagctgagaaggagtgttatggccaggtgcggcgtcatgcacctatagtcccagctgctcaggaggctaaggcagaaagaccattcaagcccaggagttccagcctgaagtatgctgtgatcatgcctgtgaataaccactgcactccagccagggcaacataacaagactctatctaaaaaaaaaaaaaaattataaaaataaatttgaaggctgggcgccgtggctcacgcctgtaatccaagcactttgagaggccaaggcaggtggataacctgaggtcagaagttcgagaccagcctggccaacatgatggcaaaaccccgtccctataaaaaatacgaaaatcagctgcgcctggtggcacacatctgtagtccc

SEQ ID NO: 415675 - DNA, 2720 bp, Homo sapiens
ggtttgcggggaagatggagtatcccgcgccggccacggtgcaggccgcggacggcggagcggccgggccttacagcagctcggagttgctggagggccaggagccggacggggtgcgctttgaccgcgagagggcgcgccgcctgtgggaagccgtgtccggtgcccagccggtgggtagagaggaagctggaaagggctacccctgcaaaacatgtaagatagtgctgaactccatagaacagtaccaagctcatgtcagcggcttcaaacacaagaaccagtcaccaaaaacagtggcatcatccctgggccagattccaatgcaaaggcaacccattcagaaagactcaaccaccttggaagactagaggtgattctgcccagcatcccatattgggccagccatgagccagcttcccgtgactgctcagcccttggctccctcttgctcgttgttctcaccaggaaagtacacgggcctgaggcaggattgggccacagacagcctctcattggtccgggctaattcactcctgctgctcccctttggcaggggtcctgtaggtcatgacaggggaggcaagggtattgagagactcggggtctcgcggggtggtagtttggagggtggctttccccatttcccaacccctctgggccttaggtgctgaggcccctgccacctgtctttcctctaaaggtcagttttgggccagttcttgcaactaaagagcagagatctctctgggccctagacatttccagcaaaacctggaactttcatgccaaacctggggcagggcaggaaacagaggaaatggctgcaacatgggagcttggagctaatacgacactctgccttcccccagaaggtgcaggctttcctgagtcttagaccagatatggccagttgcgcaggtttctgccaactgtgaagtatcctcctggagcagtgacacaatcttggcggagcattgctacccccgctgccccctccacagttcctgaatggtgctaaggatctgcagcagttggcaacgagctggggctgggggcggcctccatgtccactgagatcataggacactccaatggggatgggacctttcccctcctccatcagaggtgctctgaccctaggttacacgggaaagtgccccacatgcaagtctccctgagggttctgcccctaaaggcagactgcctcatgcccgctagctgtgaggttcattgctaccctcggccctactagccctctcttcccccttgtgcagcggaccacttgcccagtttgctgtggtgctagccttccccatcatccaccgggtgatttctgggtcccagggaaagaaagagagagctgatgcaggtttctacagtgaggaacaggcgtttcccaggccccacacccagatttctctatctttgctgtgttttatggcctgggactgagtccacacggatagatttttccttgtaaccttgagacgagaattccaaggagtgtcaccatcagaggcttctcttcattgtgtcaaagaagcccctagctgctctcgtggcctccttcccccactccctatcccttcacctgtgaaatgcctttgctttgcatattgtgtgtggatgtgtgtgtgtgtgtgtgtgtgtgtgtgtgtgtatgtgtgtgcttctgtgtgtgcctaatgctctgtctcttggtcactgaagcatccaaataaagaatttccctcatgggccagactacaacttaacagacctagggttttgagccatattgccattggatctagtatgtctgtcttgacccctcacccccaccccattcagacctcagtagtccccagtagtcactttaggagttgggacagagtcgagcaccctgtgaaagtctcccttgagttcaggtgccctgaactcagtacagcctcatcttctcatccaccaccttctcctgcttctcctgtcacatagggcctcatgaaggtctttaaagggtttaagctggggatctgctttatgtttgagagaactgttctggctgttatgtaaaggagtgcagggaggggcaggaaaggagacaaggaggccagtatggacactgtgtccagtatggctttccaggctaatcacttagggcagagacccagccttattcatctctacttcctgatgtccatagtggtgtgtcatgaatttttattgaatgaacaaatgaggtgtatgaggagagatggttttctcctgctcagctcttacacagtgataggtttgttccatgggacttatcataggcctggtgattcttgaaagagcatttttcatgactcaaaaatgagctgagaaggagtgttatggccaggtgcggcgtcatgcacctatagtcccagctgctcaggaggctaaggcagaaagaccattcaagcccaggagttccagcctgaagtatgctgtgatcatgcctgtgaataaccactgcactccagccagggcaacataacaagactctatctaaaaaaaaaaaaaaattataaaaataaatttgaaggctgggcgccgtggctcacgcctgtaatccaagcactttgagaggccaaggcaggtggataacctgaggtcagaagttcgagaccagcctggccaacatgatggcaaaaccccgtccctataaaaaatacgaaaatcagctgcgcctggtggcacacatctgtagtccc

SEQ ID NO: 415676 - DNA, 3052 bp, Homo sapiens
cagagaataaagtgggggatggtgagtagagtctgggacaaagtagctggagaagaatctagaaagtaggttggggttaatgtgtgaggggggccataaatgcctgttctgttatgggcagtggggaaccattgaagattttctggtggggcagtggtatgatcagacctgtgttctttcttccaaccagaagagcagcagaagcaaagacaagaaccagtgctgccccatctgtaacatgaccttttcctcccctgtcgtggcccagtcgcactacctggggaagacccacgcaaagaacttaaagctgaagcagcagtccactaaggtggaagccttgcaccagaatagagagatgatagacccagacaagttctgcagcctctgccatgcaactttcaacgaccctgtcatggctcaacaacattatgtgggcaagaaacacagaaaacaggagaccaagctcaaactaatggcacgctatgggcggctggcggaccctgctgtcactgactttccagctggaaagggctacccctgcaaaacatgtaagatagtgctgaactccatagaacagtaccaagctcatgtcagcggcttcaaacacaagaaccagtcaccaaaaacagtggcatcatccctgggccagattccaatgcaaaggcaacccattcagaaagactcaaccaccttggaagactagaggtgattctgcccagcatcccatattgggccagccatgagccagcttcccgtgactgctcagcccttggctccctcttgctcgttgttctcaccaggaaagtacacgggcctgaggcaggattgggccacagacagcctctcattggtccgggctaattcactcctgctgctcccctttggcaggggtcctgtaggtcatgacaggggaggcaagggtattgagagactcggggtctcgcggggtggtagtttggagggtggctttccccatttcccaacccctctgggccttaggtgctgaggcccctgccacctgtctttcctctaaaggtcagttttgggccagttcttgcaactaaagagcagagatctctctgggccctagacatttccagcaaaacctggaactttcatgccaaacctggggcagggcaggaaacagaggaaatggctgcaacatgggagcttggagctaatacgacactctgccttcccccagaaggtgcaggctttcctgagtcttagaccagatatggccagttgcgcaggtttctgccaactgtgaagtatcctcctggagcagtgacacaatcttggcggagcattgctacccccgctgccccctccacagttcctgaatggtgctaaggatctgcagcagttggcaacgagctggggctgggggcggcctccatgtccactgagatcataggacactccaatggggatgggacctttcccctcctccatcagaggtgctctgaccctaggttacacgggaaagtgccccacatgcaagtctccctgagggttctgcccctaaaggcagactgcctcatgcccgctagctgtgaggttcattgctaccctcggccctactagccctctcttcccccttgtgcagcggaccacttgcccagtttgctgtggtgctagccttccccatcatccaccgggtgatttctgggtcccagggaaagaaagagagagctgatgcaggtttctacagtgaggaacaggcgtttcccaggccccacacccagatttctctatctttgctgtgttttatggcctgggactgagtccacacggatagatttttccttgtaaccttgagacgagaattccaaggagtgtcaccatcagaggcttctcttcattgtgtcaaagaagcccctagctgctctcgtggcctccttcccccactccctatcccttcacctgtgaaatgcctttgctttgcatattgtgtgtggatgtgtgtgtgtgtgtgtgtgtgtgtgtgtgtgtatgtgtgtgcttctgtgtgtgcctaatgctctgtctcttggtcactgaagcatccaaataaagaatttccctcatgggccagactacaacttaacagacctagggttttgagccatattgccattggatctagtatgtctgtcttgacccctcacccccaccccattcagacctcagtagtccccagtagtcactttaggagttgggacagagtcgagcaccctgtgaaagtctcccttgagttcaggtgccctgaactcagtacagcctcatcttctcatccaccaccttctcctgcttctcctgtcacatagggcctcatgaaggtctttaaagggtttaagctggggatctgctttatgtttgagagaactgttctggctgttatgtaaaggagtgcagggaggggcaggaaaggagacaaggaggccagtatggacactgtgtccagtatggctttccaggctaatcacttagggcagagacccagccttattcatctctacttcctgatgtccatagtggtgtgtcatgaatttttattgaatgaacaaatgaggtgtatgaggagagatggttttctcctgctcagctcttacacagtgataggtttgttccatgggacttatcataggcctggtgattcttgaaagagcatttttcatgactcaaaaatgagctgagaaggagtgttatggccaggtgcggcgtcatgcacctatagtcccagctgctcaggaggctaaggcagaaagaccattcaagcccaggagttccagcctgaagtatgctgtgatcatgcctgtgaataaccactgcactccagccagggcaacataacaagactctatctaaaaaaaaaaaaaaattataaaaataaatttgaaggctgggcgccgtggctcacgcctgtaatccaagcactttgagaggccaaggcaggtggataacctgaggtcagaagttcgagaccagcctggccaacatgatggcaaaaccccgtccctataaaaaatacgaaaatcagctgcgcctggtggcacacatctgtagtccc

SEQ ID NO: 415677 - DNA, 2917 bp, Homo sapiens
ggtttgcggggaagatggagtatcccgcgccggccacggtgcaggccgcggacggcggagcggccgggccttacagcagctcggagttgctggagggccaggagccggacggggtgcgctttgaccgcgagagggcgcgccgcctgtgggaagccgtgtccggtgcccagccggtgggtagagaggaagtggagcacatgatccagaagaaccaatgtctcttcaccaacacccagtgtaaggtttgctgcgccttgcttatttctgagtcccagaagctggcacattaccagagcaaaaaacatgccaacaaagtgaagagatacctagcaatccatggaatggagacattaaagggggaaacgaagaagctagactcagatcagctggaaagggctacccctgcaaaacatgtaagatagtgctgaactccatagaacagtaccaagctcatgtcagcggcttcaaacacaagaaccagtcaccaaaaacagtggcatcatccctgggccagattccaatgcaaaggcaacccattcagaaagactcaaccaccttggaagactagaggtgattctgcccagcatcccatattgggccagccatgagccagcttcccgtgactgctcagcccttggctccctcttgctcgttgttctcaccaggaaagtacacgggcctgaggcaggattgggccacagacagcctctcattggtccgggctaattcactcctgctgctcccctttggcaggggtcctgtaggtcatgacaggggaggcaagggtattgagagactcggggtctcgcggggtggtagtttggagggtggctttccccatttcccaacccctctgggccttaggtgctgaggcccctgccacctgtctttcctctaaaggtcagttttgggccagttcttgcaactaaagagcagagatctctctgggccctagacatttccagcaaaacctggaactttcatgccaaacctggggcagggcaggaaacagaggaaatggctgcaacatgggagcttggagctaatacgacactctgccttcccccagaaggtgcaggctttcctgagtcttagaccagatatggccagttgcgcaggtttctgccaactgtgaagtatcctcctggagcagtgacacaatcttggcggagcattgctacccccgctgccccctccacagttcctgaatggtgctaaggatctgcagcagttggcaacgagctggggctgggggcggcctccatgtccactgagatcataggacactccaatggggatgggacctttcccctcctccatcagaggtgctctgaccctaggttacacgggaaagtgccccacatgcaagtctccctgagggttctgcccctaaaggcagactgcctcatgcccgctagctgtgaggttcattgctaccctcggccctactagccctctcttcccccttgtgcagcggaccacttgcccagtttgctgtggtgctagccttccccatcatccaccgggtgatttctgggtcccagggaaagaaagagagagctgatgcaggtttctacagtgaggaacaggcgtttcccaggccccacacccagatttctctatctttgctgtgttttatggcctgggactgagtccacacggatagatttttccttgtaaccttgagacgagaattccaaggagtgtcaccatcagaggcttctcttcattgtgtcaaagaagcccctagctgctctcgtggcctccttcccccactccctatcccttcacctgtgaaatgcctttgctttgcatattgtgtgtggatgtgtgtgtgtgtgtgtgtgtgtgtgtgtgtgtatgtgtgtgcttctgtgtgtgcctaatgctctgtctcttggtcactgaagcatccaaataaagaatttccctcatgggccagactacaacttaacagacctagggttttgagccatattgccattggatctagtatgtctgtcttgacccctcacccccaccccattcagacctcagtagtccccagtagtcactttaggagttgggacagagtcgagcaccctgtgaaagtctcccttgagttcaggtgccctgaactcagtacagcctcatcttctcatccaccaccttctcctgcttctcctgtcacatagggcctcatgaaggtctttaaagggtttaagctggggatctgctttatgtttgagagaactgttctggctgttatgtaaaggagtgcagggaggggcaggaaaggagacaaggaggccagtatggacactgtgtccagtatggctttccaggctaatcacttagggcagagacccagccttattcatctctacttcctgatgtccatagtggtgtgtcatgaatttttattgaatgaacaaatgaggtgtatgaggagagatggttttctcctgctcagctcttacacagtgataggtttgttccatgggacttatcataggcctggtgattcttgaaagagcatttttcatgactcaaaaatgagctgagaaggagtgttatggccaggtgcggcgtcatgcacctatagtcccagctgctcaggaggctaaggcagaaagaccattcaagcccaggagttccagcctgaagtatgctgtgatcatgcctgtgaataaccactgcactccagccagggcaacataacaagactctatctaaaaaaaaaaaaaaattataaaaataaatttgaaggctgggcgccgtggctcacgcctgtaatccaagcactttgagaggccaaggcaggtggataacctgaggtcagaagttcgagaccagcctggccaacatgatggcaaaaccccgtccctataaaaaatacgaaaatcagctgcgcctggtggcacacatctgtagtccc

SEQ ID NO: 415678 - DNA, 3062 bp, Homo sapiens
ggtttgcggggaagatggagtatcccgcgccggccacggtgcaggccgcggacggcggagcggccgggccttacagcagctcggagttgctggagggccaggagccggacggggtgcgctttgaccgcgagagggcgcgccgcctgtgggaagccgtgtccggtgcccagccggtgggtagagaggaagtggagcacatgatccagaagaaccaatgtctcttcaccaacacccagtgtaaggtttgctgcgccttgcttatttctgagtcccagaagctggcacattaccagagcaaaaaacatgccaacaaagtgaagagatacctagcaatccatggaatggagacattaaagggggaaacgaagaagctagactcagatcagaagagcagcagaagcaaagacaagaaccagtgctgccccatctgtaacatgaccttttcctcccctgtcgtggcccagtcgcactacctggggaagacccacgcaaagaacttaaagctgaagcagcagtccactaaggtggaagctggaaagggctacccctgcaaaacatgtaagatagtgctgaactccatagaacagtaccaagctcatgtcagcggcttcaaacacaagaaccagtcaccaaaaacagtggcatcatccctgggccagattccaatgcaaaggcaacccattcagaaagactcaaccaccttggaagactagaggtgattctgcccagcatcccatattgggccagccatgagccagcttcccgtgactgctcagcccttggctccctcttgctcgttgttctcaccaggaaagtacacgggcctgaggcaggattgggccacagacagcctctcattggtccgggctaattcactcctgctgctcccctttggcaggggtcctgtaggtcatgacaggggaggcaagggtattgagagactcggggtctcgcggggtggtagtttggagggtggctttccccatttcccaacccctctgggccttaggtgctgaggcccctgccacctgtctttcctctaaaggtcagttttgggccagttcttgcaactaaagagcagagatctctctgggccctagacatttccagcaaaacctggaactttcatgccaaacctggggcagggcaggaaacagaggaaatggctgcaacatgggagcttggagctaatacgacactctgccttcccccagaaggtgcaggctttcctgagtcttagaccagatatggccagttgcgcaggtttctgccaactgtgaagtatcctcctggagcagtgacacaatcttggcggagcattgctacccccgctgccccctccacagttcctgaatggtgctaaggatctgcagcagttggcaacgagctggggctgggggcggcctccatgtccactgagatcataggacactccaatggggatgggacctttcccctcctccatcagaggtgctctgaccctaggttacacgggaaagtgccccacatgcaagtctccctgagggttctgcccctaaaggcagactgcctcatgcccgctagctgtgaggttcattgctaccctcggccctactagccctctcttcccccttgtgcagcggaccacttgcccagtttgctgtggtgctagccttccccatcatccaccgggtgatttctgggtcccagggaaagaaagagagagctgatgcaggtttctacagtgaggaacaggcgtttcccaggccccacacccagatttctctatctttgctgtgttttatggcctgggactgagtccacacggatagatttttccttgtaaccttgagacgagaattccaaggagtgtcaccatcagaggcttctcttcattgtgtcaaagaagcccctagctgctctcgtggcctccttcccccactccctatcccttcacctgtgaaatgcctttgctttgcatattgtgtgtggatgtgtgtgtgtgtgtgtgtgtgtgtgtgtgtgtatgtgtgtgcttctgtgtgtgcctaatgctctgtctcttggtcactgaagcatccaaataaagaatttccctcatgggccagactacaacttaacagacctagggttttgagccatattgccattggatctagtatgtctgtcttgacccctcacccccaccccattcagacctcagtagtccccagtagtcactttaggagttgggacagagtcgagcaccctgtgaaagtctcccttgagttcaggtgccctgaactcagtacagcctcatcttctcatccaccaccttctcctgcttctcctgtcacatagggcctcatgaaggtctttaaagggtttaagctggggatctgctttatgtttgagagaactgttctggctgttatgtaaaggagtgcagggaggggcaggaaaggagacaaggaggccagtatggacactgtgtccagtatggctttccaggctaatcacttagggcagagacccagccttattcatctctacttcctgatgtccatagtggtgtgtcatgaatttttattgaatgaacaaatgaggtgtatgaggagagatggttttctcctgctcagctcttacacagtgataggtttgttccatgggacttatcataggcctggtgattcttgaaagagcatttttcatgactcaaaaatgagctgagaaggagtgttatggccaggtgcggcgtcatgcacctatagtcccagctgctcaggaggctaaggcagaaagaccattcaagcccaggagttccagcctgaagtatgctgtgatcatgcctgtgaataaccactgcactccagccagggcaacataacaagactctatctaaaaaaaaaaaaaaattataaaaataaatttgaaggctgggcgccgtggctcacgcctgtaatccaagcactttgagaggccaaggcaggtggataacctgaggtcagaagttcgagaccagcctggccaacatgatggcaaaaccccgtccctataaaaaatacgaaaatcagctgcgcctggtggcacacatctgtagtccc

SEQ ID NO: 415679 - DNA, 2906 bp, Homo sapiens
ggtttgcggggaagatggagtatcccgcgccggccacggtgcaggccgcggacggcggagcggccgggccttacagcagctcggagttgctggagggccaggagccggacggggtgcgctttgaccgcgagagggcgcgccgcctgtgggaagccgtgtccggtgcccagccggtgggtagagaggaagccttgcaccagaatagagagatgatagacccagacaagttctgcagcctctgccatgcaactttcaacgaccctgtcatggctcaacaacattatgtgggcaagaaacacagaaaacaggagaccaagctcaaactaatggcacgctatgggcggctggcggaccctgctgtcactgactttccagctggaaagggctacccctgcaaaacatgtaagatagtgctgaactccatagaacagtaccaagctcatgtcagcggcttcaaacacaagaaccagtcaccaaaaacagtggcatcatccctgggccagattccaatgcaaaggcaacccattcagaaagactcaaccaccttggaagactagaggtgattctgcccagcatcccatattgggccagccatgagccagcttcccgtgactgctcagcccttggctccctcttgctcgttgttctcaccaggaaagtacacgggcctgaggcaggattgggccacagacagcctctcattggtccgggctaattcactcctgctgctcccctttggcaggggtcctgtaggtcatgacaggggaggcaagggtattgagagactcggggtctcgcggggtggtagtttggagggtggctttccccatttcccaacccctctgggccttaggtgctgaggcccctgccacctgtctttcctctaaaggtcagttttgggccagttcttgcaactaaagagcagagatctctctgggccctagacatttccagcaaaacctggaactttcatgccaaacctggggcagggcaggaaacagaggaaatggctgcaacatgggagcttggagctaatacgacactctgccttcccccagaaggtgcaggctttcctgagtcttagaccagatatggccagttgcgcaggtttctgccaactgtgaagtatcctcctggagcagtgacacaatcttggcggagcattgctacccccgctgccccctccacagttcctgaatggtgctaaggatctgcagcagttggcaacgagctggggctgggggcggcctccatgtccactgagatcataggacactccaatggggatgggacctttcccctcctccatcagaggtgctctgaccctaggttacacgggaaagtgccccacatgcaagtctccctgagggttctgcccctaaaggcagactgcctcatgcccgctagctgtgaggttcattgctaccctcggccctactagccctctcttcccccttgtgcagcggaccacttgcccagtttgctgtggtgctagccttccccatcatccaccgggtgatttctgggtcccagggaaagaaagagagagctgatgcaggtttctacagtgaggaacaggcgtttcccaggccccacacccagatttctctatctttgctgtgttttatggcctgggactgagtccacacggatagatttttccttgtaaccttgagacgagaattccaaggagtgtcaccatcagaggcttctcttcattgtgtcaaagaagcccctagctgctctcgtggcctccttcccccactccctatcccttcacctgtgaaatgcctttgctttgcatattgtgtgtggatgtgtgtgtgtgtgtgtgtgtgtgtgtgtgtgtatgtgtgtgcttctgtgtgtgcctaatgctctgtctcttggtcactgaagcatccaaataaagaatttccctcatgggccagactacaacttaacagacctagggttttgagccatattgccattggatctagtatgtctgtcttgacccctcacccccaccccattcagacctcagtagtccccagtagtcactttaggagttgggacagagtcgagcaccctgtgaaagtctcccttgagttcaggtgccctgaactcagtacagcctcatcttctcatccaccaccttctcctgcttctcctgtcacatagggcctcatgaaggtctttaaagggtttaagctggggatctgctttatgtttgagagaactgttctggctgttatgtaaaggagtgcagggaggggcaggaaaggagacaaggaggccagtatggacactgtgtccagtatggctttccaggctaatcacttagggcagagacccagccttattcatctctacttcctgatgtccatagtggtgtgtcatgaatttttattgaatgaacaaatgaggtgtatgaggagagatggttttctcctgctcagctcttacacagtgataggtttgttccatgggacttatcataggcctggtgattcttgaaagagcatttttcatgactcaaaaatgagctgagaaggagtgttatggccaggtgcggcgtcatgcacctatagtcccagctgctcaggaggctaaggcagaaagaccattcaagcccaggagttccagcctgaagtatgctgtgatcatgcctgtgaataaccactgcactccagccagggcaacataacaagactctatctaaaaaaaaaaaaaaattataaaaataaatttgaaggctgggcgccgtggctcacgcctgtaatccaagcactttgagaggccaaggcaggtggataacctgaggtcagaagttcgagaccagcctggccaacatgatggcaaaaccccgtccctataaaaaatacgaaaatcagctgcgcctggtggcacacatctgtagtccc

SEQ ID NO: 415680 - DNA, 3154 bp, Homo sapiens
ggtttgcggggaagatggagtatcccgcgccggccacggtgcaggccgcggacggcggagcggccgggccttacagcagctcggagttgctggagggccaggagccggacggggtgcgctttgaccgcgagagggcgcgccgcctgtgggaagccgtgtccggtgcccagccggtgggtagagaggaagtggagcacatgatccagaagaaccaatgtctcttcaccaacacccagtgtaaggtttgctgcgccttgcttatttctgagtcccagaagctggcacattaccagagcaaaaaacatgccaacaaagtgaagagatacctagcaatccatggaatggagacattaaagggggaaacgaagaagctagactcagatcagaagagcagcagaagcaaagacaagaaccagtgctgccccatctgtaacatgaccttttcctcccctgtcgtggcccagtcgcactacctggggaagacccacgcaaagaacttaaagctgaagcagcagtccactaaggtggaagccttgcaccagaatagagagatgatagacccagacaagttctgcagcctctgccatgcaactttcaacgaccctgtcatggctcaacaacattatgtgggcaagaaacacagaaaacaggagaccaagctcaaactaatggcacgctatgggcggctggcggaccctgctgtcactgactttccaggtcaccaaaaacagtggcatcatccctgggccagattccaatgcaaaggcaacccattcagaaagactcaaccaccttggaagactagaggtgattctgcccagcatcccatattgggccagccatgagccagcttcccgtgactgctcagcccttggctccctcttgctcgttgttctcaccaggaaagtacacgggcctgaggcaggattgggccacagacagcctctcattggtccgggctaattcactcctgctgctcccctttggcaggggtcctgtaggtcatgacaggggaggcaagggtattgagagactcggggtctcgcggggtggtagtttggagggtggctttccccatttcccaacccctctgggccttaggtgctgaggcccctgccacctgtctttcctctaaaggtcagttttgggccagttcttgcaactaaagagcagagatctctctgggccctagacatttccagcaaaacctggaactttcatgccaaacctggggcagggcaggaaacagaggaaatggctgcaacatgggagcttggagctaatacgacactctgccttcccccagaaggtgcaggctttcctgagtcttagaccagatatggccagttgcgcaggtttctgccaactgtgaagtatcctcctggagcagtgacacaatcttggcggagcattgctacccccgctgccccctccacagttcctgaatggtgctaaggatctgcagcagttggcaacgagctggggctgggggcggcctccatgtccactgagatcataggacactccaatggggatgggacctttcccctcctccatcagaggtgctctgaccctaggttacacgggaaagtgccccacatgcaagtctccctgagggttctgcccctaaaggcagactgcctcatgcccgctagctgtgaggttcattgctaccctcggccctactagccctctcttcccccttgtgcagcggaccacttgcccagtttgctgtggtgctagccttccccatcatccaccgggtgatttctgggtcccagggaaagaaagagagagctgatgcaggtttctacagtgaggaacaggcgtttcccaggccccacacccagatttctctatctttgctgtgttttatggcctgggactgagtccacacggatagatttttccttgtaaccttgagacgagaattccaaggagtgtcaccatcagaggcttctcttcattgtgtcaaagaagcccctagctgctctcgtggcctccttcccccactccctatcccttcacctgtgaaatgcctttgctttgcatattgtgtgtggatgtgtgtgtgtgtgtgtgtgtgtgtgtgtgtgtatgtgtgtgcttctgtgtgtgcctaatgctctgtctcttggtcactgaagcatccaaataaagaatttccctcatgggccagactacaacttaacagacctagggttttgagccatattgccattggatctagtatgtctgtcttgacccctcacccccaccccattcagacctcagtagtccccagtagtcactttaggagttgggacagagtcgagcaccctgtgaaagtctcccttgagttcaggtgccctgaactcagtacagcctcatcttctcatccaccaccttctcctgcttctcctgtcacatagggcctcatgaaggtctttaaagggtttaagctggggatctgctttatgtttgagagaactgttctggctgttatgtaaaggagtgcagggaggggcaggaaaggagacaaggaggccagtatggacactgtgtccagtatggctttccaggctaatcacttagggcagagacccagccttattcatctctacttcctgatgtccatagtggtgtgtcatgaatttttattgaatgaacaaatgaggtgtatgaggagagatggttttctcctgctcagctcttacacagtgataggtttgttccatgggacttatcataggcctggtgattcttgaaagagcatttttcatgactcaaaaatgagctgagaaggagtgttatggccaggtgcggcgtcatgcacctatagtcccagctgctcaggaggctaaggcagaaagaccattcaagcccaggagttccagcctgaagtatgctgtgatcatgcctgtgaataaccactgcactccagccagggcaacataacaagactctatctaaaaaaaaaaaaaaattataaaaataaatttgaaggctgggcgccgtggctcacgcctgtaatccaagcactttgagaggccaaggcaggtggataacctgaggtcagaagttcgagaccagcctggccaacatgatggcaaaaccccgtccctataaaaaatacgaaaatcagctgcgcctggtggcacacatctgtagtccc

SEQ ID NO: 415681 - DNA, 330 bp, Homo sapiens
agaaaacaggagaccaagctcaaactaatggcacgctatgggcggctggcggaccctgctgtcactgactttccaggtgagggggcctagctcacacccagagctggaccagggtttggccactggggctacccggaccagctgacgttgtgcttttcctccttaggtcttgtaagtagggtttgcgaactcagatggctacagaagccagatgagaaattaaaatgagagccaggaaggggatatggtcagctgaagagtgaatgccattcctactcagctgttaccatatctttcaggttttcttttctttttttttttttttttttt

SEQ ID NO: 415682 - DNA, 274 bp, Homo sapiens
ataaggaggaaaactatagctctagtggacatgctgtatcccagtggttctcacctgggaaagattttacccaggaagggacatttggcaatgtcaggagacatttttggatgtgacatcaggagtaggggaggctaatggcatctaataggtaggggttagggatgagccaaaacatcctacaatacacagcatagctctccacagcaatgattcatccagcccaaaatgtcaagagttctgaggttgagaaaccctatgttaaccaggttac

SEQ ID NO: 415683 - DNA, 1791 bp, Homo sapiens
cgcacttccggtggggagattccggcctggagctcccagggccgagcagaccttgggacctgtgagcgctgcatccaattaaccatgggaagggtcagcaccagccaccagccccttaggtgaggactctgcctggggctctgctgatggttccgaatcatggagctgcagagagctcctccagcctggagacgttcttggtgaaagctgtggtctaactccaccggctcttcctgcacattgtattcaagaggggtgcctgcccccgctgactcaggagctccggtgctgcagccgccacgaatggggaggtgggccctcgatgtggcctttttgtggaaggcggtgttgaccctggggctggtgcttctctactactgcttctccatcggcatcaccttctacaacaagtggctgacaaagagcttccatttccccctcttcatgacgatgctgcacctggccgtgatcttcctcttctccgccctgtccagggcgctggttcagtgctccagccacagggcccgtgtggtgctgagctgggccgactacctcagaagagtggctcccacagctctggcgacggcgcttgacgtgggcttgtccaactggagcttcctgtatgtcaccgtctcgctgtacacaatgaccaaatcctcagctgtcctcttcatcttgatcttctctctgatcttcaagctggaggagctgtccacacagttcaacgtggagggcttcgccttggtgctgggggcctcgttcatcggtggcattcgctggaccctcacccagatgctcctgcagaaggctgaactcggcctccagaatcccatcgacaccatgttccacctgcagccactcatgttcctggggctcttccctctctttgctgtatttgaaggtctccatttgtccacatctgagaaaatcttccgtttccaggacacagggctgctcctgcgggtacttgggagcctcttccttggcgggattctcgcctttggtttgggcttctctgagttcctcctggtctccagaacctccagcctcactctctccattgccggcatttttaaggaagtctgcactttgctgttggcagctcatctgctgggcgatcagatcagcctcctgaactggctgggcttcgccctctgcctctcgggaatatccctccacgttgccctcaaagccctgcattccagaggtgatggtggccccaaggccttgaaggggctgggctccagccccgacctggagctgctgctccggagcagccagcgggaggaaggtgacaatgaggaggaggagtactttgtggcccaggggcagcagtgaccagccagggcaaatggcttagaagcaggccactccccagcctgctgccagcactcactgtgctcaagccgccagggctcatcatggtagctgggagctgtggacgggagtcaccaggtggtggggccaagccagggactcatgacttttgcccctcccttcagagcctggtcacacaaggggcgagcaccaggccagcctgggactggccagagctgggcccaagctgcgctggaatcgcagcaggagaggggagtgggctggttcttcccaccacttcccaggctctgacagccgagactcatttccaaggcacagcagctttctaaagggactgagtttggactgggttttggacctccaggggctggagcttcatcacctgggcagtgtcttttctcagagagcaggtttctttatagtttggaaataaatggttcacggtccactggc

SEQ ID NO: 415684 - DNA, 629 bp, Homo sapiens
cttggcccaccacctggtgactcccgtccacagctcccagctaccatgatgagccctggcggcttgagcacagtgagtgctggcaggtggtggggccaagccagggactcatgacttttgcccctcccttcagagcctggtcacacaaggggcgagcaccaggccagcctgggactggccagagctgggcccaagctgcgctggaatcgcagcaggagaggggagtgggctggttcttcccaccacttcccaggctctgacagccgagactcatttccaaggcacagcagctttctaaagggactgagtttggactgggttttggacctccaggggctggagcttcatcacctgggcagtgtcttttctcagagagcaggtttctttatagtttggaaataaatggttcacggtccactggccgccttgtgttgctggagacgtgggggcagggaggggacagtgtgggcctggcctctcctttcctttccctgcctggagccttcttcaaatgtctggtcttaagccaggcctccttcattttctcgctcctgttagaacaccagtcccctccccagtggggccccactgcacctgctggcaggaaataaatgaatgtttactgagta

SEQ ID NO: 415685 - DNA, 456 bp, Homo sapiens
catccgtctttccatgcagggccacccccctctacttcaccccagaggctcagacgagccctccccatcattccgcagggctcatcatggtagctgggagctgtggacgggagtcaccaggtggtggggccaagccagggactcatgacttttgcccctcccttcagagcctggtcacacaaggggcgagcaccaggccagcctgggactggccagagctgggcccaagctgcgctggaatcgcagcaggagaggggagtgggctggttcttcccaccacttcccaggctctgacagccgagactcatttccaaggcacagcagctttctaaagggactgagtttggactgggttttggacctccaggggctggagcttcatcacctgggcagtgtcttttctcagagagcaggtttctttatagtttggaaataaatggttcacggtccactggc

SEQ ID NO: 415686 - DNA, 1854 bp, Homo sapiens
cgcacttccggtggggagattccggcctggagctcccagggccgagcagaccttgggacctgtgagcgctgcatccaattaaccatgggaagggtcagcaccagccaccagccccttaggtgaggactctgcctggggctctgctgatggttccgaatcatggagctgcagagagctcctccagcctggagacgttcttggtgaaagctgtggtctaactccaccggctcttcctgcacattgtattcaagaggggtgcctgcccccgctgactcaggagctccggtgctgcagccgccacgaatggggaggtgggccctcgatgtggcctttttgtggaaggcggtgttgaccctggggctggtgcttctctactactgcttctccatcggcatcaccttctacaacaagtggctgacaaagagcttccatttccccctcttcatgacgatgctgcacctggccgtgatcttcctcttctccgccctgtccagggcgctggttcagtgctccagccacagggcccgtgtggtgctgagctgggccgactacctcagaagagtggctcccacagctctggcgacggcgcttgacgtgggcttgtccaactggagcttcctgtatgtcaccgtctcgctgtacacaatgaccaaatcctcagctgtcctcttcatcttgatcttctctctgatcttcaagctggaggagctgcgcgcggcactggtcctggtggtcctcctcatcgccgggggtctcttcatgttcacctacaagtccacacagttcaacgtggagggcttcgccttggtgctgggggcctcgttcatcggtggcattcgctggaccctcacccagatgctcctgcagaaggctgaactcggcctccagaatcccatcgacaccatgttccacctgcagccactcatgttcctggggctcttccctctctttgctgtatttgaaggtctccatttgtccacatctgagaaaatcttccgtttccaggacacagggctgctcctgcgggtacttgggagcctcttccttggcgggattctcgcctttggtttgggcttctctgagttcctcctggtctccagaacctccagcctcactctctccattgccggcatttttaaggaagtctgcactttgctgttggcagctcatctgctgggcgatcagatcagcctcctgaactggctgggcttcgccctctgcctctcgggaatatccctccacgttgccctcaaagccctgcattccagaggtgatggtggccccaaggccttgaaggggctgggctccagccccgacctggagctgctgctccggagcagccagcgggaggaaggtgacaatgaggaggaggagtactttgtggcccaggggcagcagtgaccagccagggcaaatggcttagaagcaggccactccccagcctgctgccagcactcactgtgctcaagccgccagggctcatcatggtagctgggagctgtggacgggagtcaccaggtggtggggccaagccagggactcatgacttttgcccctcccttcagagcctggtcacacaaggggcgagcaccaggccagcctgggactggccagagctgggcccaagctgcgctggaatcgcagcaggagaggggagtgggctggttcttcccaccacttcccaggctctgacagccgagactcatttccaaggcacagcagctttctaaagggactgagtttggactgggttttggacctccaggggctggagcttcatcacctgggcagtgtcttttctcagagagcaggtttctttatagtttggaaataaatggttcacggtccactggc

SEQ ID NO: 415687 - DNA, 2283 bp, Homo sapiens
cgcacttccggtggggagattccggcctggagctcccagggccgagcagaccttgggacctgtgagcgctgcatccaattaaccatgggaagggtcagcaccagccaccagccccttaggtgaggactctgcctggggctctgctgatggttccgaatcatggagctgcagagagctcctccagcctggagacgttcttggtgaaagctgtggtctaactccaccggctcttcctgcacattgtattcaagaggggtgcctgcccccgctgactcaggagctccggtgctgcagccgccacgaatggggaggtgggccctcgatgtggcctttttgtggaaggcggtgttgaccctggggctggtgcttctctactactgcttctccatcggcatcaccttctacaacaagtggctgacaaagagcttccatttccccctcttcatgacgatgctgcacctggccgtgatcttcctcttctccgccctgtccagggcgctggttcagtgctccagccacagggcccgtgtggtgctgagctgggccgactacctcagaagagtggctcccacagctctggcgacggcgcttgacgtgggcttgtccaactggagcttcctgtatgtcaccgtctcgctgtacacaatgaccaaatcctcagctgtcctcttcatcttgatcttctctctgatcttcaagctggaggagctgcgcgcggcactggtcctggtggtcctcctcatcgccgggggtctcttcatgttcacctacaagtccacacagttcaacgtggagggcttcgccttggtgctgggggcctcgttcatcggtggcattcgctggaccctcacccagatgctcctgcagaaggctgaactcggcctccagaatcccatcgacaccatgttccacctgcagccactcatgttcctggggctcttccctctctttgctgtatttgaaggtctccatttgtccacatctgagaaaatcttccgtttccaggacacagggctgctcctgcgggtacttgggagcctcttccttggcgggattctcgcctttggtttgggcttctctgagttcctcctggtctccagaacctccagcctcactctctccattgccggcatttttaaggaagtctgcactttgctgttggcagctcatctgctgggcgatcagatcagcctcctgaactggctgggcttcgccctctgcctctcgggaatatccctccacgttgccctcaaagccctgcattccagagcttccagaagcctctgttttctgttcttctccctgtgactcttagtgattctgatgcaggaagtgtgcccggtggctctgctgccgtcactcctctaggaagatgtgggggtcatctccagagtgggtgggtggggcctgggtgactcagcacacatgcaaatcagagcaaaccaagaaaaccacgactgggcctgtaactgtggtctctctctatcccaaggtgatggtggccccaaggccttgaaggggctgggctccagccccgacctggagctgctgctccggagcagccagcgggaggaaggtgacaatgaggaggaggagtactttgtggcccaggggcagcagtgaccagccagggcaaatggcttagaagcaggccactccccagcctgctgccagcactcactgtgctcaagccgccagggctcatcatggtagctgggagctgtggacgggagtcaccaggtggtggggccaagccagggactcatgacttttgcccctcccttcagagcctggtcacacaaggggcgagcaccaggccagcctgggactggccagagctgggcccaagctgcgctggaatcgcagcaggagaggggagtgggctggttcttcccaccacttcccaggctctgacagccgagactcatttccaaggcacagcagctttctaaagggactgagtttggactgggttttggacctccaggggctggagcttcatcacctgggcagtgtcttttctcagagagcaggtttctttatagtttggaaataaatggttcacggtccactggccgccttgtgttgctggagacgtgggggcagggaggggacagtgtgggcctggcctctcctttcctttccctgcctggagccttcttcaaatgtctggtcttaagccaggcctccttcattttctcgctcctgttagaacaccagtcccctccccagtggggccccactgcacctgctggcaggaaataaatgaatgtttactgagta

SEQ ID NO: 415688 - DNA, 2300 bp, Homo sapiens
cgcacttccggtggggagattccggcctggagctcccagggccgagcagaccttgggacctgtgagcgctgcatccaattaaccatgggaagggtcagcaccagccaccagccccttaggtgaggactctgcctggggctctgctgatggttccgaatcatggagctgcagagagctcctccagcctggagacgttcttggtgaaagctgtggtctaactccaccggctcttcctgcacattgtattcaagaggggtgcctgcccccgctgactcaggagctccggtgctgcagccgccacgaatggggaggtgggccctcgatgtggcctttttgtggaaggcggtgttgaccctggggctggtgcttctctactactgcttctccatcggcatcaccttctacaacaagtggctgacaaagagcttccatttccccctcttcatgacgatgctgcacctggccgtgatcttcctcttctccgccctgtccagggcgctggttcagtgctccagccacagggcccgtgtggtgctgagctgggccgactacctcagaagagtggctcccacagctctggcgacggcgcttgacgtgggcttgtccaactggagcttcctgtatgtcaccgtctcgctgtacacaatgaccaaatcctcagctgtcctcttcatcttgatcttctctctgatcttcaagctggaggagctgcgcgcggcactggtcctggtggtcctcctcatcgccgggggtctcttcatgttcacctacaagtccacacagttcaacgtggagggcttcgccttggtgctgggggcctcgttcatcggtggcattcgctggaccctcacccagatgctcctgcagaaggctgaactcggcctccagaatcccatcgacaccatgttccacctgcagccactcatgttcctggggctcttccctctctttgctgtatttgaaggtctccatttgtccacatctgagaaaatcttccgtttccaggacacagggctgctcctgcgggtacttgggagcctcttccttggcgggattctcgcctttggtttgggcttctctgagttcctcctggtctccagaacctccagcctcactctctccattgccggcatttttaaggaagtctgcactttgctgttggcagctcatctgctgggcgatcagatcagcctcctgaactggctgggcttcgccctctgcctctcgggaatatccctccacgttgccctcaaagccctgcattccagaggaggtaacccagagtcccttccagaagcctctgttttctgttcttctccctgtgactcttagtgattctgatgcaggaagtgtgcccggtggctctgctgccgtcactcctctaggaagatgtgggggtcatctccagagtgggtgggtggggcctgggtgactcagcacacatgcaaatcagagcaaaccaagaaaaccacgactgggcctgtaactgtggtctctctctatcccaaggtgatggtggccccaaggccttgaaggggctgggctccagccccgacctggagctgctgctccggagcagccagcgggaggaaggtgacaatgaggaggaggagtactttgtggcccaggggcagcagtgaccagccagggcaaatggcttagaagcaggccactccccagcctgctgccagcactcactgtgctcaagccgccagggctcatcatggtagctgggagctgtggacgggagtcaccaggtggtggggccaagccagggactcatgacttttgcccctcccttcagagcctggtcacacaaggggcgagcaccaggccagcctgggactggccagagctgggcccaagctgcgctggaatcgcagcaggagaggggagtgggctggttcttcccaccacttcccaggctctgacagccgagactcatttccaaggcacagcagctttctaaagggactgagtttggactgggttttggacctccaggggctggagcttcatcacctgggcagtgtcttttctcagagagcaggtttctttatagtttggaaataaatggttcacggtccactggccgccttgtgttgctggagacgtgggggcagggaggggacagtgtgggcctggcctctcctttcctttccctgcctggagccttcttcaaatgtctggtcttaagccaggcctccttcattttctcgctcctgttagaacaccagtcccctccccagtggggccccactgcacctgctggcaggaaataaatgaatgtttactgagta

SEQ ID NO: 415689 - DNA, 2256 bp, Homo sapiens
cgcacttccggtggggagattccggcctggagctcccagggccgaggtcactttggtggcagttcatggagaatagcttgaggtgacaagacagcagacacgacgtgggtctctgggactgcctgtgccgttgtgggcagcccctccagagccctgagtcacgcagccttcagaggcacccatggctacgagaagcacagtctctgcctgaggctccagagcggccctttttccccagcagcagaccttgggacctgtgagcgctgcatccaattaaccatgggaagggtcagcaccagccaccagccccttaggtgaggactctgcctggggctctgctgatggttccgaatcatggagctgcagagagctcctccagcctggagacgttcttggtgaaagctgtggtctaactccaccggctcttcctgcacattgtattcaagaggggtgcctgcccccgctgactcaggagctccggtgctgcagccgccacgaatggggaggtgggccctcgatgtggcctttttgtggaaggcggtgttgaccctggggctggtgcttctctactactgcttctccatcggcatcaccttctacaacaagtggctgacaaagagcttccatttccccctcttcatgacgatgctgcacctggccgtgatcttcctcttctccgccctgtccagggcgctggttcagtgctccagccacagggcccgtgtggtgctgagctgggccgactacctcagaagagtggctcccacagctctggcgacggcgcttgacgtgggcttgtccaactggagcttcctgtatgtcaccgtctcgctgtacacaatgaccaaatcctcagctgtcctcttcatcttgatcttctctctgatcttcaagctggaggagctgcgcgcggcactggtcctggtggtcctcctcatcgccgggggtctcttcatgttcacctacaagtccacacagttcaacgtggagggcttcgccttggtgctgggggcctcgttcatcggtggcattcgctggaccctcacccagatgctcctgcagaaggctgaactcggcctccagaatcccatcgacaccatgttccacctgcagccactcatgttcctggggctcttccctctctttgctgtatttgaaggtctccatttgtccacatctgagaaaatcttccgtttccaggacacagggctgctcctgcgggtacttgggagcctcttccttggcgggattctcgcctttggtttgggcttctctgagttcctcctggtctccagaacctccagcctcactctctccattgccggcatttttaaggaagtctgcactttgctgttggcagctcatctgctgggcgatcagatcagcctcctgaactggctgggcttcgccctctgcctctcgggaatatccctccacgttgccctcaaagccctgcattccagaggtgatggtggccccaaggccttgaaggggctgggctccagccccgacctggagctgctgctccggagcagccagcgggaggaaggtgacaatgaggaggaggagtactttgtggcccaggggcagcagtgaccagccagggcaaatggcttagaagcaggccactccccagcctgctgccagcactcactgtgctcaagccgccagggctcatcatggtagctgggagctgtggacgggagtcaccaggtggtggggccaagccagggactcatgacttttgcccctcccttcagagcctggtcacacaaggggcgagcaccaggccagcctgggactggccagagctgggcccaagctgcgctggaatcgcagcaggagaggggagtgggctggttcttcccaccacttcccaggctctgacagccgagactcatttccaaggcacagcagctttctaaagggactgagtttggactgggttttggacctccaggggctggagcttcatcacctgggcagtgtcttttctcagagagcaggtttctttatagtttggaaataaatggttcacggtccactggccgccttgtgttgctggagacgtgggggcagggaggggacagtgtgggcctggcctctcctttcctttccctgcctggagccttcttcaaatgtctggtcttaagccaggcctccttcattttctcgctcctgttagaacaccagtcccctccccagtggggccccactgcacctgctggcaggaaataaatgaatgtttactgagta

SEQ ID NO: 415690 - DNA, 1885 bp, Homo sapiens
cgcacttccggtggggagattccggcctggagctcccagggccgagcagaccttgggacctgtgagcgctgcatccaattaaccatgggaagggtcagcaccagccaccagccccttaggtgaggactctgcctggggctctgctgatggttccgaatcatggagctgcagagagctcctccagcctggagacgttcttggtgaaagctgtggtctaactccaccggctcttcctgcacattgtattcaagaggggtgcctgcccccgctgactcaggagctccggtgctgcagccgccacgaatggggaggtgggccctcgatgtggcctttttgtggaaggcggtgttgaccctggggctggtgcttctctactactgcttctccatcggcatcaccttctacaacaagtggctgacaaagagcttccatttccccctcttcatgacgatgctgcacctggccgtgatcttcctcttctccgccctgtccagggcgctggttcagtgctccagccacagggcccgtgtggtgctgagctgggccgactacctcagaagagtggctcccacagctctggcgacggcgcttgacgtgggcttgtccaactggagcttcctgtatgtcaccgtctcgctgtacacaatgaccaaatcctcagctgtcctcttcatcttgatcttctctctgatcttcaagctggaggagctgcgcgcggcactggtcctggtggtcctcctcatcgccgggggtctcttcatgttcacctacaagtccacacagttcaacgtggagggcttcgccttggtgctgggggcctcgttcatcggtggcattcgctggaccctcacccagatgctcctgcagaaggctgaactcggcctccagaatcccatcgacaccatgttccacctgcagccactcatgttcctggggctcttccctctctttgctgtatttgaaggaagtctgcactttgctgttggcagctcatctgctgggcgatcagatcagcctcctgaactggctgggcttcgccctctgcctctcgggaatatccctccacgttgccctcaaagccctgcattccagaggtgatggtggccccaaggccttgaaggggctgggctccagccccgacctggagctgctgctccggagcagccagcgggaggaaggtgacaatgaggaggaggagtactttgtggcccaggggcagcagtgaccagccagggcaaatggcttagaagcaggccactccccagcctgctgccagcactcactgtgctcaagccgccagggctcatcatggtagctgggagctgtggacgggagtcaccaggtggtggggccaagccagggactcatgacttttgcccctcccttcagagcctggtcacacaaggggcgagcaccaggccagcctgggactggccagagctgggcccaagctgcgctggaatcgcagcaggagaggggagtgggctggttcttcccaccacttcccaggctctgacagccgagactcatttccaaggcacagcagctttctaaagggactgagtttggactgggttttggacctccaggggctggagcttcatcacctgggcagtgtcttttctcagagagcaggtttctttatagtttggaaataaatggttcacggtccactggccgccttgtgttgctggagacgtgggggcagggaggggacagtgtgggcctggcctctcctttcctttccctgcctggagccttcttcaaatgtctggtcttaagccaggcctccttcattttctcgctcctgttagaacaccagtcccctccccagtggggccccactgcacctgctggcaggaaataaatgaatgtttactgagta

SEQ ID NO: 415691 - DNA, 2173 bp, Homo sapiens
ggggcgggcagtaaacacgtgagcaaacaaggaaacgtcagaggtgggagtgccacgaggattgggaggggtggggcattggagaaagtattcagccaagcggaggtctgcggaagggagctgaaggcaggaagagcagcaagtaaagaaaaacacagcagaccttgggacctgtgagcgctgcatccaattaaccatgggaagggtcagcaccagccaccagccccttaggtgaggactctgcctggggctctgctgatggttccgaatcatggagctgcagagagctcctccagcctggagacgttcttggtgaaagctgtggtctaactccaccggctcttcctgcacattgtattcaagaggggtgcctgcccccgctgactcaggagctccggtgctgcagccgccacgaatggggaggtgggccctcgatgtggcctttttgtggaaggcggtgttgaccctggggctggtgcttctctactactgcttctccatcggcatcaccttctacaacaagtggctgacaaagagcttccatttccccctcttcatgacgatgctgcacctggccgtgatcttcctcttctccgccctgtccagggcgctggttcagtgctccagccacagggcccgtgtggtgctgagctgggccgactacctcagaagagtggctcccacagctctggcgacggcgcttgacgtgggcttgtccaactggagcttcctgtatgtcaccgtctcgctgtacacaatgaccaaatcctcagctgtcctcttcatcttgatcttctctctgatcttcaagctggaggagctgcgcgcggcactggtcctggtggtcctcctcatcgccgggggtctcttcatgttcacctacaagtccacacagttcaacgtggagggcttcgccttggtgctgggggcctcgttcatcggtggcattcgctggaccctcacccagatgctcctgcagaaggctgaactcggcctccagaatcccatcgacaccatgttccacctgcagccactcatgttcctggggctcttccctctctttgctgtatttgaaggtctccatttgtccacatctgagaaaatcttccgtttccaggacacagggctgctcctgcgggtacttgggagcctcttccttggcgggattctcgcctttggtttgggcttctctgagttcctcctggtctccagaacctccagcctcactctctccattgccggcatttttaaggaagtctgcactttgctgttggcagctcatctgctgggcgatcagatcagcctcctgaactggctgggcttcgccctctgcctctcgggaatatccctccacgttgccctcaaagccctgcattccagaggtgatggtggccccaaggccttgaaggggctgggctccagccccgacctggagctgctgctccggagcagccagcgggaggaaggtgacaatgaggaggaggagtactttgtggcccaggggcagcagtgaccagccagggcaaatggcttagaagcaggccactccccagcctgctgccagcactcactgtgctcaagccgccagggctcatcatggtagctgggagctgtggacgggagtcaccaggtggtggggccaagccagggactcatgacttttgcccctcccttcagagcctggtcacacaaggggcgagcaccaggccagcctgggactggccagagctgggcccaagctgcgctggaatcgcagcaggagaggggagtgggctggttcttcccaccacttcccaggctctgacagccgagactcatttccaaggcacagcagctttctaaagggactgagtttggactgggttttggacctccaggggctggagcttcatcacctgggcagtgtcttttctcagagagcaggtttctttatagtttggaaataaatggttcacggtccactggccgccttgtgttgctggagacgtgggggcagggaggggacagtgtgggcctggcctctcctttcctttccctgcctggagccttcttcaaatgtctggtcttaagccaggcctccttcattttctcgctcctgttagaacaccagtcccctccccagtggggccccactgcacctgctggcaggaaataaatgaatgtttactgagta

SEQ ID NO: 415692 - DNA, 2118 bp, Homo sapiens
cgcacttccggtggggagattccggcctggagctcccagggccgagcagaccttgggacctgtgagcgctgcatccaattaaccatgggaagggtcagcaccagccaccagccccttaggtgaggactctgcctggggctctgctgatggttccgaatcatggagctgcagagagctcctccagcctggagacgttcttggtgaaagctgtggtctaactccaccggctcttcctgcacattgtattcaagaggggtgcctgcccccgctgactcaggagctccggtgctgcagccgccacgaatggggaggtgggccctcgatgtggcctttttgtggaaggcggtgttgaccctggggctggtgcttctctactactgcttctccatcggcatcaccttctacaacaagtggctgacaaagagcttccatttccccctcttcatgacgatgctgcacctggccgtgatcttcctcttctccgccctgtccagggcgctggttcagtgctccagccacagggcccgtgtggtgctgagctgggccgactacctcagaagagtggctcccacagctctggcgacggcgcttgacgtgggcttgtccaactggagcttcctgtatgtcaccgtctcgctgtacacaatgaccaaatcctcagctgtcctcttcatcttgatcttctctctgatcttcaagctggaggagctggtgaggccccagcgtctcttacccccgagttagctgccactgctccccatcctaccacgcgcggcactggtcctggtggtcctcctcatcgccgggggtctcttcatgttcacctacaagtccacacagttcaacgtggagggcttcgccttggtgctgggggcctcgttcatcggtggcattcgctggaccctcacccagatgctcctgcagaaggctgaactcggcctccagaatcccatcgacaccatgttccacctgcagccactcatgttcctggggctcttccctctctttgctgtatttgaaggtctccatttgtccacatctgagaaaatcttccgtttccaggacacagggctgctcctgcgggtacttgggagcctcttccttggcgggattctcgcctttggtttgggcttctctgagttcctcctggtctccagaacctccagcctcactctctccattgccggcatttttaaggaagtctgcactttgctgttggcagctcatctgctgggcgatcagatcagcctcctgaactggctgggcttcgccctctgcctctcgggaatatccctccacgttgccctcaaagccctgcattccagaggtgatggtggccccaaggccttgaaggggctgggctccagccccgacctggagctgctgctccggagcagccagcgggaggaaggtgacaatgaggaggaggagtactttgtggcccaggggcagcagtgaccagccagggcaaatggcttagaagcaggccactccccagcctgctgccagcactcactgtgctcaagccgccagggctcatcatggtagctgggagctgtggacgggagtcaccaggtggtggggccaagccagggactcatgacttttgcccctcccttcagagcctggtcacacaaggggcgagcaccaggccagcctgggactggccagagctgggcccaagctgcgctggaatcgcagcaggagaggggagtgggctggttcttcccaccacttcccaggctctgacagccgagactcatttccaaggcacagcagctttctaaagggactgagtttggactgggttttggacctccaggggctggagcttcatcacctgggcagtgtcttttctcagagagcaggtttctttatagtttggaaataaatggttcacggtccactggccgccttgtgttgctggagacgtgggggcagggaggggacagtgtgggcctggcctctcctttcctttccctgcctggagccttcttcaaatgtctggtcttaagccaggcctccttcattttctcgctcctgttagaacaccagtcccctccccagtggggccccactgcacctgctggcaggaaataaatgaatgtttactgagta

SEQ ID NO: 415693 - DNA, 1990 bp, Homo sapiens
cgcacttccggtggggagattccggcctggagctcccagggccgagcagaccttgggacctgtgagcgctgcatccaattaaccatgggaagggtcagcaccagccaccagccccttaggtgaggactctgcctggggctctgctgatggttccgaatcatggagctgcagagagctcctccagcctggagacgttcttggtgaaagctgtggtctaactccaccggctcttcctgcacattgtattcaagaggggtgcctgcccccgctgactcaggagctccggtgctgcagccgccacgaatggggaggtgggccctcgatgtggcctttttgtggaaggcggtgttgaccctggggctggtgcttctctactactgcttctccatcggcatcaccttctacaacaagtggctgacaaagggcgctggttcagtgctccagccacagggcccgtgtggtgctgagctgggccgactacctcagaagagtggctcccacagctctggcgacggcgcttgacgtgggcttgtccaactggagcttcctgtatgtcaccgtctcgctgtacacaatgaccaaatcctcagctgtcctcttcatcttgatcttctctctgatcttcaagctggaggagctgcgcgcggcactggtcctggtggtcctcctcatcgccgggggtctcttcatgttcacctacaagtccacacagttcaacgtggagggcttcgccttggtgctgggggcctcgttcatcggtggcattcgctggaccctcacccagatgctcctgcagaaggctgaactcggcctccagaatcccatcgacaccatgttccacctgcagccactcatgttcctggggctcttccctctctttgctgtatttgaaggtctccatttgtccacatctgagaaaatcttccgtttccaggacacagggctgctcctgcgggtacttgggagcctcttccttggcgggattctcgcctttggtttgggcttctctgagttcctcctggtctccagaacctccagcctcactctctccattgccggcatttttaaggaagtctgcactttgctgttggcagctcatctgctgggcgatcagatcagcctcctgaactggctgggcttcgccctctgcctctcgggaatatccctccacgttgccctcaaagccctgcattccagaggtgatggtggccccaaggccttgaaggggctgggctccagccccgacctggagctgctgctccggagcagccagcgggaggaaggtgacaatgaggaggaggagtactttgtggcccaggggcagcagtgaccagccagggcaaatggcttagaagcaggccactccccagcctgctgccagcactcactgtgctcaagccgccagggctcatcatggtagctgggagctgtggacgggagtcaccaggtggtggggccaagccagggactcatgacttttgcccctcccttcagagcctggtcacacaaggggcgagcaccaggccagcctgggactggccagagctgggcccaagctgcgctggaatcgcagcaggagaggggagtgggctggttcttcccaccacttcccaggctctgacagccgagactcatttccaaggcacagcagctttctaaagggactgagtttggactgggttttggacctccaggggctggagcttcatcacctgggcagtgtcttttctcagagagcaggtttctttatagtttggaaataaatggttcacggtccactggccgccttgtgttgctggagacgtgggggcagggaggggacagtgtgggcctggcctctcctttcctttccctgcctggagccttcttcaaatgtctggtcttaagccaggcctccttcattttctcgctcctgttagaacaccagtcccctccccagtggggccccactgcacctgctggcaggaaataaatgaatgtttactgagta

SEQ ID NO: 415694 - DNA, 2726 bp, Homo sapiens
cgcacttccggtggggagattccggcctggagctcccagggccgagcagaccttgggacctgtgagcgctgcatccaattaaccatgggaagggtcagcaccagccaccagccccttaggtgaggactctgcctggggctctgctgatggttccgaatcatggagctgcagagagctcctccagcctggagacgttcttggtgaaagctgtggtctaactccaccggctcttcctgcacattgtattcaagaggggtgcctgcccccgctgactcaggagctccggtgctgcagccgccacgaatggggaggtgggccctcgatgtggcctttttgtggaaggcggtgttgaccctggggctggtgcttctctactactgcttctccatcggcatcaccttctacaacaagtggctgacaaagagcttccatttccccctcttcatgacgatgctgcacctggccgtgatcttcctcttctccgccctgtccagggcgctggttcagtgctccagccacagggcccgtgtggtgctgagctgggccgactacctcagaagagtggctcccacagctctggcgacggcgcttgacgtgggcttgtccaactggagcttcctgtatgtcaccgtctcgctgtacacaatgaccaaatcctcagctgtcctcttcatcttgatcttctctctgatcttcaagctggaggagctggtgaggccccagcgtctcttgtgtccttcctgcccccacagatgctaagaataaagtgggagtctgagcagtggcttgtcctgctgtgtgacagaggagacaagcccagtccaggtggcagtagatccctttctgagaagggacctagacatgggcaatactcagaatatttagaaaccagtgtggcagggtaatgaccaaaggtgaaagcactgcaggatgagggtcccagcagagctgggtctaggaagcaccctgctgtgggaggcagtagccctgtgtgttaggcccaggaggaggtgggaccacttgggggcctaggacagccgtcagtgtggcagagcaagcagggctgttggcataccagctgaccgtcagccctacatgctgacattggtgggcaaggactgtccaggaccccctgggatggagctgaagggtggaaggatttcttgccccaggggcagccaagatggctgctgaccccaggctccaaatgtgatgaacccttgaccctcaagacccccgagttagctgccactgctccccatcctaccacgcgcggcactggtcctggtggtcctcctcatcgccgggggtctcttcatgttcacctacaagtccacacagttcaacgtggagggcttcgccttggtgctgggggcctcgttcatcggtggcattcgctggaccctcacccagatgctcctgcagaaggctgaactcggtgagcacgtgccactcatcctccagagagaggaaccccggcacaggcagggcggaggcagggcagggccggaccagacctgatggtgcctgtcccccgccctgtaggcctccagaatcccatcgacaccatgttccacctgcagccactcatgttcctggggctcttccctctctttgctgtatttgaaggtctccatttgtccacatctgagaaaatcttccgtttccaggacacagggctgctcctgcgggtacttgggagcctcttccttggcgggattctcgcctttggtttgggcttctctgagttcctcctggtctccagaacctccagcctcactctctccattgccggcatttttaaggaagtctgcactttgctgttggcagctcatctgctgggcgatcagatcagcctcctgaactggctgggcttcgccctctgcctctcgggaatatccctccacgttgccctcaaagccctgcattccagaggtgatggtggccccaaggccttgaaggggctgggctccagccccgacctggagctgctgctccggagcagccagcgggaggaaggtgacaatgaggaggaggagtactttgtggcccaggggcagcagtgaccagccagggcaaatggcttagaagcaggccactccccagcctgctgccagcactcactgtgctcaagccgccagggctcatcatggtagctgggagctgtggacgggagtcaccaggtggtggggccaagccagggactcatgacttttgcccctcccttcagagcctggtcacacaaggggcgagcaccaggccagcctgggactggccagagctgggcccaagctgcgctggaatcgcagcaggagaggggagtgggctggttcttcccaccacttcccaggctctgacagccgagactcatttccaaggcacagcagctttctaaagggactgagtttggactgggttttggacctccaggggctggagcttcatcacctgggcagtgtcttttctcagagagcaggtttctttatagtttggaaataaatggttcacggtccactggccgccttgtgttgctggagacgtgggggcagggaggggacagtgtgggcctggcctctcctttcctttccctgcctggagccttcttcaaatgtctggtcttaagccaggcctccttcattttctcgctcctgttagaacaccagtcccctccccagtggggccccactgcacctgctggcaggaaataaatgaatgtttactgagta

SEQ ID NO: 415695 - DNA, 2120 bp, Homo sapiens
cgcacttccggtggggagattccggcctggagctcccagggccgaggtcactttggtggcagttcatggagaatagcttgaggtgacaagacagcagacacgacgtgggtctctgggactgcctgtgccgttgtgggcagcccctccagagccctgagtcacgcagccttcagaggcacccatggctacgagaagcacagtctctgcctgaggctccagagcggccctttttccccagcagcagaccttgggacctgtgagcgctgcatccaattaaccatgggaagggtcagcaccagccaccagccccttaggtgaggactctgcctggggctctgctgatggttccgaatcatggagctgcagagagctcctccagcctggagacgttcttggtgaaagctgtggtctaactccaccggctcttcctgcacattgtattcaagaggggtgcctgcccccgctgactcaggagctccggtgctgcagccgccacgaatggggaggtgggccctcgatgtggcctttttgtggaaggcggtgttgaccctggggctggtgcttctctactactgcttctccatcggcatcaccttctacaacaagtggctgacaaagagcttccatttccccctcttcatgacgatgctgcacctggccgtgatcttcctcttctccgccctgtccagggcgctggttcagtgctccagccacagggcccgtgtggtgctgagctgggccgactacctcagaagagtggctcccacagctctggcgacggcgcttgacgtgggcttgtccaactggagcttcctgtatgtcaccgtctcgcttccacacagttcaacgtggagggcttcgccttggtgctgggggcctcgttcatcggtggcattcgctggaccctcacccagatgctcctgcagaaggctgaactcggcctccagaatcccatcgacaccatgttccacctgcagccactcatgttcctggggctcttccctctctttgctgtatttgaaggtctccatttgtccacatctgagaaaatcttccgtttccaggacacagggctgctcctgcgggtacttgggagcctcttccttggcgggattctcgcctttggtttgggcttctctgagttcctcctggtctccagaacctccagcctcactctctccattgccggcatttttaaggaagtctgcactttgctgttggcagctcatctgctgggcgatcagatcagcctcctgaactggctgggcttcgccctctgcctctcgggaatatccctccacgttgccctcaaagccctgcattccagaggtgatggtggccccaaggccttgaaggggctgggctccagccccgacctggagctgctgctccggagcagccagcgggaggaaggtgacaatgaggaggaggagtactttgtggcccaggggcagcagtgaccagccagggcaaatggcttagaagcaggccactccccagcctgctgccagcactcactgtgctcaagccgccagggctcatcatggtagctgggagctgtggacgggagtcaccaggtggtggggccaagccagggactcatgacttttgcccctcccttcagagcctggtcacacaaggggcgagcaccaggccagcctgggactggccagagctgggcccaagctgcgctggaatcgcagcaggagaggggagtgggctggttcttcccaccacttcccaggctctgacagccgagactcatttccaaggcacagcagctttctaaagggactgagtttggactgggttttggacctccaggggctggagcttcatcacctgggcagtgtcttttctcagagagcaggtttctttatagtttggaaataaatggttcacggtccactggccgccttgtgttgctggagacgtgggggcagggaggggacagtgtgggcctggcctctcctttcctttccctgcctggagccttcttcaaatgtctggtcttaagccaggcctccttcattttctcgctcctgttagaacaccagtcccctccccagtggggccccactgcacctgctggcaggaaataaatgaatgtttactgagta

SEQ ID NO: 415696 - DNA, 1927 bp, Homo sapiens
cgcacttccggtggggagattccggcctggagctcccagggccgagcagaccttgggacctgtgagcgctgcatccaattaaccatgggaagggtcagcaccagccaccagccccttaggtgaggactctgcctggggctctgctgatggttccgaatcatggagctgcagagagctcctccagcctggagacgttcttggtgaaagctgtggtctaactccaccggctcttcctgcacattgtattcaagaggggtgcctgcccccgctgactcaggagctccggtgctgcagccgccacgaatggggaggtgggccctcgatgtggcctttttgtggaaggcggtgttgaccctggggctggtgcttctctactactgcttctccatcggcatcaccttctacaacaagtggctgacaaagggcgctggttcagtgctccagccacagggcccgtgtggtgctgagctgggccgactacctcagaagagtggctcccacagctctggcgacggcgcttgacgtgggcttgtccaactggagcttcctgtatgtcaccgtctcgctgtacacaatgaccaaatcctcagctgtcctcttcatcttgatcttctctctgatcttcaagctggaggagctgtccacacagttcaacgtggagggcttcgccttggtgctgggggcctcgttcatcggtggcattcgctggaccctcacccagatgctcctgcagaaggctgaactcggcctccagaatcccatcgacaccatgttccacctgcagccactcatgttcctggggctcttccctctctttgctgtatttgaaggtctccatttgtccacatctgagaaaatcttccgtttccaggacacagggctgctcctgcgggtacttgggagcctcttccttggcgggattctcgcctttggtttgggcttctctgagttcctcctggtctccagaacctccagcctcactctctccattgccggcatttttaaggaagtctgcactttgctgttggcagctcatctgctgggcgatcagatcagcctcctgaactggctgggcttcgccctctgcctctcgggaatatccctccacgttgccctcaaagccctgcattccagaggtgatggtggccccaaggccttgaaggggctgggctccagccccgacctggagctgctgctccggagcagccagcgggaggaaggtgacaatgaggaggaggagtactttgtggcccaggggcagcagtgaccagccagggcaaatggcttagaagcaggccactccccagcctgctgccagcactcactgtgctcaagccgccagggctcatcatggtagctgggagctgtggacgggagtcaccaggtggtggggccaagccagggactcatgacttttgcccctcccttcagagcctggtcacacaaggggcgagcaccaggccagcctgggactggccagagctgggcccaagctgcgctggaatcgcagcaggagaggggagtgggctggttcttcccaccacttcccaggctctgacagccgagactcatttccaaggcacagcagctttctaaagggactgagtttggactgggttttggacctccaggggctggagcttcatcacctgggcagtgtcttttctcagagagcaggtttctttatagtttggaaataaatggttcacggtccactggccgccttgtgttgctggagacgtgggggcagggaggggacagtgtgggcctggcctctcctttcctttccctgcctggagccttcttcaaatgtctggtcttaagccaggcctccttcattttctcgctcctgttagaacaccagtcccctccccagtggggccccactgcacctgctggcaggaaataaatgaatgtttactgagta

SEQ ID NO: 415697 - DNA, 1184 bp, Homo sapiens
tgggtgcagtgtgactgtggacgggagtcaccaggtggtggggccaagccaggactcatgacttttgcccctcccttcagagcctggtcacacaaggggcgagcaccaggccagcctgggactggccagagctgggcccaagctgcgctggaatcgcagcaggagaggggagtgggctggttcttcccaccacttcccaggctctgacagccgagactcatttccaaggcacagcagctctctccattgccggcatttttaaggaagtctgcactttgctgttggcagctcatctgctgggcgatcagatcagcctcctgaactggctgggcttcgccctctgcctctcgggaatatccctccacgttgccctcaaagccctgcattccagaggtgatggtggccccaaggccttgaaggggctgggctccagccccgacctggagctgctgctccggagcagccagcgggaggaaggtgacaatgaggaggaggagtactttgtggcccaggggcagcagtgaccagccagggcaaatggcttagaagcaggccactccccagcctgctgccagcactcactgtgctcaagccgccagggctcatcatggtagctgggagctgtggacgggagtcaccaggtggtggggccaagccagggactcatgacttttgcccctcccttcagagcctggtcacacaaggggcgagcaccaggccagcctgggactggccagagctgggcccaagctgcgctggaatcgcagcaggagaggggagtgggctggttcttcccaccacttcccaggctctgacagccgagactcatttccaaggcacagcagctttctaaagggactgagtttggactgggttttggacctccaggggctggagcttcatcacctgggcagtgtcttttctcagagagcaggtttctttatagtttggaaataaatggttcacggtccactggccgccttgtgttgctggagacgtgggggcagggaggggacagtgtgggcctggcctctcctttcctttccctgcctggagccttcttcaaatgtctggtcttaagccaggcctccttcattttctcgctcctgttagaacaccagtcccctccccagtggggccccactgcacctgctggcaggaaataaatgaatgtttactgagta

SEQ ID NO: 415698 - DNA, 1416 bp, Homo sapiens
cgcacttccggtggggagattccggcctggagctcccagggccgaggtcactttggtggcagttcatggagaatagcttgaggtgacaagacagcagacacgacgtgggtctctgggactgcctgtgccgttgtgggcagcccctccagagccctgagtcacgcagccttcagaggcacccatggctacgagaagcacagtctctgcctgaggctccagagcggccctttttccccagcagcagaccttgggacctgtgagcgctgcatccaattaaccatgggaagggtcagcaccagccaccagccccttaggtgaggactctgcctggggctctgctgatggttccgaatcatggagctgcagagagctcctccagcctggagacgttcttggtgaaagctgtggtctaactccaccggctcttcctgcacattgtattcaagaggggtgcctgcccccgctgactcaggagctccggtgctgcagccgccacgaatggggaggtgggccctcgatgtggcctttttgtggaaggcggtgttgaccctggggctggtgcttctctactactgcttctccatcggcatcaccttctacaacaagtggctgacaaagagcttccatttccccctcttcatgacgatgctgcacctggccgtgatcttcctcttctccgccctgtccagggcgctggttcagtgctccagccacagggcccgtgtggtgctgagctgggccgactacctcagaagagtggctcccacagctctggcgacggcgcttgacgtgggcttgtccaactggagcttcctgtatgtcaccgtctcgctgtgagtactggccatgccctgctgcctcccttcaggctgaagctgtctgtctgtccagcggggtgtctgcacacccggctgctaggccagccactccaccactctgggaccagcccttgctctctcagcctctccctggcacccagcagctctccgggaagtcgccagcctcttccgtaagcccagcgcagaggagatgctgtgcccacctgccaggcagcgtggggaagccagggagctctcccagaaccccatcatcagagcaggggaaggcaggctgcaaggccacagacaggtggccactggtgggtggtacacgcagccgcagcagagccctatgtggcctgggggctacacaagagtttcttcttccctctgatgttttgcttcagagagcactgttcctgccttcttgtcctcctacttctcatccttccttcccgctcctgggctctgccgagggttaggtaaagaacaggactcagggagctcaacgtcagacctgtaacctcttctctctggtgataaccagaggcctcttagtcagagattccttctgattaaaggtcgcttatcactcaga

SEQ ID NO: 415699 - DNA, 560 bp, Homo sapiens
taactgatgggtagttaggtttgaacggtctaaaggctttgccacactcgttacatttataaggtttctctccagtgtgaattttctgatgttgtgagagttgtgaatttcgactaaagaccttaccacactcattacatttgtaacgtttttcgccagtatggatcacctgatgggtagttaggtctacctggccaggtagacctaacaaggcacagcagctttctaaagggactgagtttggactgggttttggacctccaggggctggagcttcatcacctgggcagtgtcttttctcagagagcaggtttctttatagtttggaaataaatggttcacggtccactggccgccttgtgttgctggagacgtgggggcagggaggggacagtgtgggcctggcctctcctttcctttccctgcctggagccttcttcaaatgtctggtcttaagccaggcctccttcattttctcgctcctgttagaacaccagtcccctccccagtggggccccactgcacctgctggcaggaaataaatgaatgtttactgagta

SEQ ID NO: 415700 - DNA, 875 bp, Homo sapiens
tgggtgcagtgtgactgtggacgggagtcaccaggtggtggggccaagccaggactcatgacttttgcccctcccttcagagcctggtcacacaaggggcgagcaccaggccagcctgggactggccagagctgggcccaagctgcgctggaatcgcagcaggagaggggagtgggctggttcttcccaccacttcccaggctctgacagccgagactcatttccaaggcacagcagctctctccattgccggcatttttaaggaagtctgcactttgctgttggcagctcatctgctgggcgatcagatcagcctcctgaactggctgggcttcgccctctgcctctcgggaatatccctccacgttgccctcaaagccctgcattccagaggaggtaacccagagtcccttccagaagcctctgttttctgttcttctccctgtgactcttagtgattctgatgcaggaagtgtgcccggtggctctgctgccgtcactcctctaggaagatgtgggggtcatctccagagtgggtgggtggggcctgggtgactcagcacacatgcaaatcagagcaaaccaagaaaaccacgactgggcagtgtcttttctcagagagcaggtttctttatagtttggaaataaatggttcacggtccactggccgccttgtgttgctggagacgtgggggcagggaggggacagtgtgggcctggcctctcctttcctttccctgcctggagccttcttcaaatgtctggtcttaagccaggcctccttcattttctcgctcctgttagaacaccagtcccctccccagtggggccccactgcacctgctggcaggaaataaatgaatgtttactgagta

SEQ ID NO: 415701 - DNA, 670 bp, Homo sapiens
agagccatggctacggtgcccttcatgtttaacaggaaggcacaagcttcaaccagtctaactggaagccagtcacggctgggctggaacagggccctccaagcctgccgtgccagggttccccttcagtgtttggatccagggaaaccaaggagagcggggggtgtgaagggatgagctggggaaactggggctcaagcagcagctatttaccccactagagaagtatttcaatattttaataagtgatacaacgtagtgggccgcagtggctctcacttgggcataggccgtgaggaaggctgggcaggtagctcacaggtgtgttgaaatggtggagacagcaccaggctaggattgagtctcttggctgccacctgtcttcgtgacctaagagtctgtcattccaagcgatgataccgtaactaagggccctacacacatagcaaggtcctcatgaaccaccgaatgagccccactccagcagaggggcgaagaggaagagggagccggtggggggcaggctgtctaaaccaagccggggtgtctgctttgggctccatacagagcttccatttccccctcttcatgacgatgctgcacctggccgtgatcttcctcttctccgccctgtccagggcgctggttcagtgctccagccacagggccc

SEQ ID NO: 415702 - DNA, 2061 bp, Homo sapiens
cgcacttccggtggggagattccggcctggagctcccagggccgagcagaccttgggacctgtgagcgctgcatccaattaaccatgggaagggtcagcaccagccaccagccccttaggtgaggactctgcctggggctctgctgatggttccgaatcatggagctgcagagagctcctccagcctggagacgttcttggtgaaagctgtggtctaactccaccggctcttcctgcacattgtattcaagaggggtgcctgcccccgctgactcaggagctccggtgctgcagccgccacgaatggggaggtgggccctcgatgtggcctttttgtggaaggcggtgttgaccctggggctggtgcttctctactactgcttctccatcggcatcaccttctacaacaagtggctgacaaagagcttccatttccccctcttcatgacgatgctgcacctggccgtgatcttcctcttctccgccctgtccagggcgctggttcagtgctccagccacagggcccgtgtggtgctgagctgggccgactacctcagaagagtggctcccacagctctggcgacggcgcttgacgtgggcttgtccaactggagcttcctgtatgtcaccgtctcgctgtacacaatgaccaaatcctcagctgtcctcttcatcttgatcttctctctgatcttcaagctggaggagctgcgcgcggcactggtcctggtggtcctcctcatcgccgggggtctcttcatgttcacctacaagtccacacagttcaacgtggagggcttcgccttggtgctgggggcctcgttcatcggtggcattcgctggaccctcacccagatgctcctgcagaaggctgaactcggcctccagaatcccatcgacaccatgttccacctgcagccactcatgttcctggggctcttccctctctttgctgtatttgaaggtctccatttgtccacatctgagaaaatcttccgtttccaggacacagggctgctcctgcgggtacttgggagcctcttccttggcgggattctcgcctttggtttgggcttctctgagttcctcctggtctccagaacctccagcctcactctctccattgccggcatttttaaggaagtctgcactttgctgttggcagctcatctgctgggcgatcagatcagcctcctgaactggctgggcttcgccctctgcctctcgggaatatccctccacgttgccctcaaagccctgcattccagaggtgatggtggccccaaggccttgaaggggctgggctccagccccgacctggagctgctgctccggagcagccagcgggaggaaggtgacaatgaggaggaggagtactttgtggcccaggggcagcagtgaccagccagggcaaatggcttagaagcaggccactccccagcctgctgccagcactcactgtgctcaagccgccagggctcatcatggtagctgggagctgtggacgggagtcaccaggtggtggggccaagccagggactcatgacttttgcccctcccttcagagcctggtcacacaaggggcgagcaccaggccagcctgggactggccagagctgggcccaagctgcgctggaatcgcagcaggagaggggagtgggctggttcttcccaccacttcccaggctctgacagccgagactcatttccaaggcacagcagctttctaaagggactgagtttggactgggttttggacctccaggggctggagcttcatcacctgggcagtgtcttttctcagagagcaggtttctttatagtttggaaataaatggttcacggtccactggccgccttgtgttgctggagacgtgggggcagggaggggacagtgtgggcctggcctctcctttcctttccctgcctggagccttcttcaaatgtctggtcttaagccaggcctccttcattttctcgctcctgttagaacaccagtcccctccccagtggggccccactgcacctgctggcaggaaataaatgaatgtttactgagta

SEQ ID NO: 415703 - DNA, 2257 bp, Homo sapiens
cgcacttccggtggggagattccggcctggagctcccagggccgagcagaccttgggacctgtgagcgctgcatccaattaaccatgggaagggtcagcaccagccaccagccccttaggtgaggactctgcctggggctctgctgatggttccgaatcatggagctgcagagagctcctccagcctggagacgttcttggtgaaagctgtggtctaactccaccggctcttcctgcacattgtattcaagaggggtgcctgcccccgctgactcaggagctccggtgctgcagccgccacgaatggggaggtgggccctcgatgtggcctttttgtggaaggcggtgttgaccctggggctggtgcttctctactactgcttctccatcggcatcaccttctacaacaagtggctgacaaagagcttccatttccccctcttcatgacgatgctgcacctggccgtgatcttcctcttctccgccctgtccagggcgctggttcagtgctccagccacagggcccgtgtggtgctgagctgggccgactacctcagaagagtggctcccacagctctggcgacggcgcttgacgtgggcttgtccaactggagcttcctgtatgtcaccgtctcgctgtacacaatgaccaaatcctcagctgtcctcttcatcttgatcttctctctgatcttcaagctggaggagctgcgcgcggcactggtcctggtggtcctcctcatcgccgggggtctcttcatgttcacctacaagtccacacagttcaacgtggagggcttcgccttggtgctgggggcctcgttcatcggtggcattcgctggaccctcacccagatgctcctgcagaaggctgaactcggcctccagaatcccatcgacaccatgttccacctgcagccactcatgttcctggggctcttccctctctttgctgtatttgaaggtctccatttgtccacatctgagaaaatcttccgtttccaggacacagggctgctcctgcgggtacttgggagcctcttccttggcgggattctcgcctttggtttgggcttctctgagttcctcctggtctccagaacctccagcctcactctctccattgccggcatttttaaggaagtctgcactttgctgttggcagctcatctgctgggcgatcagatcagcctcctgaactggctgggcttcgccctctgcctctcgggaatatccctccacgttgccctcaaagccctgcattccagaggtgatggtggccccaaggccttgaaggggctgggctccagccccgacctggagctgctgctccggagcagccagcgggaggaaggtgacaatgaggaggaggagtactttgtggcccaggggcagcagtgaccagccagggcaaatggcttagaagcaggccactccccagcctgctgccagcactcactgtgctcaagccgccagggctcatcatggtagctgggagctgtggacgggagtcaccaggtggtggggccaagccagggactcatgacttttgcccctcccttcagagcctggtcacacaaggggcgagcaccaggccagcctgggactggccagagctgggcccaagctgcgctggaatcgcagcaggagaggggagtgggctggttcttcccaccacttcccaggctctgacagccgagactcatttccaaggcacagcagctttctaaagggactgagtttggactgggttttggacctccaggggctggagcttcatcacctgggcagtgtcttttctcagagagcaggtttctttatagtttggaaataaatggttcacggtccactggccgccttgtgttgctggagacgtgggggcagggaggggacagtgtgggcctggcctctcctttcctttccctgcctggagccttcttcaaatgtctggtcttaagccaggcctccttcattttctcgctcctgttagaacaccagtcccctccccagtggggccccactgcacctgctggcaggaaataaatgaatgtttactgagtactgcattctggagaccttacatgttttcacagcctagtttgaatactggctttgtcactagctgtgtgaccctaagcaaatgacctaacctgtctgtgccgtagttttttaatctgtgaaatggggataatgtctatctcagagtccttttgaagattgagtcattattagtaacagattaaatgttatataagca

SEQ ID NO: 415704 - DNA, 3182 bp, Homo sapiens
ggggcgggcagtaaacacgtgagcaaacaaggaaacgtcagaggtgggagtgccacgaggattgggaggggtggggcattggagaaagtattcagccaagcggaggtctgcggaagggagctgaaggcaggaagagcagcaagtaaagaaaaacacaggtttgatgtgtttgacacgtggcagggggccgctgtggcgggtgctgggaccagtggcagaagaatgaggttacagaggccttccttgtggaccaggctgaggagctgggcttagccttagggcatgatctgtttcgtgtgccatctctctggctgctttatagattccaggccttaggggcgaaagaggaaacagggagaccagttagaccagtggcagtcagcaggtgaaagataattgtggcttagactgtggtagtgggaatggagaggaagagaagtagaggggtcaagaagtgtattgaaagtggaactgacagggcaggatttgagaaatgacagaaataagtggtcaaagatgacttcatcatagatttttggttttggcttaagtaaccaagtgtattatgctggcatttactaaatgactttgggatagattgggagcgtgagaaataattacgaaatcttcttagggcatcttaagttttagatatttggagtgcagctaccaaataggcagttagatatatgagtctgatacagaaaaggtcagggctgatgtaaagaatttagaaatcattggcaagtggattgggtaggatgagattatgtagggtaagatttaagagagaagagaagccaggttccaagctttaggcacccaatttttatagattgagttgacaagaaggtgccagcaaaaaagaccaataaggagtccagaaaagcagaagaaaaaccaggagaatgtggtatcgtggcacccaagagaaggttttttctaggaggaggaagtgatccattgtgtaaggtcactttggtggcagttcatggagaatagcttgaggtgacaagacagcagacacgacgtgggtctctgggactgcctgtgccgttgtgggcagcccctccagagccctgagtcacgcagccttcagaggcacccatggctacgagaagcacagtctctgcctgaggctccagagcggccctttttccccagcagcagaccttgggacctgtgagcgctgcatccaattaaccatgggaagggtcagcaccagccaccagccccttaggtgaggactctgcctggggctctgctgatggttccgaatcatggagctgcagagagctcctccagcctggagacgttcttggtgaaagctgtggtctaactccaccggctcttcctgcacattgtattcaagaggggtgcctgcccccgctgactcaggagctccggtgctgcagccgccacgaatggggaggtgggccctcgatgtggcctttttgtggaaggcggtgttgaccctggggctggtgcttctctactactgcttctccatcggcatcaccttctacaacaagtggctgacaaagagcttccatttccccctcttcatgacgatgctgcacctggccgtgatcttcctcttctccgccctgtccagggcgctggttcagtgctccagccacagggcccgtgtggtgctgagctgggccgactacctcagaagagtggctcccacagctctggcgacggcgcttgacgtgggcttgtccaactggagcttcctgtatgtcaccgtctcgctgtacacaatgaccaaatcctcagctgtcctcttcatcttgatcttctctctgatcttcaagctggaggagctgcgcgcggcactggtcctggtggtcctcctcatcgccgggggtctcttcatgttcacctacaagtccacacagttcaacgtggagggcttcgccttggtgctgggggcctcgttcatcggtggcattcgctggaccctcacccagatgctcctgcagaaggctgaactcggcctccagaatcccatcgacaccatgttccacctgcagccactcatgttcctggggctcttccctctctttgctgtatttgaaggtctccatttgtccacatctgagaaaatcttccgtttccaggacacagggctgctcctgcgggtacttgggagcctcttccttggcgggattctcgcctttggtttgggcttctctgagttcctcctggtctccagaacctccagcctcactctctccattgccggcatttttaaggaagtctgcactttgctgttggcagctcatctgctgggcgatcagatcagcctcctgaactggctgggcttcgccctctgcctctcgggaatatccctccacgttgccctcaaagccctgcattccagaggtgatggtggccccaaggccttgaaggggctgggctccagccccgacctggagctgctgctccggagcagccagcgggaggaaggtgacaatgaggaggaggagtactttgtggcccaggggcagcagtgaccagccagggcaaatggcttagaagcaggccactccccagcctgctgccagcactcactgtgctcaagccgccagggctcatcatggtagctgggagctgtggacgggagtcaccaggtggtggggccaagccagggactcatgacttttgcccctcccttcagagcctggtcacacaaggggcgagcaccaggccagcctgggactggccagagctgggcccaagctgcgctggaatcgcagcaggagaggggagtgggctggttcttcccaccacttcccaggctctgacagccgagactcatttccaaggcacagcagctttctaaagggactgagtttggactgggttttggacctccaggggctggagcttcatcacctgggcagtgtcttttctcagagagcaggtttctttatagtttggaaataaatggttcacggtccactggccgccttgtgttgctggagacgtgggggcagggaggggacagtgtgggcctggcctctcctttcctttccctgcctggagccttcttcaaatgtctggtcttaagccaggcctccttcattttctcgctcctgttagaacaccagtcccctccccagtggggccccactgcacctgctggcaggaaataaatgaatgtttactgagta

SEQ ID NO: 415705 - DNA, 2468 bp, Homo sapiens
cgcacttccggtggggagattccggcctggagctcccagggccgagacaacgggaagaaagctggtgtgtttggggagctgaaaggcgcccagtggggccaggtcctggagagcctgtggctgagactgggaagaccagcagggccagatgaggccatgggagccgaaagaagggtgctggtctttatcagaaaagcactggaagctgctgaagggttttaagcagtggcctgacatgatcagtttgtgttttaaaaggtcactttggtggcagttcatggagaatagcttgaggtgacaagacagcagacacgacgtgggtctctgggactgcctgtgccgttgtgggcagcccctccagagccctgagtcacgcagccttcagaggcacccatggctacgagaagcacagtctctgcctgaggctccagagcggccctttttccccagcagcagaccttgggacctgtgagcgctgcatccaattaaccatgggaagggtcagcaccagccaccagccccttaggtgaggactctgcctggggctctgctgatggttccgaatcatggagctgcagagagctcctccagcctggagacgttcttggtgaaagctgtggtctaactccaccggctcttcctgcacattgtattcaagaggggtgcctgcccccgctgactcaggagctccggtgctgcagccgccacgaatggggaggtgggccctcgatgtggcctttttgtggaaggcggtgttgaccctggggctggtgcttctctactactgcttctccatcggcatcaccttctacaacaagtggctgacaaagagcttccatttccccctcttcatgacgatgctgcacctggccgtgatcttcctcttctccgccctgtccagggcgctggttcagtgctccagccacagggcccgtgtggtgctgagctgggccgactacctcagaagagtggctcccacagctctggcgacggcgcttgacgtgggcttgtccaactggagcttcctgtatgtcaccgtctcgctgtacacaatgaccaaatcctcagctgtcctcttcatcttgatcttctctctgatcttcaagctggaggagctgcgcgcggcactggtcctggtggtcctcctcatcgccgggggtctcttcatgttcacctacaagtccacacagttcaacgtggagggcttcgccttggtgctgggggcctcgttcatcggtggcattcgctggaccctcacccagatgctcctgcagaaggctgaactcggcctccagaatcccatcgacaccatgttccacctgcagccactcatgttcctggggctcttccctctctttgctgtatttgaaggtctccatttgtccacatctgagaaaatcttccgtttccaggacacagggctgctcctgcgggtacttgggagcctcttccttggcgggattctcgcctttggtttgggcttctctgagttcctcctggtctccagaacctccagcctcactctctccattgccggcatttttaaggaagtctgcactttgctgttggcagctcatctgctgggcgatcagatcagcctcctgaactggctgggcttcgccctctgcctctcgggaatatccctccacgttgccctcaaagccctgcattccagaggtgatggtggccccaaggccttgaaggggctgggctccagccccgacctggagctgctgctccggagcagccagcgggaggaaggtgacaatgaggaggaggagtactttgtggcccaggggcagcagtgaccagccagggcaaatggcttagaagcaggccactccccagcctgctgccagcactcactgtgctcaagccgccagggctcatcatggtagctgggagctgtggacgggagtcaccaggtggtggggccaagccagggactcatgacttttgcccctcccttcagagcctggtcacacaaggggcgagcaccaggccagcctgggactggccagagctgggcccaagctgcgctggaatcgcagcaggagaggggagtgggctggttcttcccaccacttcccaggctctgacagccgagactcatttccaaggcacagcagctttctaaagggactgagtttggactgggttttggacctccaggggctggagcttcatcacctgggcagtgtcttttctcagagagcaggtttctttatagtttggaaataaatggttcacggtccactggccgccttgtgttgctggagacgtgggggcagggaggggacagtgtgggcctggcctctcctttcctttccctgcctggagccttcttcaaatgtctggtcttaagccaggcctccttcattttctcgctcctgttagaacaccagtcccctccccagtggggccccactgcacctgctggcaggaaataaatgaatgtttactgagta

SEQ ID NO: 415706 - DNA, 2198 bp, Homo sapiens
cgcacttccggtggggagattccggcctggagctcccagggccgagattgagttgacaagaaggtgccagcaaaaaagaccaataaggagtccagaaaagcagaagaaaaaccaggagaatgtggtatcgtggcacccaagagaaggttttttctaggaggaggaagtgatccattgtgtaagcagaccttgggacctgtgagcgctgcatccaattaaccatgggaagggtcagcaccagccaccagccccttaggtgaggactctgcctggggctctgctgatggttccgaatcatggagctgcagagagctcctccagcctggagacgttcttggtgaaagctgtggtctaactccaccggctcttcctgcacattgtattcaagaggggtgcctgcccccgctgactcaggagctccggtgctgcagccgccacgaatggggaggtgggccctcgatgtggcctttttgtggaaggcggtgttgaccctggggctggtgcttctctactactgcttctccatcggcatcaccttctacaacaagtggctgacaaagagcttccatttccccctcttcatgacgatgctgcacctggccgtgatcttcctcttctccgccctgtccagggcgctggttcagtgctccagccacagggcccgtgtggtgctgagctgggccgactacctcagaagagtggctcccacagctctggcgacggcgcttgacgtgggcttgtccaactggagcttcctgtatgtcaccgtctcgctgtacacaatgaccaaatcctcagctgtcctcttcatcttgatcttctctctgatcttcaagctggaggagctgcgcgcggcactggtcctggtggtcctcctcatcgccgggggtctcttcatgttcacctacaagtccacacagttcaacgtggagggcttcgccttggtgctgggggcctcgttcatcggtggcattcgctggaccctcacccagatgctcctgcagaaggctgaactcggcctccagaatcccatcgacaccatgttccacctgcagccactcatgttcctggggctcttccctctctttgctgtatttgaaggtctccatttgtccacatctgagaaaatcttccgtttccaggacacagggctgctcctgcgggtacttgggagcctcttccttggcgggattctcgcctttggtttgggcttctctgagttcctcctggtctccagaacctccagcctcactctctccattgccggcatttttaaggaagtctgcactttgctgttggcagctcatctgctgggcgatcagatcagcctcctgaactggctgggcttcgccctctgcctctcgggaatatccctccacgttgccctcaaagccctgcattccagaggtgatggtggccccaaggccttgaaggggctgggctccagccccgacctggagctgctgctccggagcagccagcgggaggaaggtgacaatgaggaggaggagtactttgtggcccaggggcagcagtgaccagccagggcaaatggcttagaagcaggccactccccagcctgctgccagcactcactgtgctcaagccgccagggctcatcatggtagctgggagctgtggacgggagtcaccaggtggtggggccaagccagggactcatgacttttgcccctcccttcagagcctggtcacacaaggggcgagcaccaggccagcctgggactggccagagctgggcccaagctgcgctggaatcgcagcaggagaggggagtgggctggttcttcccaccacttcccaggctctgacagccgagactcatttccaaggcacagcagctttctaaagggactgagtttggactgggttttggacctccaggggctggagcttcatcacctgggcagtgtcttttctcagagagcaggtttctttatagtttggaaataaatggttcacggtccactggccgccttgtgttgctggagacgtgggggcagggaggggacagtgtgggcctggcctctcctttcctttccctgcctggagccttcttcaaatgtctggtcttaagccaggcctccttcattttctcgctcctgttagaacaccagtcccctccccagtggggccccactgcacctgctggcaggaaataaatgaatgtttactgagta

SEQ ID NO: 415707 - DNA, 2619 bp, Homo sapiens
cgcacttccggtggggagattccggcctggagctcccagggccgagcagaccttgggacctgtgagcgctgcatccaattaaccatgggaagggtcagcaccagccaccagccccttaggtgaggactctgcctggggctctgctgatggttccgaatcatggagctgcagagagctcctccagcctggagacgttcttggtgaaagctgtggtctaactccaccggctcttcctgcacattgtattcaagaggggtgcctgcccccgctgactcaggagctccggtgctgcagccgccacgaatggggaggtgggccctcgatgtggcctttttgtggaaggcggtgttgaccctggggctggtgcttctctactactgcttctccatcggcatcaccttctacaacaagtggctgacaaagagcttccatttccccctcttcatgacgatgctgcacctggccgtgatcttcctcttctccgccctgtccagggcgctggttcagtgctccagccacagggcccgtgtggtgctgagctgggccgactacctcagaagagtggctcccacagctctggcgacggcgcttgacgtgggcttgtccaactggagcttcctgtatgtcaccgtctcgctgtacacaatgaccaaatcctcagctgtcctcttcatcttgatcttctctctgatcttcaagctggaggagctggtgaggccccagcgtctcttgtgtccttcctgcccccacagatgctaagaataaagtgggagtctgagcagtggcttgtcctgctgtgtgacagaggagacaagcccagtccaggtggcagtagatccctttctgagaagggacctagacatgggcaatactcagaatatttagaaaccagtgtggcagggtaatgaccaaaggtgaaagcactgcaggatgagggtcccagcagagctgggtctaggaagcaccctgctgtgggaggcagtagccctgtgtgttaggcccaggaggaggtgggaccacttgggggcctaggacagccgtcagtgtggcagagcaagcagggctgttggcataccagctgaccgtcagccctacatgctgacattggtgggcaaggactgtccaggaccccctgggatggagctgaagggtggaaggatttcttgccccaggggcagccaagatggctgctgaccccaggctccaaatgtgatgaacccttgaccctcaagacccccgagttagctgccactgctccccatcctaccacgcgcggcactggtcctggtggtcctcctcatcgccgggggtctcttcatgttcacctacaagtccacacagttcaacgtggagggcttcgccttggtgctgggggcctcgttcatcggtggcattcgctggaccctcacccagatgctcctgcagaaggctgaactcggcctccagaatcccatcgacaccatgttccacctgcagccactcatgttcctggggctcttccctctctttgctgtatttgaaggtctccatttgtccacatctgagaaaatcttccgtttccaggacacagggctgctcctgcgggtacttgggagcctcttccttggcgggattctcgcctttggtttgggcttctctgagttcctcctggtctccagaacctccagcctcactctctccattgccggcatttttaaggaagtctgcactttgctgttggcagctcatctgctgggcgatcagatcagcctcctgaactggctgggcttcgccctctgcctctcgggaatatccctccacgttgccctcaaagccctgcattccagaggtgatggtggccccaaggccttgaaggggctgggctccagccccgacctggagctgctgctccggagcagccagcgggaggaaggtgacaatgaggaggaggagtactttgtggcccaggggcagcagtgaccagccagggcaaatggcttagaagcaggccactccccagcctgctgccagcactcactgtgctcaagccgccagggctcatcatggtagctgggagctgtggacgggagtcaccaggtggtggggccaagccagggactcatgacttttgcccctcccttcagagcctggtcacacaaggggcgagcaccaggccagcctgggactggccagagctgggcccaagctgcgctggaatcgcagcaggagaggggagtgggctggttcttcccaccacttcccaggctctgacagccgagactcatttccaaggcacagcagctttctaaagggactgagtttggactgggttttggacctccaggggctggagcttcatcacctgggcagtgtcttttctcagagagcaggtttctttatagtttggaaataaatggttcacggtccactggccgccttgtgttgctggagacgtgggggcagggaggggacagtgtgggcctggcctctcctttcctttccctgcctggagccttcttcaaatgtctggtcttaagccaggcctccttcattttctcgctcctgttagaacaccagtcccctccccagtggggccccactgcacctgctggcaggaaataaatgaatgtttactgagta

SEQ ID NO: 415708 - DNA, 3514 bp, Homo sapiens
cgcacttccggtggggagattccggcctggagctcccagggccgaggtcactttggtggcagttcatggagaatagcttgaggtgacaagacagcagacacgacgtgggtctctgggactgcctgtgccgttgtgggcagcccctccagagccctgagtcacgcagccttcagaggcacccatggctacgagaagcacagtctctgcctgaggctccagagcggccctttttccccagcagcagaccttgggacctgtgagcgctgcatccaattaaccatgggaagggtcagcaccagccaccagccccttaggtgaggactctgcctggggctctgctgatggttccgaatcatggagctgcagagagctcctccagcctggagacgttcttggtgaaagctgtggtctaactccaccggctcttcctgcacattgtattcaagaggggtgcctgcccccgctgactcaggagctccggtgctgcagccgccacgaatggggaggtgggccctcgatgtggcctttttgtggaaggcggtgttgaccctggggctggtgcttctctactactgcttctccatcggcatcaccttctacaacaagtggctgacaaagagcttccatttccccctcttcatgacgatgctgcacctggccgtgatcttcctcttctccgccctgtccagggcgctggttcagtgctccagccacagggcccgtgtggtgctgagctgggccgactacctcagaagagtggctcccacagctctggcgacggcgcttgacgtgggcttgtccaactggagcttcctgtatgtcaccgtctcgctgtgagtactggccatgccctgctgcctcccttcaggctgaagctgtctgtctgtccagcggggtgtctgcacacccggctgctaggccagccactccaccactctgggaccagcccttgctctctcagcctctccctggcacccagcagctctccgggaagtcgccagcctcttccgtaagcccagcgcagaggagatgctgtgcccacctgccaggcagcgtggggaagccagggagctctcccagaaccccatcatcagagcaggggaaggcaggctgcaaggccacagacaggtggccactggtgggtggtacacgcagccgcagcagagccctatgtggcctgggggctacacaagagtttcttcttccctctgatgttttgcttcagagagcactgttcctgccttcttgtcctcctacttctcatccttccttcccgctcctgggctctgccgagggttaggtaaagaacaggactcagggagctcaacgtcagacctgtaacctcttctctctggtgataaccagaggcctcttagtcagagattccttctgattaaaggtcgcttatcactcagatgacagcccagctctgtttggtcatttcgctcagtgatttgtgctcctgctcctttctcggtgatgggtctgagccctgagctccagcagtgcattgtgggtaattttgcttccagggtacacaatgaccaaatcctcagctgtcctcttcatcttgatcttctctctgatcttcaagctggaggagctggtgaggccccagcgtctcttgtgtccttcctgcccccacagatgctaagaataaagtgggagtctgagcagtggcttgtcctgctgtgtgacagaggagacaagcccagtccaggtggcagtagatccctttctgagaagggacctagacatgggcaatactcagaatatttagaaaccagtgtggcagggtaatgaccaaaggtgaaagcactgcaggatgagggtcccagcagagctgggtctaggaagcaccctgctgtgggaggcagtagccctgtgtgttaggcccaggaggaggtgggaccacttgggggcctaggacagccgtcagtgtggcagagcaagcagggctgttggcataccagctgaccgtcagccctacatgctgacattggtgggcaaggactgtccaggaccccctgggatggagctgaagggtggaaggatttcttgccccaggggcagccaagatggctgctgaccccaggctccaaatgtgatgaacccttgaccctcaagacccccgagttagctgccactgctccccatcctaccacgcgcggcactggtcctggtggtcctcctcatcgccgggggtctcttcatgttcacctacaagtccacacagttcaacgtggagggcttcgccttggtgctgggggcctcgttcatcggtggcattcgctggaccctcacccagatgctcctgcagaaggctgaactcggcctccagaatcccatcgacaccatgttccacctgcagccactcatgttcctggggctcttccctctctttgctgtatttgaaggtctccatttgtccacatctgagaaaatcttccgtttccaggacacagggctgctcctgcgggtacttgggagcctcttccttggcgggattctcgcctttggtttgggcttctctgagttcctcctggtctccagaacctccagcctcactctctccattgccggcatttttaaggaagtctgcactttgctgttggcagctcatctgctgggcgatcagatcagcctcctgaactggctgggcttcgccctctgcctctcgggaatatccctccacgttgccctcaaagccctgcattccagaggtgatggtggccccaaggccttgaaggggctgggctccagccccgacctggagctgctgctccggagcagccagcgggaggaaggtgacaatgaggaggaggagtactttgtggcccaggggcagcagtgaccagccagggcaaatggcttagaagcaggccactccccagcctgctgccagcactcactgtgctcaagccgccagggctcatcatggtagctgggagctgtggacgggagtcaccaggtggtggggccaagccagggactcatgacttttgcccctcccttcagagcctggtcacacaaggggcgagcaccaggccagcctgggactggccagagctgggcccaagctgcgctggaatcgcagcaggagaggggagtgggctggttcttcccaccacttcccaggctctgacagccgagactcatttccaaggcacagcagctttctaaagggactgagtttggactgggttttggacctccaggggctggagcttcatcacctgggcagtgtcttttctcagagagcaggtttctttatagtttggaaataaatggttcacggtccactggccgccttgtgttgctggagacgtgggggcagggaggggacagtgtgggcctggcctctcctttcctttccctgcctggagccttcttcaaatgtctggtcttaagccaggcctccttcattttctcgctcctgttagaacaccagtcccctccccagtggggccccactgcacctgctggcaggaaataaatgaatgtttactgagta

SEQ ID NO: 415709 - DNA, 2183 bp, Homo sapiens
cgcacttccggtggggagattccggcctggagctcccagggccgaggtcactttggtggcagttcatggagaatagcttgaggtgacaagacagcagacacgacgtgggtctctgggactgcctgtgccgttgtgggcagcccctccagagccctgagtcacgcagccttcagaggcacccatggctacgagaagcacagtctctgcctgaggctccagagcggccctttttccccagcagcagaccttgggacctgtgagcgctgcatccaattaaccatgggaagggtcagcaccagccaccagccccttaggtgaggactctgcctggggctctgctgatggttccgaatcatggagctgcagagagctcctccagcctggagacgttcttggtgaaagctgtggtctaactccaccggctcttcctgcacattgtattcaagaggggtgcctgcccccgctgactcaggagctccggtgctgcagccgccacgaatggggaggtgggccctcgatgtggcctttttgtggaaggcggtgttgaccctggggctggtgcttctctactactgcttctccatcggcatcaccttctacaacaagtggctgacaaagagcttccatttccccctcttcatgacgatgctgcacctggccgtgatcttcctcttctccgccctgtccagggcgctggttcagtgctccagccacagggcccgtgtggtgctgagctgggccgactacctcagaagagtggctcccacagctctggcgacggcgcttgacgtgggcttgtccaactggagcttcctgtatgtcaccgtctcgctcgcgcggcactggtcctggtggtcctcctcatcgccgggggtctcttcatgttcacctacaagtccacacagttcaacgtggagggcttcgccttggtgctgggggcctcgttcatcggtggcattcgctggaccctcacccagatgctcctgcagaaggctgaactcggcctccagaatcccatcgacaccatgttccacctgcagccactcatgttcctggggctcttccctctctttgctgtatttgaaggtctccatttgtccacatctgagaaaatcttccgtttccaggacacagggctgctcctgcgggtacttgggagcctcttccttggcgggattctcgcctttggtttgggcttctctgagttcctcctggtctccagaacctccagcctcactctctccattgccggcatttttaaggaagtctgcactttgctgttggcagctcatctgctgggcgatcagatcagcctcctgaactggctgggcttcgccctctgcctctcgggaatatccctccacgttgccctcaaagccctgcattccagaggtgatggtggccccaaggccttgaaggggctgggctccagccccgacctggagctgctgctccggagcagccagcgggaggaaggtgacaatgaggaggaggagtactttgtggcccaggggcagcagtgaccagccagggcaaatggcttagaagcaggccactccccagcctgctgccagcactcactgtgctcaagccgccagggctcatcatggtagctgggagctgtggacgggagtcaccaggtggtggggccaagccagggactcatgacttttgcccctcccttcagagcctggtcacacaaggggcgagcaccaggccagcctgggactggccagagctgggcccaagctgcgctggaatcgcagcaggagaggggagtgggctggttcttcccaccacttcccaggctctgacagccgagactcatttccaaggcacagcagctttctaaagggactgagtttggactgggttttggacctccaggggctggagcttcatcacctgggcagtgtcttttctcagagagcaggtttctttatagtttggaaataaatggttcacggtccactggccgccttgtgttgctggagacgtgggggcagggaggggacagtgtgggcctggcctctcctttcctttccctgcctggagccttcttcaaatgtctggtcttaagccaggcctccttcattttctcgctcctgttagaacaccagtcccctccccagtggggccccactgcacctgctggcaggaaataaatgaatgtttactgagta

SEQ ID NO: 415710 - DNA, 2636 bp, Homo sapiens
ggggcgggcagtaaacacgtgagcaaacaaggaaacgtcagaggtgggagtgccacgaggattgggaggggtggggcattggagaaagtattcagccaagcggaggtctgcggaagggagctgaaggcaggaagagcagcaagtaaagaaaaacacaggtttgatgtgtttgacacgtggcagggggccgctgtggcgggtgctgggaccagtggcagaagaatgaggttacagaggccttccttgtggaccaggctgaggagctgggcttagccttagggcatgatctgtttcgtgtgccatctctctggctgctttatagattccaggccttaggggcgaaagaggaaacagggagaccagttagaccagtggcagtcagcaggtgaaagataattgtggcttagactgtggtagtgggaatggagaggaagagaagtagaggggtcaagaagtgtattgaaagtggaactgacagggcaggatttgagaaatgacagaaataagtggtcaaagatgacttcatcatagatttttggttttggcttaagtaaccaagtgtattatgctggcatttactaaatgactttgggatagattgggagcgtgagaaataattacgaaatcttcttagggcatcttaagttttagatatttggagtgcagctaccaaataggcagttagatatatgagtctgatacagaaaaggtcagggctgatgtaaagaatttagaaatcattggcaagtggattgggtaggatgagattatgtagggtaagatttaagagagaagagaagccaggttccaagctttaggcacccaatttttatagattgagttgacaagaaggtgccagcaaaaaagaccaataaggagtccagaaaagcagaagaaaaaccaggagaatgtggtatcgtggcacccaagagaaggttttttctaggaggaggaagtgatccattgtgtaaggtcactttggtggcagttcatggagaatagcttgaggtgacaagacagcagacacgacgtgggtctctgggactgcctgtgccgttgtgggcagcccctccagagccctgagtcacgcagccttcagaggcacccatggctacgagaagcacagtctctgcctgaggctccagagcggccctttttccccagcagcagaccttgggacctgtgagcgctgcatccaattaaccatgggaagggtcagcaccagccaccagccccttaggtgaggactctgcctggggctctgctgatggttccgaatcatggagcgcgcggcactggtcctggtggtcctcctcatcgccgggggtctcttcatgttcacctacaagtccacacagttcaacgtggagggcttcgccttggtgctgggggcctcgttcatcggtggcattcgctggaccctcacccagatgctcctgcagaaggctgaactcggcctccagaatcccatcgacaccatgttccacctgcagccactcatgttcctggggctcttccctctctttgctgtatttgaaggtctccatttgtccacatctgagaaaatcttccgtttccaggacacagggctgctcctgcgggtacttgggagcctcttccttggcgggattctcgcctttggtttgggcttctctgagttcctcctggtctccagaacctccagcctcactctctccattgccggcatttttaaggaagtctgcactttgctgttggcagctcatctgctgggcgatcagatcagcctcctgaactggctgggcttcgccctctgcctctcgggaatatccctccacgttgccctcaaagccctgcattccagaggtgatggtggccccaaggccttgaaggggctgggctccagccccgacctggagctgctgctccggagcagccagcgggaggaaggtgacaatgaggaggaggagtactttgtggcccaggggcagcagtgaccagccagggcaaatggcttagaagcaggccactccccagcctgctgccagcactcactgtgctcaagccgccagggctcatcatggtagctgggagctgtggacgggagtcaccaggtggtggggccaagccagggactcatgacttttgcccctcccttcagagcctggtcacacaaggggcgagcaccaggccagcctgggactggccagagctgggcccaagctgcgctggaatcgcagcaggagaggggagtgggctggttcttcccaccacttcccaggctctgacagccgagactcatttccaaggcacagcagctttctaaagggactgagtttggactgggttttggacctccaggggctggagcttcatcacctgggcagtgtcttttctcagagagcaggtttctttatagtttggaaataaatggttcacggtccactggccgccttgtgttgctggagacgtgggggcagggaggggacagtgtgggcctggcctctcctttcctttccctgcctggagccttcttcaaatgtctggtcttaagccaggcctccttcattttctcgctcctgttagaacaccagtcccctccccagtggggccccactgcacctgctggcaggaaataaatgaatgtttactgagta

SEQ ID NO: 415711 - DNA, 1497 bp, Homo sapiens
  misc_feature (1443)..(1443): n is a, c, g, or t
  misc_feature (1484)..(1484): n is a, c, g, or t
cgcacttccggtggggagattccggcctggagctcccagggccgagcagaccttgggacctgtgagcgctgcatccaattaaccatgggaagggtcagcaccagccaccagccccttaggtgaggactctgcctggggctctgctgatggttccgaatcatggagctgcagagagctcctccagcctggagacgttcttggtgaaagctgtggtctaactccaccggctcttcctgcacattgtattcaagaggggtgcctgcccccgctgactcaggagctccggtgctgcagccgccacgaatggggaggtgggccctcgatgtggcctttttgtggaaggcggtgttgaccctggggctggtgcttctctactactgcttctccatcggcatcaccttctacaacaagtggctgacaaagagcttccatttccccctcttcatgacgatgctgcacctggccgtgatcttcctcttctccgccctgtccagggcgctggttcagtgctccagccacagggcccgtgtggtgctgagctgggccgactacctcagaagagtggctcccacagctctggcgacggcgcttgacgtgggcttgtccaactggagcttcctgtatgtcaccgtctcgctgtacacaatgaccaaatcctcagctgtcctcttcatcttgatcttctctctgatcttcaagctggaggagctggtgaggccccagcgtctcttgtgtccttcctgcccccacagatgctaagaataaagtgggagtctgagcagtggcttgtcctgctgtgtgacagaggagacaagcccagtccaggtggcagtagatccctttctgagaagggacctagacatgggcaatactcagaatatttagaaaccagtgtggcagggtaatgaccaaaggtgaaagcactgcaggatgagggtcccagcagagctgggtctaggaagcaccctgctgtgggaggcagtagccctgtgtgttaggcccaggaggaggtgggaccacttgggggcctaggacagccgtcagtgtggcagagcaagcagggctgttggcataccagctgaccgtcagccctacatgctgacattggtgggcaaggactgtccaggaccccctgggatggagctgaagggtggaaggatttcttgccccaggggcagccaagatggctgctgaccccaggctccaaatgtgatgaacccttgaccctcaagacccccgagttagctgccactgctccccatcctaccacgcgcggcactggtcctggtggtcctcctcatcgccgggggtctcttcatgttcacctacaagtccacacagttcaacgtggagggcttcgccttggtgctgggggcctcgttcatcggtggcattcgctggaccctcacccagatgctcctgcagaaggctgaactcggcctncagaatcccatcgactgtattccatgccagcactgcccctngctcagatctgac

SEQ ID NO: 415712 - DNA, 781 bp, Homo sapiens
ctcctctcattttttttttttttagcttccaaacattaccaataatttctgaataaaatttcgctccagacagacgaggcgtgcaggcgtgaccccgtcgccttccgacagcaccgtgcccaccccccggagatggtctcgccctggttcctcctcgtctccgccgctagtctccagctccaaaatggcggctgccactgtggggcttctgccggccggtagtccctggcgctgctgacccagcatcggcttttctacgtcttgaacctggattcgcctaggggttgggaagggctgtggacggcgttgggggaggcctgacgaggcaagtgagggcgggagaaaggagcgagcctcgggctggggaaggcggcgtcattggccctccgggagcacggggccccgactccgacccggtctcccccgaggactcgcccccgccgcttcggctgcgactgtcccggtcgttcccggcagaagtggtcagcgagggaaagagaagtgacttctccatgggtttcaagctcccagctgttttgcggcagcccgtacggttccctcccgggatcttcttccctcctttctgcttccctctgcttcccctttcatctcttggcgctggaagagttaaaccgacgccagctttagctccttggcttcgtggctacggcgttcttagcctcccctgctcgggctcttcccgtcgttttgggttgagagaccacgaggttgctaagctctggacaccgcttaggcgtccttttagttcttcgactccagc

SEQ ID NO: 415713 - DNA, 3729 bp, Homo sapiens
ctcctctcattttttttttttttagcttccaaacattaccaataatttctgaataaaatttcgctccagacagacgaggcgtgcaggcgtgaccccgtcgccttccgacagcaccgtgcccaccccccggagatggtctcgccctggttcctcctcgtctccgccgctagtctccagctccaaaatggcggctgccactgtggggcttctgccggccggtagtccctggcgctgctgacccagcatcggcttttctacgtcttgaacctggattcgcctaggggttgggaagggctgtggacggcgttgggggaggcctgacgagattaataaagaactcttcagaattcctggtgtttcatcatatatacgactaagatatcaactcttctagcttgctgtttctggaccaaaaaaaatgacgtctattatcaaattaactaccctttctggggtccaagaagaatctgccctttgctatcttctccaagttgatgagtttagatttttattggactgtggctgggatgagcacttttctatggatattattgattccctgaggaagcatgttcaccagattgatgcagtgctgttgtctcaccctgatcctctccaccttggtgccctcccgtatgctgtcggaaagttgggtctgaactgtgctatctatgcaaccattcctgtttataaaatgggacagatgttcatgtatgatctttatcagtctcgacacaatacagaagattttacactctttacattagatgatgtggatgcagcctttgataaaatacagcagctaaaattctctcagattgtgaatttgaaaggtaaaggacatggcctgtctatcacacctctgccagctggtcatatgataggtggaacaatatggaaaatagtcaaagatggagaagaagaaattgtttatgcagttgacttcaaccacaagagggagatccatttaaatggatgttccctggaaatgctaagcaggccttccctacttatcacagattcattcaatgctacatatgtacagcctagaagaaaacagagagatgagcagcttctgacaaatgtcctggaaacacttcgaggtgatggaaatgtgttaatagcagtggacacagcaggcagagttttggaacttgctcaacttcttgatcagatttggaggactaaagatgcaggattgggtgtttactcattggcactcctaaataatgtcagttacaatgtggtggagttttctaagtcccaggtagaatggatgagtgataaattgatgagatgttttgaagacaaaagaaataatccgtttcagtttcgccatctctctttatgtcatggtctttctgacttggcccgtgtacctagccctaaagttgtacttgccagccaacctgacctggaatgcggattttcaagggatctctttattcagtggtgtcaggaccctaaaaactcaatcattctaacctacagaactactcctgggactttagcacgtttcctaattgataatccttctgaaaaaattacagaaatagagttgaggaaacgtgtgaagcttgaagggaaagaacttgaagaatacttggaaaaagagaaactaaagaaagaagctgccaaaaagcttgagcagtcaaaagaggcagatatagattccagtgatgagagtgatattgaggaagatattgaccagccatcagctcataagacgaagcatgacttgatgatgaaaggtgaaggcagtcgtaaaggaagttttttcaaacaggcaaaaaagtcctatcctatgtttcctgccccagaagaaagaattaaatgggatgaatatggagagattatcaaaccagaggatttcttagtgccagagcttcaagctactgaagaagaaaaaagcaaattagaatctggtttgacaaatggagatgaacctatggatcaggatttatctgatgttcctactaaatgtatttctacaacagagtctattgaaataaaagcccgggttacctacatagactatgaaggacgctctgatggggattccattaaaaaaatcattaatcagatgaaaccacgacagttgatcatcgtccatggcccaccagaggccagtcaagatctggcagagtgctgtcgcgcctttggtgggaaagatattaaagtgtacatgccaaagctacatgaaacagttgatgccactagtgaaactcacatctaccaggtgaggttaaaagactcacttgtcagctctcttcagttttgtaaggcaaaagatgctgaattagcttggatagatggtgtcttagatatgagagtttccaaagtggacacaggggttattttagaagaaggagaactaaaggatgatggagaagactcagagatgcaagtggaagctccctcagattctagcgttatagcacaacaaaaggccatgaaaagtctgttcggagatgatgaaaaagaaacaggtgaagaaagtgagatcattcctactttggaacccttgccacctcatgaggttcctggacatcagtcagtttttatgaatgaaccaaggctgtcagacttcaagcaagttctcttacgggaggggattcaagctgaatttgtaggaggtgtacttgtttgcaacaatcaagtagcagtccgcagaacggaaactggacgcattggattagaaggctgcctttgtcaagatttttataggataagagaccttttatatgaacaatatgccattgtataaaggacatgatgtcaagaagtatctgcttgacctttctaagaaaaagggattcttatcttactctgagcttttgatgttttgttttgtaacatacaaaaagaatctgccagaaaaacttacatgtatcagatttttaaaaatataaatagagaacattttgcaaatgctcaaatgagcattctatcttttggctttcagagtgatagagctcctaacaggtgtacaggcccaagagttgaaggtgattggttttctttacagactccttgttctctagaagggctttttacttgaataaaacaatgcaacttagcaaaccaatttatggccttagagaaacatttttgcatgagttcttacaaactgtttgttatattttctggaatgataagtgagaattatttagaaaagacatgctccaaaaaaaaaacaaaactgataaaacagtttttcgaaacttacttttaaaagcatacgtgctatgactctctccagtttgaatatgcaattgttttcacaggcaggatgtctgttttctgcctgtatttcccagtgatttactctagggtaaggtagtacacatttggttcagaaattaatttttatttctcctatatcttgttttatcaagattttgttgtggcatttcaatgtaaattataacaccatcatttgagtatacataattcaaaagaactacttgatgcagtatagtcttaagggttctgcatacattttagaaacatcttagccgtaagttaggtcctgtgttaaactgtttagtgctctgtttttaagaaaacaaatgttgaacctcacacttttatgtggtgacagtgtaatttaattaaaaggtgtaaatgttttcatctcttaggcttgctgtctcctaaggtcacccaagcagtggttggattttatacacattactactaaaataatactgaagttggataaggtta

SEQ ID NO: 415714 - DNA, 3316 bp, Homo sapiens
ctcctctcattttttttttttttagcttccaaacattaccaataatttctgaataaaatttcgctccagacagacgaggcgtgcaggcgtgaccccgtcgccttccgacagcaccgtgcccaccccccggagatggtctcgccctggttcctcctcgtctccgccgctagtctccagctccaaaatggcggctgccactgtggggcttctgccggccggtagtccctggcgctgctgacccagcatcggcttttctacgtcttgaacctggattcgcctaggggttgggaagggctgtggacggcgttgggggaggcctgacgagattaataaagaactcttcagaattcctggtgtttcatcatatatacgactaagatatcaactcttctagcttgctgtttctggaccaaaaaaaatgacgtctattatcaaattaactaccctttctggggtccaagaagaatctgccctttgctatcttctccaagttgatgagtttagatttttattggactgtggctgggatgagcacttttctatggatattattgattccctgaggaagcatgttcaccagattgatgcagtgctgttgtctcaccctgatcctctccaccttggtgccctcccgtatgctgtcggaaagttgggtctgaactgtgctatctatgcaaccattcctgtttataaaatgggacagatgttcatgtatgatctttatcagtctcgacacaatacagaagattttacactctttacattagatgatgtggatgcagcgattgggtgtttactcattggcactcctaaataatgtcagttacaatgtggtggagttttctaagtcccaggtagaatggatgagtgataaattgatgagatgttttgaagacaaaagaaataatccgtttcagtttcgccatctctctttatgtcatggtctttctgacttggcccgtgtacctagccctaaagttgtacttgccagccaacctgacctggaatgcggattttcaagggatctctttattcagtggtgtcaggaccctaaaaactcaatcattctaacctacagaactactcctgggactttagcacgtttcctaattgataatccttctgaaaaaattacagaaatagagttgaggaaacgtgtgaagcttgaagggaaagaacttgaagaatacttggaaaaagagaaactaaagaaagaagctgccaaaaagcttgagcagtcaaaagaggcagatatagattccagtgatgagagtgatattgaggaagatattgaccagccatcagctcataagacgaagcatgacttgatgatgaaaggtgaaggcagtcgtaaaggaagttttttcaaacaggcaaaaaagtcctatcctatgtttcctgccccagaagaaagaattaaatgggatgaatatggagagattatcaaaccagaggatttcttagtgccagagcttcaagctactgaagaagaaaaaagcaaattagaatctggtttgacaaatggagatgaacctatggatcaggatttatctgatgttcctactaaatgtatttctacaacagagtctattgaaataaaagcccgggttacctacatagactatgaaggacgctctgatggggattccattaaaaaaatcattaatcagatgaaaccacgacagttgatcatcgtccatggcccaccagaggccagtcaagatctggcagagtgctgtcgcgcctttggtgggaaagatattaaagtgtacatgccaaagctacatgaaacagttgatgccactagtgaaactcacatctaccaggtgaggttaaaagactcacttgtcagctctcttcagttttgtaaggcaaaagatgctgaattagcttggatagatggtgtcttagatatgagagtttccaaagtggacacaggggttattttagaagaaggagaactaaaggatgatggagaagactcagagatgcaagtggaagctccctcagattctagcgttatagcacaacaaaaggccatgaaaagtctgttcggagatgatgaaaaagaaacaggtgaagaaagtgagatcattcctactttggaacccttgccacctcatgaggttcctggacatcagtcagtttttatgaatgaaccaaggctgtcagacttcaagcaagttctcttacgggaggggattcaagctgaatttgtaggaggtgtacttgtttgcaacaatcaagtagcagtccgcagaacggaaactggacgcattggattagaaggctgcctttgtcaagatttttataggataagagaccttttatatgaacaatatgccattgtataaaggacatgatgtcaagaagtatctgcttgacctttctaagaaaaagggattcttatcttactctgagcttttgatgttttgttttgtaacatacaaaaagaatctgccagaaaaacttacatgtatcagatttttaaaaatataaatagagaacattttgcaaatgctcaaatgagcattctatcttttggctttcagagtgatagagctcctaacaggtgtacaggcccaagagttgaaggtgattggttttctttacagactccttgttctctagaagggctttttacttgaataaaacaatgcaacttagcaaaccaatttatggccttagagaaacatttttgcatgagttcttacaaactgtttgttatattttctggaatgataagtgagaattatttagaaaagacatgctccaaaaaaaaaacaaaactgataaaacagtttttcgaaacttacttttaaaagcatacgtgctatgactctctccagtttgaatatgcaattgttttcacaggcaggatgtctgttttctgcctgtatttcccagtgatttactctagggtaaggtagtacacatttggttcagaaattaatttttatttctcctatatcttgttttatcaagattttgttgtggcatttcaatgtaaattataacaccatcatttgagtatacataattcaaaagaactacttgatgcagtatagtcttaagggttctgcatacattttagaaacatcttagccgtaagttaggtcctgtgttaaactgtttagtgctctgtttttaagaaaacaaatgttgaacctcacacttttatgtggtgacagtgtaatttaattaaaaggtgtaaatgttttcatctcttaggcttgctgtctcctaaggtcacccaagcagtggttggattttatacacattactactaaaataatactgaagttggataaggtta

SEQ ID NO: 415715 - DNA, 4172 bp, Homo sapiens
ctcctctcattttttttttttttagcttccaaacattaccaataatttctgaataaaatttcgctccagacagacgaggcgtgcaggcgtgaccccgtcgccttccgacagcaccgtgcccaccccccggagatggtctcgccctggttcctcctcgtctccgccgctagtctccagctccaaaatggcggctgccactgtggggcttctgccggccggtagtccctggcgctgctgacccagcatcggcttttctacgtcttgaacctggattcgcctaggggttgggaagggctgtggacggcgttgggggaggcctgacgagattaataaagaactcttcagaattcctggtgtttcatcatatatacgactaagatatcaactcttctagcttgctgtttctggaccaaaaaaaatgacgtctattatcaaattaactaccctttctggggtccaagaagaatctgccctttgctatcttctccaagttgatgagtttagatttttattggactgtggctgggatgagcacttttctatggatattattgattccctgaggaagcatgttcaccagattgatgcagtgctgttgtctcaccctgatcctctccaccttggtgccctcccgtatgctgtcggaaagttgggtctgaactgtgctatctatgcaaccattcctgtttataaaatgggacagatgttcatgtatgatctttatcagtctcgacacaatacagaagattttacactctttacattagatgatgtggatgcagcgattgggtgtttactcattggcactcctaaataatgtcagttacaatgtggtggagttttctaagtcccaggtagaatggatgagtgataaattgatgagatgttttgaagacaaaagaaataatccgtttcagtttcgccatctctctttatgtcatggtctttctgacttggcccgtgtacctagccctaaagttgtacttgccagccaacctgacctggaatgcggattttcaagggatctctttattcagtggtgtcaggaccctaaaaactcaatcattctaacctacagaactactcctgggactttagcacgtttcctaattgataatccttctgaaaaaattacagaaatagagttgaggaaacgtgtgaagcttgaagggaaagaacttgaagaatacttggaaaaagagaaactaaagaaagaagctgccaaaaagcttgagcagtcaaaagaggcagatatagattccagtgatgagagtgatattgaggaagatattgaccagccatcagctcataagacgaagcatgacttgatgatgaaaggtgaaggcagtcgtaaaggaagttttttcaaacaggcaaaaaagtcctatcctatgtttcctgccccagaagaaagaattaaatgggatgaatatggagagattatcaaaccagaggatttcttagtgccagagcttcaagctactgaagaagaaaaaagcaaattagaatctggtttgacaaatggagatgaacctatggatcaggatttatctgatgttcctactaaatgtatttctacaacagagtctattgaaataaaagcccgggttacctacatagactatgaaggacgctctgatggggattccattaaaaaaatcattaatcagatgaaaccacgacagttgatcatcgtccatggcccaccagaggccagtcaagatctggcagagtgctgtcgcgcctttggtgggaaagatattaaagtgtacatgccaaagctacatgaaacagttgatgccactagtgaaactcacatctaccaggtgaggttaaaagactcacttgtcagctctcttcagttttgtaaggcaaaagatgctgaattagcttggatagatggtgtcttagatatgagagtttccaaagtggacacaggggttattttagaagaaggagaactaaaggatgatggagaagactcagagatgcaagtggaagctccctcagattctagcgttatagcacaacaaaaggccatgaaaagtctgttcggagatgatgaaaaagaaacaggtgaagaaagtgagatcattcctactttggaacccttgccacctcatgaggttcctggacatcagtcagtttttatgaatgaaccaaggctgtcagacttcaagcaagttctcttacgggaggggattcaagctgaatttgtaggaggtgtacttgtttgcaacaatcaagtagcagtccgcagaacggaaactggacgcattggattagaaggctgcctttgtcaagatttttataggataagagaccttttatatgaacaatatgccattgtataaaggacatgatgtcaagaagtatctgcttgacctttctaagaaaaagggattcttatcttactctgagcttttgatgttttgttttgtaacatacaaaaagaatctgccagaaaaacttacatgtatcagatttttaaaaatataaatagagaacattttgcaaatgctcaaatgagcattctatcttttggctttcagagtgatagagctcctaacaggtgtacaggcccaagagttgaaggtgattggttttctttacagactccttgttctctagaagggctttttacttgaataaaacaatgcaacttagcaaaccaatttatggccttagagaaacatttttgcatgagttcttacaaactgtttgttatattttctggaatgataagtgagaattatttagaaaagacatgctccaaaaaaaaaacaaaactgataaaacagtttttcgaaacttacttttaaaagcatacgtgctatgactctctccagtttgaatatgcaattgttttcacaggcaggatgtctgttttctgcctgtatttcccagtgatttactctagggtaaggtagtacacatttggttcagaaattaatttttatttctcctatatcttgttttatcaagattttgttgtggcatttcaatgtaaattataacaccatcatttgagtatacataattcaaaagaactacttgatgcagtatagtcttaagggttctgcatacattttagaaacatcttagccgtaagttaggtcctgtgttaaactgtttagtgctctgtttttaagaaaacaaatgttgaacctcacacttttatgtggtgacagtgtaatttaattaaaaggtgtaaatgttttcatctcttaggcttgctgtctcctaaggtcacccaagcagtggttggattttatacacattactactaaaataatactgaagttggataaggttatcctttctgtatttgcgtctttcttgtgactaaccaccctgatatagtattaaccactgtgttcaagagtaaaaacaatatatgcaattttcattgaacttaaagagtgaaaaccatgtaaactattgaaactattgtaatccattaatgcttttttagaatggcagaccttgatgtttatttctcaaatggttaagccctcttctttactcttaatttttttttgagacagagtcacccaggctggagtgcagtggtgagattttggctcactataacctcttcctccagggttcaagtgattctcccacctcagcctcccaagtagctgggactacgggcacatgccactgcacctggctaatttttatatttttggtagagacagggtttcaccatgttggccaggctggtctcaaactcctgacctcaagcgatccacccacctaggcctcccaaagtgctgggattacaggcatgaatcaccacaactagcctacccttagatttttggaaggatcgatcttatttaactatgtgtggaacaacccagtaatatcagactcgaattactatttcattctatttcaaatgcttataaagctactattgtagattatagtgttaatgcaaagtttacagacaaagggaaacacctgggccacacatatgccgatgttcagtggatgactgctacgcaagcaacataaagaggccattttatgaaagggaacatcagaggaaacattataactgagacctttatagcctttccattattatggtttaaatccttgacagtctttatttgcaatgacactgggaccagtaaagacaaaggtacacccgggtcctc

SEQ ID NO: 415716 - DNA, 4351 bp, Homo sapiens
ctcctctcattttttttttttttagcttccaaacattaccaataatttctgaataaaatttcgctccagacagacgaggcgtgcaggcgtgaccccgtcgccttccgacagcaccgtgcccaccccccggagatggtctcgccctggttcctcctcgtctccgccgctagtctccagctccaaaatggcggctgccactgtggggcttctgccggccggtagtccctggcgctgctgacccagcatcggcttttctacgtcttgaacctggattcgcctaggggttgggaagggctgtggacggcgttgggggaggcctgacgagattaataaagaactcttcagaattcctggtgtttcatcatatatacgactaagatatcaactcttctagcttgctgtttctggaccaaaaaaaatgacgtctattatcaaattaactaccctttctggggtccaagaagaatctgccctttgctatcttctccaagttgatgagtttagatttttattggactgtggctgggatgagcacttttctatggatattattgattccctgaggaagcatgttcaccagattgatgcagtgctgttgtctcaccctgatcctctccaccttggtgccctcccgtatgctgtcggaaagttgggtctgaactgtgctatctatgcaaccattcctgtttataaaatgggacagatgttcatgtatgatctttatcagtctcgacacaatacagaagattttacactctttacattagatgatgtggatgcagcgattgggtgtttactcattggcactcctaaataatgtcagttacaatgtggtggagttttctaagtcccaggtagaatggatgagtgataaattgatgagatgttttgaagacaaaagaaataatccgtttcagtttcgccatctctctttatgtcatggtctttctgacttggcccgtgtacctagccctaaagttgtacttgccagccaacctgacctggaatgcggattttcaagggatctctttattcagtggtgtcaggaccctaaaaactcaatcattctaacctacagaactactcctgggactttagcacgtttcctaattgataatccttctgaaaaaattacagaaatagagttgaggaaacgtgtgaagcttgaagggaaagaacttgaagaatacttggaaaaagagaaactaaagaaagaagctgccaaaaagcttgagcagtcaaaagaggcagatatagattccagtgatgagagtgatattgaggaagatattgaccagccatcagctcataagacgaagcatgacttgatgatgaaaggtgaaggcagtcgtaaaggaagttttttcaaacaggcaaaaaagtcctatcctatgtttcctgccccagaagaaagaattaaatgggatgaatatggagagattatcaaaccagaggatttcttagtgccagagcttcaagctactgaagaagaaaaaagcaaattagaatctggtttgacaaatggagatgaacctatggatcaggatttatctgatgttcctactaaatgtatttctacaacagagtctattgaaataaaagcccgggttacctacatagactatgaaggacgctctgatggggattccattaaaaaaatcattaatcagatgaaaccacgacagttgatcatcgtccatggcccaccagaggccagtcaagatctggcagagtgctgtcgcgcctttggtgggaaagatattaaagtgtacatgccaaagctacatgaaacagttgatgccactagtgaaactcacatctaccaggtgaggttaaaagactcacttgtcagctctcttcagttttgtaaggcaaaagatgctgaattagcttggatagatggtgtcttagatatgagagtttccaaagtggacacaggggttattttagaagaaggagaactaaaggatgatggagaagactcagagatgcaagtggaagctccctcagattctagcgttatagcacaacaaaaggccatgaaaagtctgttcggagatgatgaaaaagaaacaggtgaagaaagtgagatcattcctactttggaacccttgccacctcatgaggttcctggacatcagtcagtttttatgaatgaaccaaggctgtcagacttcaagcaagttctcttacgggaggggattcaagctgaatttgtaggaggtgtacttgtttgcaacaatcaagtagcagtccgcagaacggaaactggacgcattggattagaaggctgcctttgtcaagatttttataggataagagaccttttatatgaacaatatgccattgtataaaggacatgatgtcaagaagtatctgcttgacctttctaagaaaaagggattcttatcttactctgagcttttgatgttttgttttgtaacatacaaaaagaatctgccagaaaaacttacatgtatcagatttttaaaaatataaatagagaacattttgcaaatgctcaaatgagcattctatcttttggctttcagagtgatagagctcctaacaggtgtacaggcccaagagttgaaggtgattggttttctttacagactccttgttctctagaagggctttttacttgaataaaacaatgcaacttagcaaaccaatttatggccttagagaaacatttttgcatgagttcttacaaactgtttgttatattttctggaatgataagtgagaattatttagaaaagacatgctccaaaaaaaaaacaaaactgataaaacagtttttcgaaacttacttttaaaagcatacgtgctatgactctctccagtttgaatatgcaattgttttcacaggcaggatgtctgttttctgcctgtatttcccagtgatttactctagggtaaggtagtacacatttggttcagaaattaatttttatttctcctatatcttgttttatcaagattttgttgtggcatttcaatgtaaattataacaccatcatttgagtatacataattcaaaagaactacttgatgcagtatagtcttaagggttctgcatacattttagaaacatcttagccgtaagttaggtcctgtgttaaactgtttagtgctctgtttttaagaaaacaaatgttgaacctcacacttttatgtggtgacagtgtaatttaattaaaaggtgtaaatgttttcatctcttaggcttgctgtctcctaaggtcacccaagcagtggttggattttatacacattactactaaaataatactgaagttggataaggttatcctttctgtatttgcgtctttcttgtgactaaccaccctgatatagtattaaccactgtgttcaagagtaaaaacaatatatgcaattttcattgaacttaaagagtgaaaaccatgtaaactattgaaactattgtaatccattaatgcttttttagaatggcagaccttgatgtttatttctccatgttggttaggctggcctcaaactcccgacctcaggtgatccgcccgcctgggcctcccaaagtgctgggattacaggcgtgagccactgctcctggcccaagatctgatggttttgtaagggaattttccccctttgcttggcacttcttcctgctgccatgtgaagaaggatgtgtttgcttccccttccaccatgattgtaagtttcatgaggcctccccagcctgtgggactgtgagtcaattaaacgtgtttactttataaattacccagtctcaggcaattctttatagcagtgtgagaacagactaatatgaataccaatactgaaaaattgtttcttgcctcaccttgtcctatgaacaggaattaaattttaaagtattgccttaagatggctgtgctaaataataatcattgcaagagcaatacttttacctgtttctagatgacaatattactaaaatttctcaaatgaagactttgttttagcttcaattacttcagaaaatataaattttaaagatgactatgagataaatcatgaactcagtggaattttcagatgagatggggcgcgttcagggtggtatgactgtagacggaattttcagatctttgttatttagaagcaagtataggtataacgtggactatcaactgatatctgcaaataatttggttaaaatgaaatttgattgtagtatttgttgctgtaggattataaatgtcaaatatcattgtaaacatttctatatttttagaaatatcttgggtggcctgaaacagaagtgaggaaatcaattttttaaggtgagccatttggcttttttaaaaaattgaga

SEQ ID NO: 415717 - DNA, 5650 bp, Homo sapiens
ctcctctcattttttttttttttagcttccaaacattaccaataatttctgaataaaatttcgctccagacagacgaggcgtgcaggcgtgaccccgtcgccttccgacagcaccgtgcccaccccccggagatggtctcgccctggttcctcctcgtctccgccgctagtctccagctccaaaatggcggctgccactgtggggcttctgccggccggtagtccctggcgctgctgacccagcatcggcttttctacgtcttgaacctggattcgcctaggggttgggaagggctgtggacggcgttgggggaggcctgacgagattaataaagaactcttcagaattcctggtgtttcatcatatatacgactaagatatcaactcttctagcttgctgtttctggaccaaaaaaaatgacgtctattatcaaattaactaccctttctggggtccaagaagaatctgccctttgctatcttctccaagttgatgagtttagatttttattggactgtggctgggatgagcacttttctatggatattattgattccctgaggaagcatgttcaccagattgatgcagtgctgttgtctcaccctgatcctctccaccttggtgccctcccgtatgctgtcggaaagttgggtctgaactgtgctatctatgcaaccattcctgtttataaaatgggacagatgttcatgtatgatctttatcagtctcgacacaatacagaagattttacactctttacattagatgatgtggatgcagcctttgataaaatacagcagctaaaattctctcagattgtgaatttgaaaggtaaaggacatggcctgtctatcacacctctgccagctggtcatatgataggtggaacaatatggaaaatagtcaaagatggagaagaagaaattgtttatgcagttgacttcaaccacaagagggagatccatttaaatggatgttccctggaaatgctaagcaggccttccctacttatcacagattcattcaatgctacatatgtacagcctagaagaaaacagagagatgagcagcttctgacaaatgtcctggaaacacttcgaggtgatggaaatgtgttaatagcagtggacacagcaggcagagttttggaacttgctcaacttcttgatcagatttggaggactaaagatgcaggattgggtgtttactcattggcactcctaaataatgtcagttacaatgtggtggagttttctaagtcccaggtagaatggatgagtgataaattgatgagatgttttgaagacaaaagaaataatccgtttcagtttcgccatctctctttatgtcatggtctttctgacttggcccgtgtacctagccctaaagttgtacttgccagccaacctgacctggaatgcggattttcaagggatctctttattcagtggtgtcaggaccctaaaaactcaatcattctaacctacagaactactcctgggactttagcacgtttcctaattgataatccttctgaaaaaattacagaaatagagttgaggaaacgtgtgaagcttgaagggaaagaacttgaagaatacttggaaaaagagaaactaaagaaagaagctgccaaaaagcttgagcagtcaaaagaggcagatatagattccagtgatgagagtgatattgaggaagatattgaccagccatcagctcataagacgaagcatgacttgatgatgaaaggtgaaggcagtcgtaaaggaagttttttcaaacaggcaaaaaagtcctatcctatgtttcctgccccagaagaaagaattaaatgggatgaatatggagagattatcaaagcccgggttacctacatagactatgaaggacgctctgatggggattccattaaaaaaatcattaatcagatgaaaccacgacagttgatcatcgtccatggcccaccagaggccagtcaagatctggcagagtgctgtcgcgcctttggtgggaaagatattaaagtgtacatgccaaagctacatgaaacagttgatgccactagtgaaactcacatctaccaggtgaggttaaaagactcacttgtcagctctcttcagttttgtaaggcaaaagatgctgaattagcttggatagatggtgtcttagatatgagagtttccaaagtggacacaggggttattttagaagaaggagaactaaaggatgatggagaagactcagagatgcaagtggaagctccctcagattctagcgttatagcacaacaaaaggccatgaaaagtctgttcggagatgatgaaaaagaaacaggtgaagaaagtgagatcattcctactttggaacccttgccacctcatgaggttcctggacatcagtcagtttttatgaatgaaccaaggctgtcagacttcaagcaagttctcttacgggaggggattcaagctgaatttgtaggaggtgtacttgtttgcaacaatcaagtagcagtccgcagaacggaaactggacgcattggattagaaggctgcctttgtcaagatttttataggataagagaccttttatatgaacaatatgccattgtataaaggacatgatgtcaagaagtatctgcttgacctttctaagaaaaagggattcttatcttactctgagcttttgatgttttgttttgtaacatacaaaaagaatctgccagaaaaacttacatgtatcagatttttaaaaatataaatagagaacattttgcaaatgctcaaatgagcattctatcttttggctttcagagtgatagagctcctaacaggtgtacaggcccaagagttgaaggtgattggttttctttacagactccttgttctctagaagggctttttacttgaataaaacaatgcaacttagcaaaccaatttatggccttagagaaacatttttgcatgagttcttacaaactgtttgttatattttctggaatgataagtgagaattatttagaaaagacatgctccaaaaaaaaaacaaaactgataaaacagtttttcgaaacttacttttaaaagcatacgtgctatgactctctccagtttgaatatgcaattgttttcacaggcaggatgtctgttttctgcctgtatttcccagtgatttactctagggtaaggtagtacacatttggttcagaaattaatttttatttctcctatatcttgttttatcaagattttgttgtggcatttcaatgtaaattataacaccatcatttgagtatacataattcaaaagaactacttgatgcagtatagtcttaagggttctgcatacattttagaaacatcttagccgtaagttaggtcctgtgttaaactgtttagtgctctgtttttaagaaaacaaatgttgaacctcacacttttatgtggtgacagtgtaatttaattaaaaggtgtaaatgttttcatctcttaggcttgctgtctcctaaggtcacccaagcagtggttggattttatacacattactactaaaataatactgaagttggataaggttatcctttctgtatttgcgtctttcttgtgactaaccaccctgatatagtattaaccactgtgttcaagagtaaaaacaatatatgcaattttcattgaacttaaagagtgaaaaccatgtaaactattgaaactattgtaatccattaatgcttttttagaatggcagaccttgatgtttatttctcaaatggttaagccctcttctttactcttaatttttttttgagacagagtcacccaggctggagtgcagtggtgagattttggctcactataacctcttcctccagggttcaagtgattctcccacctcagcctcccaagtagctgggactacgggcacatgccactgcacctggctaatttttatatttttggtagagacagggtttcaccatgttggccaggctggtctcaaactcctgacctcaagcgatccacccacctaggcctcccaaagtgctgggattacaggcatgaatcaccacaactagcctacccttagatttttggaaggatcgatcttatttaactatgtgtggaacaacccagtaatatcagactcgaattactatttcattctatttcaaatgcttataaagctactattgtagattatagtgttaatgcaaagtttacagacttttgatatggaaaaccagataaaacaacaatgttacaaaaggcaaatataaagagtatgttttctttttagtgctttggaaaaatttcacttaaactcttattactgtatagattaagccctataatgctatttatattccaggggaacgaaaatctgaatttgttttatgatttaaagcatctggtttgcatattgtattgtaatactgatacagtttggctgtgtccccaccaaattgaattgtgttaatagttcccataatccctacgtgttgtgggagggacccagtgggcagtaatttaatcatggtggtggttaccctcatgctgttcttgtgatggtgagttctcatgagatctgatgggtgtttttttttgttttgttttttgttttttgagatggagttttgctcttgttgcccagactggagtgcaatggcacacgatctcggctcaccgcaacctctgcctcctgggttcaagcgattctcctgcctcagcatctcgagtagctgggattacaggcatgcaccaccacgcccagctaattttgtatttttagtagagacggggtttctccatgttggttaggctggcctcaaactcccgacctcaggtgatccgcccgcctgggcctcccaaagtgctgggattacaggcgtgagccactgctcctggcccaagatctgatggttttgtaagggaattttccccctttgcttggcacttcttcctgctgccatgtgaagaaggatgtgtttgcttccccttccaccatgattgtaagtttcatgaggcctccccagcctgtgggactgtgagtcaattaaacgtgtttactttataaattacccagtctcaggcaattctttatagcagtgtgagaacagactaatatgaataccaatactgaaaaattgtttcttgcctcaccttgtcctatgaacaggaattaaattttaaagtattgccttaagatggctgtgctaaataataatcattgcaagagcaatacttttacctgtttctagatgacaatattactaaaatttctcaaatgaagactttgttttagcttcaattacttcagaaaatataaattttaaagatgactatgagataaatcatgaactcagtggaattttcagatgagatggggcgcgttcagggtggtatgactgtagacggaattttcagatctttgttatttagaagcaagtataggtataacgtggactatcaactgatatctgcaaataatttggttaaaatgaaatttgattgtagtatttgttgctgtaggattataaatgtcaaatatcattgtaaacatttctatatttttagaaatatcttgggtggcctgaaacagaagtgaggaaatcaattttttaaggtgagccatttggcttttttaaaaaattgaga

SEQ ID NO: 415718 - DNA, 3620 bp, Homo sapiens
gtttcatgtagctttggcatgtacagttgatgccacaagtgagtcttttaacctcacctggtagatgtgagtttcactagtggcatcaactgttttgtaaggcaaaagatgctgaattagcttggatagatggtgtcttagatatgagagtttccaaagtggacacaggggttattttagaagaaggagaactaaaggatgatggagaagactcagagatgcaagtggaagctccctcagattctagcgttatagcacaacaaaaggccatgaaaagtctgttcggagatgatgaaaaagaaacaggtgaagaaagtgagatcattcctactttggaacccttgccacctcatgaggttcctggacatcagtcagtttttatgaatgaaccaaggctgtcagacttcaagcaagttctcttacgggaggggattcaagctgaatttgtaggaggtgtacttgtttgcaacaatcaagtagcagtccgcagaacggaaactggacgcattggattagaaggctgcctttgtcaagatttttataggataagagaccttttatatgaacaatatgccattgtataaaggacatgatgtcaagaagtatctgcttgacctttctaagaaaaagggattcttatcttactctgagcttttgatgttttgttttgtaacatacaaaaagaatctgccagaaaaacttacatgtatcagatttttaaaaatataaatagagaacattttgcaaatgctcaaatgagcattctatcttttggctttcagagtgatagagctcctaacaggtgtacaggcccaagagttgaaggtgattggttttctttacagactccttgttctctagaagggctttttacttgaataaaacaatgcaacttagcaaaccaatttatggccttagagaaacatttttgcatgagttcttacaaactgtttgttatattttctggaatgataagtgagaattatttagaaaagacatgctccaaaaaaaaaacaaaactgataaaacagtttttcgaaacttacttttaaaagcatacgtgctatgactctctccagtttgaatatgcaattgttttcacaggcaggatgtctgttttctgcctgtatttcccagtgatttactctagggtaaggtagtacacatttggttcagaaattaatttttatttctcctatatcttgttttatcaagattttgttgtggcatttcaatgtaaattataacaccatcatttgagtatacataattcaaaagaactacttgatgcagtatagtcttaagggttctgcatacattttagaaacatcttagccgtaagttaggtcctgtgttaaactgtttagtgctctgtttttaagaaaacaaatgttgaacctcacacttttatgtggtgacagtgtaatttaattaaaaggtgtaaatgttttcatctcttaggcttgctgtctcctaaggtcacccaagcagtggttggattttatacacattactactaaaataatactgaagttggataaggttatcctttctgtatttgcgtctttcttgtgactaaccaccctgatatagtattaaccactgtgttcaagagtaaaaacaatatatgcaattttcattgaacttaaagagtgaaaaccatgtaaactattgaaactattgtaatccattaatgcttttttagaatggcagaccttgatgtttatttctcaaatggttaagccctcttctttactcttaatttttttttgagacagagtcacccaggctggagtgcagtggtgagattttggctcactataacctcttcctccagggttcaagtgattctcccacctcagcctcccaagtagctgggactacgggcacatgccactgcacctggctaatttttatatttttggtagagacagggtttcaccatgttggccaggctggtctcaaactcctgacctcaagcgatccacccacctaggcctcccaaagtgctgggattacaggcatgaatcaccacaactagcctacccttagatttttggaaggatcgatcttatttaactatgtgtggaacaacccagtaatatcagactcgaattactatttcattctatttcaaatgcttataaagctactattgtagattatagtgttaatgcaaagtttacagacttttgatatggaaaaccagataaaacaacaatgttacaaaaggcaaatataaagagtatgttttctttttagtgctttggaaaaatttcacttaaactcttattactgtatagattaagccctataatgctatttatattccaggggaacgaaaatctgaatttgttttatgatttaaagcatctggtttgcatattgtattgtaatactgatacagtttggctgtgtccccaccaaattgaattgtgttaatagttcccataatccctacgtgttgtgggagggacccagtgggcagtaatttaatcatggtggtggttaccctcatgctgttcttgtgatggtgagttctcatgagatctgatgggtgtttttttttgttttgttttttgttttttgagatggagttttgctcttgttgcccagactggagtgcaatggcacacgatctcggctcaccgcaacctctgcctcctgggttcaagcgattctcctgcctcagcatctcgagtagctgggattacaggcatgcaccaccacgcccagctaattttgtatttttagtagagacggggtttctccatgttggttaggctggcctcaaactcccgacctcaggtgatccgcccgcctgggcctcccaaagtgctgggattacaggcgtgagccactgctcctggcccaagatctgatggttttgtaagggaattttccccctttgcttggcacttcttcctgctgccatgtgaagaaggatgtgtttgcttccccttccaccatgattgtaagtttcatgaggcctccccagcctgtgggactgtgagtcaattaaacgtgtttactttataaattacccagtctcaggcaattctttatagcagtgtgagaacagactaatatgaataccaatactgaaaaattgtttcttgcctcaccttgtcctatgaacaggaattaaattttaaagtattgccttaagatggctgtgctaaataataatcattgcaagagcaatacttttacctgtttctagatgacaatattactaaaatttctcaaatgaagactttgttttagcttcaattacttcagaaaatataaattttaaagatgactatgagataaatcatgaactcagtggaattttcagatgagatggggcgcgttcagggtggtatgactgtagacggaattttcagatctttgttatttagaagcaagtataggtataacgtggactatcaactgatatctgcaaataatttggttaaaatgaaatttgattgtagtatttgttgctgtaggattataaatgtcaaatatcattgtaaacatttctatatttttagaaatatcttgggtggcctgaaacagaagtgaggaaatcaattttttaaggtgagccatttggcttttttaaaaaattgaga

SEQ ID NO: 415719 - DNA, 1778 bp, Homo sapiens
ctccccctcccaagtagctgggactactagtcccccacgtagctgggactaacaccacatctggctaatttttatatttttggtagagacagggtttcaccatgttggccaggctggtctcaaactcctgacctcaagcgatccacccacctaggcctcccaaagtgctgggattacaggcatgaatcaccacaactagcctacccttagatttttggaaggatcgatcttatttaactatgtgtggaacaacccagtaatatcagactcgaattactatttcattctatttcaaatgcttataaagctactattgtagattatagtgttaatgcaaagtttacagacttttgatatggaaaaccagataaaacaacaatgttacaaaaggcaaatataaagagtatgttttctttttagtgctttggaaaaatttcacttaaactcttattactgtatagattaagccctataatgctatttatattccaggggaacgaaaatctgaatttgttttatgatttaaagcatctggtttgcatattgtattgtaatactgatacagtttggctgtgtccccaccaaattgaattgtgttaatagttcccataatccctacgtgttgtgggagggacccagtgggcagtaatttaatcatggtggtggttaccctcatgctgttcttgtgatggtgagttctcatgagatctgatgggtgtttttttttgttttgttttttgttttttgagatggagttttgctcttgttgcccagactggagtgcaatggcacacgatctcggctcaccgcaacctctgcctcctgggttcaagcgattctcctgcctcagcatctcgagtagctgggattacaggcatgcaccaccacgcccagctaattttgtatttttagtagagacggggtttctccatgttggttaggctggcctcaaactcccgacctcaggtgatccgcccgcctgggcctcccaaagtgctgggattacaggcgtgagccactgctcctggcccaagatctgatggttttgtaagggaattttccccctttgcttggcacttcttcctgctgccatgtgaagaaggatgtgtttgcttccccttccaccatgattgtaagtttcatgaggcctccccagcctgtgggactgtgagtcaattaaacgtgtttactttataaattacccagtctcaggcaattctttatagcagtgtgagaacagactaatatgaataccaatactgaaaaattgtttcttgcctcaccttgtcctatgaacaggaattaaattttaaagtattgccttaagatggctgtgctaaataataatcattgcaagagcaatacttttacctgtttctagatgacaatattactaaaatttctcaaatgaagactttgttttagcttcaattacttcagaaaatataaattttaaagatgactatgagataaatcatgaactcagtggaattttcagatgagatggggcgcgttcagggtggtatgactgtagacggaattttcagatctttgttatttagaagcaagtataggtataacgtggactatcaactgatatctgcaaataatttggttaaaatgaaatttgattgtagtatttgttgctgtaggattataaatgtcaaatatcattgtaaacatttctatatttttagaaatatcttgggtggcctgaaacagaagtgaggaaatcaattttttaaggtgagccatttggcttttttaaaaaattgaga

SEQ ID NO: 415720 - DNA, 1640 bp, Homo sapiens
gtgtggcgatctagaggatcccgtctgtgctgggattacaggcatgaatcaccacaactagcctacccttagatttttggaaggatcgatcttatttaactatgtgtggaacaacccagtaatatcagactcgaattactatttcattctatttcaaatgcttataaagctactattgtagattatagtgttaatgcaaagtttacagacttttgatatggaaaaccagataaaacaacaatgttacaaaaggcaaatataaagagtatgttttctttttagtgctttggaaaaatttcacttaaactcttattactgtatagattaagccctataatgctatttatattccaggggaacgaaaatctgaatttgttttatgatttaaagcatctggtttgcatattgtattgtaatactgatacagtttggctgtgtccccaccaaattgaattgtgttaatagttcccataatccctacgtgttgtgggagggacccagtgggcagtaatttaatcatggtggtggttaccctcatgctgttcttgtgatggtgagttctcatgagatctgatgggtgtttttttttgttttgttttttgttttttgagatggagttttgctcttgttgcccagactggagtgcaatggcacacgatctcggctcaccgcaacctctgcctcctgggttcaagcgattctcctgcctcagcatctcgagtagctgggattacaggcatgcaccaccacgcccagctaattttgtatttttagtagagacggggtttctccatgttggttaggctggcctcaaactcccgacctcaggtgatccgcccgcctgggcctcccaaagtgctgggattacaggcgtgagccactgctcctggcccaagatctgatggttttgtaagggaattttccccctttgcttggcacttcttcctgctgccatgtgaagaaggatgtgtttgcttccccttccaccatgattgtaagtttcatgaggcctccccagcctgtgggactgtgagtcaattaaacgtgtttactttataaattacccagtctcaggcaattctttatagcagtgtgagaacagactaatatgaataccaatactgaaaaattgtttcttgcctcaccttgtcctatgaacaggaattaaattttaaagtattgccttaagatggctgtgctaaataataatcattgcaagagcaatacttttacctgtttctagatgacaatattactaaaatttctcaaatgaagactttgttttagcttcaattacttcagaaaatataaattttaaagatgactatgagataaatcatgaactcagtggaattttcagatgagatggggcgcgttcagggtggtatgactgtagacggaattttcagatctttgttatttagaagcaagtataggtataacgtggactatcaactgatatctgcaaataatttggttaaaatgaaatttgattgtagtatttgttgctgtaggattataaatgtcaaatatcattgtaaacatttctatatttttagaaatatcttgggtggcctgaaacagaagtgaggaaatcaattttttaaggtgagccatttggcttttttaaaaaattgaga

SEQ ID NO: 415721 - DNA, 822 bp, Homo sapiens
ggctttgttaaataatgttaaataatggggtaaaatttagaataacaacttggaatgtgatttacagtcttgaaatgatctgtcaaaggacttcagggaataatagaaaatctcttagagataatgtagtattttactttattcagtacagttgtatgtctggtgttttacttgaagttattctttcccctttgaccttatctaaggttcctggacatcagtcagtttttatgaatgaaccaaggctgtcagacttcaagcaagttctcttacgggaggggattcaagctgaatttgtaggaggtgtacttgtttgcaacaatcaagtagcagtccgcagagtaagtgtgttttcaataagggctgaattgaacacatacgtctgatgttttgtcattttgaaattctgtaattcttgtttggtattttcacaaaactgaagatcagtaatttatattcatgatcatgacctcaaaggcttacagaagtcttattgacttgaaggcttatgaaagactcttgaagaaatgatatataattttattgtaaattttaattatttgaatcttctgacatttatgtctatgtaaaattcatgacttcaatattatatccatatgctgtgaatcagagcaacccatgtcctgaccaatcataaagtaatctatttcatatatttcggttattatgtctgcatattaatgaatagaaaatgtactaaagaattttttttatttggtttctagacggaaactggacgcattggattagaaggctgcctttgtcaagatttttataggataagagaccttttatatgaac

SEQ ID NO: 415722 - DNA, 5803 bp, Homo sapiens
ctcctctcattttttttttttttagcttccaaacattaccaataatttctgaataaaatttcgctccagacagacgaggcgtgcaggcgtgaccccgtcgccttccgacagcaccgtgcccaccccccggagatggtctcgccctggttcctcctcgtctccgccgctagtctccagctccaaaatggcggctgccactgtggggcttctgccggccggtagtccctggcgctgctgacccagcatcggcttttctacgtcttgaacctggattcgcctaggggttgggaagggctgtggacggcgttgggggaggcctgacgagattaataaagaactcttcagaattcctggtgtttcatcatatatacgactaagatatcaactcttctagcttgctgtttctggaccaaaaaaaatgacgtctattatcaaattaactaccctttctggggtccaagaagaatctgccctttgctatcttctccaagttgatgagtttagatttttattggactgtggctgggatgagcacttttctatggatattattgattccctgaggaagcatgttcaccagattgatgcagtgctgttgtctcaccctgatcctctccaccttggtgccctcccgtatgctgtcggaaagttgggtctgaactgtgctatctatgcaaccattcctgtttataaaatgggacagatgttcatgtatgatctttatcagtctcgacacaatacagaagattttacactctttacattagatgatgtggatgcagcctttgataaaatacagcagctaaaattctctcagattgtgaatttgaaaggtaaaggacatggcctgtctatcacacctctgccagctggtcatatgataggtggaacaatatggaaaatagtcaaagatggagaagaagaaattgtttatgcagttgacttcaaccacaagagggagatccatttaaatggatgttccctggaaatgctaagcaggccttccctacttatcacagattcattcaatgctacatatgtacagcctagaagaaaacagagagatgagcagcttctgacaaatgtcctggaaacacttcgaggtgatggaaatgtgttaatagcagtggacacagcaggcagagttttggaacttgctcaacttcttgatcagatttggaggactaaagatgcaggattgggtgtttactcattggcactcctaaataatgtcagttacaatgtggtggagttttctaagtcccaggtagaatggatgagtgataaattgatgagatgttttgaagacaaaagaaataatccgtttcagtttcgccatctctctttatgtcatggtctttctgacttggcccgtgtacctagccctaaagttgtacttgccagccaacctgacctggaatgcggattttcaagggatctctttattcagtggtgtcaggaccctaaaaactcaatcattctaacctacagaactactcctgggactttagcacgtttcctaattgataatccttctgaaaaaattacagaaatagagttgaggaaacgtgtgaagcttgaagggaaagaacttgaagaatacttggaaaaagagaaactaaagaaagaagctgccaaaaagcttgagcagtcaaaagaggcagatatagattccagtgatgagagtgatattgaggaagatattgaccagccatcagctcataagacgaagcatgacttgatgatgaaaggtgaaggcagtcgtaaaggaagttttttcaaacaggcaaaaaagtcctatcctatgtttcctgccccagaagaaagaattaaatgggatgaatatggagagattatcaaaccagaggatttcttagtgccagagcttcaagctactgaagaagaaaaaagcaaattagaatctggtttgacaaatggagatgaacctatggatcaggatttatctgatgttcctactaaatgtatttctacaacagagtctattgaaataaaagcccgggttacctacatagactatgaaggacgctctgatggggattccattaaaaaaatcattaatcagatgaaaccacgacagttgatcatcgtccatggcccaccagaggccagtcaagatctggcagagtgctgtcgcgcctttggtgggaaagatattaaagtgtacatgccaaagctacatgaaacagttgatgccactagtgaaactcacatctaccaggtgaggttaaaagactcacttgtcagctctcttcagttttgtaaggcaaaagatgctgaattagcttggatagatggtgtcttagatatgagagtttccaaagtggacacaggggttattttagaagaaggagaactaaaggatgatggagaagactcagagatgcaagtggaagctccctcagattctagcgttatagcacaacaaaaggccatgaaaagtctgttcggagatgatgaaaaagaaacaggtgaagaaagtgagatcattcctactttggaacccttgccacctcatgaggttcctggacatcagtcagtttttatgaatgaaccaaggctgtcagacttcaagcaagttctcttacgggaggggattcaagctgaatttgtaggaggtgtacttgtttgcaacaatcaagtagcagtccgcagaacggaaactggacgcattggattagaaggctgcctttgtcaagatttttataggataagagaccttttatatgaacaatatgccattgtataaaggacatgatgtcaagaagtatctgcttgacctttctaagaaaaagggattcttatcttactctgagcttttgatgttttgttttgtaacatacaaaaagaatctgccagaaaaacttacatgtatcagatttttaaaaatataaatagagaacattttgcaaatgctcaaatgagcattctatcttttggctttcagagtgatagagctcctaacaggtgtacaggcccaagagttgaaggtgattggttttctttacagactccttgttctctagaagggctttttacttgaataaaacaatgcaacttagcaaaccaatttatggccttagagaaacatttttgcatgagttcttacaaactgtttgttatattttctggaatgataagtgagaattatttagaaaagacatgctccaaaaaaaaaacaaaactgataaaacagtttttcgaaacttacttttaaaagcatacgtgctatgactctctccagtttgaatatgcaattgttttcacaggcaggatgtctgttttctgcctgtatttcccagtgatttactctagggtaaggtagtacacatttggttcagaaattaatttttatttctcctatatcttgttttatcaagattttgttgtggcatttcaatgtaaattataacaccatcatttgagtatacataattcaaaagaactacttgatgcagtatagtcttaagggttctgcatacattttagaaacatcttagccgtaagttaggtcctgtgttaaactgtttagtgctctgtttttaagaaaacaaatgttgaacctcacacttttatgtggtgacagtgtaatttaattaaaaggtgtaaatgttttcatctcttaggcttgctgtctcctaaggtcacccaagcagtggttggattttatacacattactactaaaataatactgaagttggataaggttatcctttctgtatttgcgtctttcttgtgactaaccaccctgatatagtattaaccactgtgttcaagagtaaaaacaatatatgcaattttcattgaacttaaagagtgaaaaccatgtaaactattgaaactattgtaatccattaatgcttttttagaatggcagaccttgatgtttatttctcaaatggttaagccctcttctttactcttaatttttttttgagacagagtcacccaggctggagtgcagtggtgagattttggctcactataacctcttcctccagggttcaagtgattctcccacctcagcctcccaagtagctgggactacgggcacatgccactgcacctggctaatttttatatttttggtagagacagggtttcaccatgttggccaggctggtctcaaactcctgacctcaagcgatccacccacctaggcctcccaaagtgctgggattacaggcatgaatcaccacaactagcctacccttagatttttggaaggatcgatcttatttaactatgtgtggaacaacccagtaatatcagactcgaattactatttcattctatttcaaatgcttataaagctactattgtagattatagtgttaatgcaaagtttacagacttttgatatggaaaaccagataaaacaacaatgttacaaaaggcaaatataaagagtatgttttctttttagtgctttggaaaaatttcacttaaactcttattactgtatagattaagccctataatgctatttatattccaggggaacgaaaatctgaatttgttttatgatttaaagcatctggtttgcatattgtattgtaatactgatacagtttggctgtgtccccaccaaattgaattgtgttaatagttcccataatccctacgtgttgtgggagggacccagtgggcagtaatttaatcatggtggtggttaccctcatgctgttcttgtgatggtgagttctcatgagatctgatgggtgtttttttttgttttgttttttgttttttgagatggagttttgctcttgttgcccagactggagtgcaatggcacacgatctcggctcaccgcaacctctgcctcctgggttcaagcgattctcctgcctcagcatctcgagtagctgggattacaggcatgcaccaccacgcccagctaattttgtatttttagtagagacggggtttctccatgttggttaggctggcctcaaactcccgacctcaggtgatccgcccgcctgggcctcccaaagtgctgggattacaggcgtgagccactgctcctggcccaagatctgatggttttgtaagggaattttccccctttgcttggcacttcttcctgctgccatgtgaagaaggatgtgtttgcttccccttccaccatgattgtaagtttcatgaggcctccccagcctgtgggactgtgagtcaattaaacgtgtttactttataaattacccagtctcaggcaattctttatagcagtgtgagaacagactaatatgaataccaatactgaaaaattgtttcttgcctcaccttgtcctatgaacaggaattaaattttaaagtattgccttaagatggctgtgctaaataataatcattgcaagagcaatacttttacctgtttctagatgacaatattactaaaatttctcaaatgaagactttgttttagcttcaattacttcagaaaatataaattttaaagatgactatgagataaatcatgaactcagtggaattttcagatgagatggggcgcgttcagggtggtatgactgtagacggaattttcagatctttgttatttagaagcaagtataggtataacgtggactatcaactgatatctgcaaataatttggttaaaatgaaatttgattgtagtatttgttgctgtaggattataaatgtcaaatatcattgtaaacatttctatatttttagaaatatcttgggtggcctgaaacagaagtgaggaaatcaattttttaaggtgagccatttggcttttttaaaaaattgaga

SEQ ID NO: 415723 - DNA, 5224 bp, Homo sapiens
ctcctctcattttttttttttttagcttccaaacattaccaataatttctgaataaaatttcgctccagacagacgaggcgtgcaggcgtgaccccgtcgccttccgacagcaccgtgcccaccccccggagatggtctcgccctggttcctcctcgtctccgccgctagtctccagctccaaaatggcggctgccactgtggggcttctgccggccggtagtccctggcgctgctgacccagcatcggcttttctacgtcttgaacctggattcgcctaggggttgggaagggctgtggacggcgttgggggaggcctgacgagattaataaagaactcttcagaattcctggtgtttcatcatatatacgactaagatatcaactcttctagcttgctgtttctggaccaaaaaaaatgacgtctattatcaaattaactaccctttctggggtccaagaagaatctgccctttgctatcttctccaagttgatgagtttagatttttattggactgtggctgggatgagcacttttctatggatattattgattccctgaggaagcatgttcaccagattgatgcagtgctgttgtctcaccctgatcctctccaccttggtgccctcccgtatgctgtcggaaagttgggtctgaactgtgctatctatgcaaccattcctgtttataaaatgggacagatgttcatgtatgatctttatcagtctcgacacaatacagaagattttacactctttacattagatgatgtggatgcagcgattgggtgtttactcattggcactcctaaataatgtcagttacaatgtggtggagttttctaagtcccaggtagaatggatgagtgataaattgatgagatgttttgaagacaaaagaaataatccgtttcagtttcgccatctctctttatgtcatggtctttctgacttggcccgtgtacctagccctaaagttgtacttgccagccaacctgacctggaatgcggattttcaagggatctctttattcagtggtgtcaggaccctaaaaactcaatcattctaacctacagaactactcctgggactttagcacgtttcctaattgataatccttctgaaaaaattacagaaatagagttgaggaaacgtgtgaagcttgaagggaaagaacttgaagaatacttggaaaaagagaaactaaagaaagaagctgccaaaaagcttgagcagtcaaaagaggcagatatagattccagtgatgagagtgatattgaggaagatattgaccagccatcagctcataagacgaagcatgacttgatgatgaaaggtgaaggcagtcgtaaaggaagttttttcaaacaggcaaaaaagtcctatcctatgtttcctgccccagaagaaagaattaaatgggatgaatatggagagattatcaaaccagaggatttcttagtgccagagcttcaagctactgaagaagaaaaaagcaaattagaatctggtttgacaaatggagatgaacctatggatcaggatttatctgatgttcctactaaatgtatttctacaacagagtctattgaaataaaagcccgggttacctacatagactatgaaggacgctctgatggggattccattaaaaaaatcattaatcagatgaaaccacgacagttgatcatcgtccatggcccaccagaggccagtcaagatctggcagagtgctgtcgcgcctttggtgggaaagatattaaagtgtacatgccaaagctacatgaaacagttgatgccactagtgaaactcacatctaccaggtgaggttaaaagactcacttgtcagctctcttcagttttgtaaggcaaaagatgctgaattagcttggatagatggtgtcttagatatgagagtttccaaagtggacacaggggttattttagaagaaggagaactaaaggatgatggagaagactcagagatgcaagtggaagctccctcagattctagcgttatagcacaacaaaaggccatgaaaagtctgttcggagatgatgaaaaagaaacaggtgaagaaagtgagatcattcctactttggaacccttgccacctcatgaggttcctggacatcagtcagtttttatgaatgaaccaaggctgtcagacttcaagcaagttctcttacgggaggggattcaagctgaatttgtaggaggtgtacttgtttgcaacaatcaagtagcagtccgcagaacggaaactggacgcattggattagaaggctgcctttgtcaagatttttataggataagagaccttttatatgaacaatatgccattgtataaaggacatgatgtcaagaagtatctgcttgacctttctaagaaaaagggattcttatcttactctgagcttttgatgttttgttttgtaacatacaaaaagaatctgccagaaaaacttacatgtatcagatttttaaaaatataaatagagaacattttgcaaatgctcaaatgagcattctatcttttggctttcagagtgatagagctcctaacaggtgtacaggcccaagagttgaaggtgattggttttctttacagactccttgttctctagaagggctttttacttgaataaaacaatgcaacttagcaaaccaatttatggccttagagaaacatttttgcatgagttcttacaaactgtttgttatattttctggaatgataagtgagaattatttagaaaagacatgctccaaaaaaaaaacaaaactgataaaacagtttttcgaaacttacttttaaaagcatacgtgctatgactctctccagtttgaatatgcaattgttttcacaggcaggatgtctgttttctgcctgtatttcccagtgatttactctagggtaaggtagtacacatttggttcagaaattaatttttatttctcctatatcttgttttatcaagattttgttgtggcatttcaatgtaaattataacaccatcatttgagtatacataattcaaaagaactacttgatgcagtatagtcttaagggttctgcatacattttagaaacatcttagccgtaagttaggtcctgtgttaaactgtttagtgctctgtttttaagaaaacaaatgttgaacctcacacttttatgtggtgacagtgtaatttaattaaaaggtgtaaatgttttcatctcttaggcttgctgtctcctaaggtcacccaagcagtggttggattttatacacattactactaaaataatactgaagttggataaggttatcctttctgtatttgcgtctttcttgtgactaaccaccctgatatagtattaaccactgtgttcaagagtaaaaacaatatatgcaattttcattgaacttaaagagtgaaaaccatgtaaactattgaaactattgtaatccattaatgcttttttagaatggcagaccttgatgtttatttctcaaatggttaagccctcttctttactcttaatttttttttgagacagagtcacccaggctggtctcaaactcctgacctcaagcgatccacccacctaggcctcccaaagtgctgggattacaggcatgaatcaccacaactagcctacccttagatttttggaaggatcgatcttatttaactatgtgtggaacaacccagtaatatcagactcgaattactatttcattctatttcaaatgcttataaagctactattgtagattatagtgttaatgcaaagtttacagacttttgatatggaaaaccagataaaacaacaatgttacaaaaggcaaatataaagagtatgttttctttttagtgctttggaaaaatttcacttaaactcttattactgtatagattaagccctataatgctatttatattccaggggaacgaaaatctgaatttgttttatgatttaaagcatctggtttgcatattgtattgtaatactgatacagtttggctgtgtccccaccaaattgaattgtgttaatagttcccataatccctacgtgttgtgggagggacccagtgggcagtaatttaatcatggtggtggttaccctcatgctgttcttgtgatggtgagttctcatgagatctgatgggtgtttttttttgttttgttttttgttttttgagatggagttttgctcttgttgcccagactggagtgcaatggcacacgatctcggctcaccgcaacctctgcctcctgggttcaagcgattctcctgcctcagcatctcgagtagctgggattacaggcatgcaccaccacgcccagctaattttgtatttttagtagagacggggtttctccatgttggttaggctggcctcaaactcccgacctcaggtgatccgcccgcctgggcctcccaaagtgctgggattacaggcgtgagccactgctcctggcccaagatctgatggttttgtaagggaattttccccctttgcttggcacttcttcctgctgccatgtgaagaaggatgtgtttgcttccccttccaccatgattgtaagtttcatgaggcctccccagcctgtgggactgtgagtcaattaaacgtgtttactttataaattacccagtctcaggcaattctttatagcagtgtgagaacagactaatatgaataccaatactgaaaaattgtttcttgcctcaccttgtcctatgaacaggaattaaattttaaagtattgccttaagatggctgtgctaaataataatcattgcaagagcaatacttttacctgtttctagatgacaatattactaaaatttctcaaatgaagactttgttttagcttcaattacttcagaaaatataaattttaaagatgactatgagataaatcatgaactcagtggaattttcagatgagatggggcgcgttcagggtggtatgactgtagacggaattttcagatctttgttatttagaagcaagtataggtataacgtggactatcaactgatatctgcaaataatttggttaaaatgaaatttgattgtagtatttgttgctgtaggattataaatgtcaaatatcattgtaaacatttctatatttttagaaatatcttgggtggcctgaaacagaagtgaggaaatcaattttttaaggtgagccatttggcttttttaaaaaattgaga

SEQ ID NO: 415724 - DNA, 3712 bp, Homo sapiens
ctcctctcattttttttttttttagcttccaaacattaccaataatttctgaataaaatttcgctccagacagacgaggcgtgcaggcgtgaccccgtcgccttccgacagcaccgtgcccaccccccggagatggtctcgccctggttcctcctcgtctccgccgctagtctccagctccaaaatggcggctgccactgtggggcttctgccggccggtagtccctggcgctgctgacccagcatcggcttttctacgtcttgaacctggattcgcctaggggttgggaagggctgtggacggcgttgggggaggcctgacgagattaataaagaactcttcagaattcctggtgtttcatcatatatacgactaagatatcaactcttctagcttgctgtttctggaccaaaaaaaatgacgtctattatcaaattaactaccctttctggggtccaagaagaatctgccctttgctatcttctccaagttgatgagtttagatttttattggactgtggctgggatgagcacttttctatggatattattgattccctgaggaagcatgttcaccagattgatgcagtgctgttgtctcaccctgatcctctccaccttggtgccctcccgtatgctgtcggaaagttgggtctgaactgtgctatctatgcaaccattcctgtttataaaatgggacagatgttcatgtatgatctttatcagtctcgacacaatacagaagattttacactctttacattagatgatgtggatgcagcgattgggtgtttactcattggcactcctaaataatgtcagttacaatgtggtggagttttctaagtcccaggtagaatggatgagtgataaattgatgagatgttttgaagacaaaagaaataatccgtttcagtttcgccatctctctttatgtcatggtctttctgacttggcccgtgtacctagccctaaagttgtacttgccagccaacctgacctggaatgcggattttcaagggatctctttattcagtggtgtcaggaccctaaaaactcaatcattctaacctacagaactactcctgggactttagcacgtttcctaattgataatccttctgaaaaaattacagaaatagagttgaggaaacgtgtgaagcttgaagggaaagaacttgaagaatacttggaaaaagagaaactaaagaaagaagctgccaaaaagcttgagcagtcaaaagaggcagatatagattccagtgatgagagtgatattgaggaagatattgaccagccatcagctcataagacgaagcatgacttgatgatgaaaggtgaaggcagtcgtaaaggaagttttttcaaacaggcaaaaaagtcctatcctatgtttcctgccccagaagaaagaattaaatgggatgaatatggagagattatcaaaccagaggatttcttagtgccagagcttcaagctactgaagaagaaaaaagcaaattagaatctggtttgacaaatggagatgaacctatggatcaggatttatctgatgttcctactaaatgtatttctacaacagagtctattgaaataaaagcccgggttacctacatagactatgaaggacgctctgatggggattccattaaaaaaatcattaatcagatgaaaccacgacagttgatcatcgtccatggcccaccagaggccagtcaagatctggcagagtgctgtcgcgcctttggtgggaaagatattaaagtgtacatgccaaagctacatgaaacagttgatgccactagtgaaactcacatctaccaggtgaggttaaaagactcacttgtcagctctcttcagttttgtaaggcaaaagatgctgaattagcttggatagatggtgtcttagatatgagagtttccaaagtggacacaggggttattttagaagaaggagaactaaaggatgatggagaagactcagagatgcaagtggaagctccctcagattctagcgttatagcacaacaaaaggccatgaaaagtctgttcggagatgatgaaaaagaaacaggtgaagaaagtgagatcattcctactttggaacccttgccacctcatgaggttcctggacatcagtcagtttttatgaatgaaccaaggctgtcagacttcaagcaagttctcttacgggaggggattcaagctgaatttgtaggaggtgtacttgtttgcaacaatcaagtagcagtccgcagaacggaaactggacgcattggattagaaggctgcctttgtcaagatttttataggataagagaccttttatatgaacaatatgccattgtataaaggacatgatgtcaagaagtatctgcttgacctttctaagaaaaagggattcttatcttactctgagcttttgatgttttgttttgtaacatacaaaaagaatctgccagaaaaacttacatgtatcagatttttaaaaatataaatagagaacattttgcaaatgctcaaatgagcattctatcttttggctttcagagtgatagagctcctaacaggtgtacaggcccaagagttgaaggtgattggttttctttacagactccttgttctctagaagggctttttacttgaataaaacaatgcaacttagcaaaccaatttatggccttagagaaacatttttgcatgagttcttacaaactgtttgttatattttctggaatgataagtgagaattatttagaaaagacatgctccaaaaaaaaaacaaaactgataaaacagtttttcgaaacttacttttaaaagcatacgtgctatgactctctccagtttgaatatgcaattgttttcacaggcaggatgtctgttttctgcctgtatttcccagtgatttactctagggtaaggtagtacacatttggttcagaaattaatttttatttctcctatatcttgttttatcaagattttgttgtggcatttcaatgtaaattataacaccatcatttgagtatacataattcaaaagaactacttgatgcagtatagtcttaagggttctgcatacattttagaaacatcttagccgtaagttaggtcctgtgttaaactgtttagtgctctgtttttaagaaaacaaatgttgaacctcacacttttatgtggtgacagtgtaatttaattaaaaggtgtaaatgttttcatctcttaggcttgctgtctcctaaggtcacccaagcagtggttggattttatacacattactactaaaataatactgaagttggataaggttaaaaaaaaaaaaaaaaaaaaaaaaaaaaaaaaaaaaaaaaaaaaaaaaaggggggggggctaaaagttttccccgggggggcccaatttaggctgttcaccccgtgtttttgttgttacaaaggggggcgccccttaatggaaggagatgcatatttataagagaaggcaaaggggcgcgcggggttgtaaaaacacggctcgttgacgtggggaaaaactcgctgtcttgggaaatctttggggggagagggaacccttttctttctgtggggtgttgacaaatcttttgggcacttccctcggagaattttaagtctaggcaaatttaacttctgaggtgtatgggtgtaccaagcgttgttgtggtgaaaattgttccgggctatttgaatata

SEQ ID NO: 415725 - DNA, 4591 bp, Homo sapiens
ttattcctagagacagagtcaacctatgttgcccaggctggtcttgaactcctggcctcaagcagtcctcccacagtgctaggattataggtgtgagctactgtgcctggccaaccagtttgatttaaattaaacccattctagatgatgtgtgacagctcaattttaatactaatctaaataggacctataattgtatgtaatggaaacttgattaatttcagaggaaacaatcagtttaaagatgatagagcaatttagagatgtgatgtatctcatatcccactgctttaaccccctaatattaacatattaacatttccttttgtcttttatttttttttagttgaggaaacgtgtgaagcttgaagggaaagaacttgaagaatacttggaaaaagagaaactaaagaaagaagctgccaaaaagcttgagcagtcaaaagaggcagatatagattccagtgatgagagtgatattgaggaagatattgaccagccatcagctcataagacgaagcatgacttgatgatgaaaggtgaaggcagtcgtaaaggaagttttttcaaacaggcaaaaaagtcctatcctatgtttcctgccccagaagaaagaattaaatgggatgaatatggagagattatcaaaccagaggatttcttagtgccagagcttcaagctactgaagaagaaaaaagcaaattagaatctggtttgacaaatggagatgaacctatggatcaggatttatctgatgttcctactaaatgtatttctacaacagagtctattgaaataaaagcccgggttacctacatagactatgaaggacgctctgatggggattccattaaaaaaatcattaatcagatgaaaccacgacagttgatcatcgtccatggcccaccagaggccagtcaagatctggcagagtgctgtcgcgcctttggtgggaaagatattaaagtgtacatgccaaagctacatgaaacagttgatgccactagtgaaactcacatctaccaggtgaggttaaaagactcacttgtcagctctcttcagttttgtaaggcaaaagatgctgaattagcttggatagatggtgtcttagatatgagagtttccaaagtggacacaggggttattttagaagaaggagaactaaaggatgatggagaagactcagagatgcaagtggaagctccctcagattctagcgttatagcacaacaaaaggccatgaaaagtctgttcggagatgatgaaaaagaaacaggtgaagaaagtgagatcattcctactttggaacccttgccacctcatgaggttcctggacatcagtcagtttttatgaatgaaccaaggctgtcagacttcaagcaagttctcttacgggaggggattcaagctgaatttgtaggaggtgtacttgtttgcaacaatcaagtagcagtccgcagaacggaaactggacgcattggattagaaggctgcctttgtcaagatttttataggataagagaccttttatatgaacaatatgccattgtataaaggacatgatgtcaagaagtatctgcttgacctttctaagaaaaagggattcttatcttactctgagcttttgatgttttgttttgtaacatacaaaaagaatctgccagaaaaacttacatgtatcagatttttaaaaatataaatagagaacattttgcaaatgctcaaatgagcattctatcttttggctttcagagtgatagagctcctaacaggtgtacaggcccaagagttgaaggtgattggttttctttacagactccttgttctctagaagggctttttacttgaataaaacaatgcaacttagcaaaccaatttatggccttagagaaacatttttgcatgagttcttacaaactgtttgttatattttctggaatgataagtgagaattatttagaaaagacatgctccaaaaaaaaaacaaaactgataaaacagtttttcgaaacttacttttaaaagcatacgtgctatgactctctccagtttgaatatgcaattgttttcacaggcaggatgtctgttttctgcctgtatttcccagtgatttactctagggtaaggtagtacacatttggttcagaaattaatttttatttctcctatatcttgttttatcaagattttgttgtggcatttcaatgtaaattataacaccatcatttgagtatacataattcaaaagaactacttgatgcagtatagtcttaagggttctgcatacattttagaaacatcttagccgtaagttaggtcctgtgttaaactgtttagtgctctgtttttaagaaaacaaatgttgaacctcacacttttatgtggtgacagtgtaatttaattaaaaggtgtaaatgttttcatctcttaggcttgctgtctcctaaggtcacccaagcagtggttggattttatacacattactactaaaataatactgaagttggataaggttatcctttctgtatttgcgtctttcttgtgactaaccaccctgatatagtattaaccactgtgttcaagagtaaaaacaatatatgcaattttcattgaacttaaagagtgaaaaccatgtaaactattgaaactattgtaatccattaatgcttttttagaatggcagaccttgatgtttatttctcaaatggttaagccctcttctttactcttaatttttttttgagacagagtcacccaggctggagtgcagtggtgagattttggctcactataacctcttcctccagggttcaagtgattctcccacctcagcctcccaagtagctgggactacgggcacatgccactgcacctggctaatttttatatttttggtagagacagggtttcaccatgttggccaggctggtctcaaactcctgacctcaagcgatccacccacctaggcctcccaaagtgctgggattacaggcatgaatcaccacaactagcctacccttagatttttggaaggatcgatcttatttaactatgtgtggaacaacccagtaatatcagactcgaattactatttcattctatttcaaatgcttataaagctactattgtagattatagtgttaatgcaaagtttacagacttttgatatggaaaaccagataaaacaacaatgttacaaaaggcaaatataaagagtatgttttctttttagtgctttggaaaaatttcacttaaactcttattactgtatagattaagccctataatgctatttatattccaggggaacgaaaatctgaatttgttttatgatttaaagcatctggtttgcatattgtattgtaatactgatacagtttggctgtgtccccaccaaattgaattgtgttaatagttcccataatccctacgtgttgtgggagggacccagtgggcagtaatttaatcatggtggtggttaccctcatgctgttcttgtgatggtgagttctcatgagatctgatgggtgtttttttttgttttgttttttgttttttgagatggagttttgctcttgttgcccagactggagtgcaatggcacacgatctcggctcaccgcaacctctgcctcctgggttcaagcgattctcctgcctcagcatctcgagtagctgggattacaggcatgcaccaccacgcccagctaattttgtatttttagtagagacggggtttctccatgttggttaggctggcctcaaactcccgacctcaggtgatccgcccgcctgggcctcccaaagtgctgggattacaggcgtgagccactgctcctggcccaagatctgatggttttgtaagggaattttccccctttgcttggcacttcttcctgctgccatgtgaagaaggatgtgtttgcttccccttccaccatgattgtaagtttcatgaggcctccccagcctgtgggactgtgagtcaattaaacgtgtttactttataaattacccagtctcaggcaattctttatagcagtgtgagaacagactaatatgaataccaatactgaaaaattgtttcttgcctcaccttgtcctatgaacaggaattaaattttaaagtattgccttaagatggctgtgctaaataataatcattgcaagagcaatacttttacctgtttctagatgacaatattactaaaatttctcaaatgaagactttgttttagcttcaattacttcagaaaatataaattttaaagatgactatgagataaatcatgaactcagtggaattttcagatgagatggggcgcgttcagggtggtatgactgtagacggaattttcagatctttgttatttagaagcaagtataggtataacgtggactatcaactgatatctgcaaataatttggttaaaatgaaatttgattgtagtatttgttgctgtaggattataaatgtcaaatatcattgtaaacatttctatatttttagaaatatcttgggtggcctgaaacagaagtgaggaaatcaattttttaaggtgagccatttggcttttttaaaaaattgaga

SEQ ID NO: 415726 - DNA, 229 bp, Homo sapiens
  misc_feature (216)..(216): n is a, c, g, or t
  misc_feature (224)..(224): n is a, c, g, or t
cggagaatgaagatacaattgatgtgttccaacagcagacgggaggtgtctactgaaaagggaacctgcttctttactccagaactctgttctttaaagaccaagattacattctcaattagaaaactgcaatttggttccaccacatcctgactactaccgtatagttttctctattctttcatttccccagcccctcccccggccattcacgcntccggtcnggctg

SEQ ID NO: 415727 - DNA, 413 bp, Homo sapiens
tatagttttctctattctttcatttcccccttccctattcctttattgtacataaagtaactggtatatgtacacaagcatattgcattttttttaactaaacagccaatgatatgttttgattgacatcaagtggagatgggatggggaaaaatactgattctgtgaaaataccccctttctccattagtggcatgctcattcagctcttatctttatattccagtaagttattttgctctcactgttttaacaaaaacaacaacaacaacaacataaaaatccttgcatacctttttcaattggagaattttaatgattttcatttatcattgtaaaaccaaggacaattttataactttttcgtacatagctgctacatgtagggcaatctgtctttaagtagggataaa

SEQ ID NO: 415728 - DNA, 236 bp, Homo sapiens
aagcttcctctcttacaaagactttacctcagcatgccagaaagagtgagcccctacagtgcatgtatatttctgaagattaactagagactaggcaaacactaaattattaagagccaaactgaacaccaataagaaagagaagcaaaattttaaattctaattcaaatgatatactatgatatccacttctaatatattttaagttccagtactgacagtgtttggattttttt

SEQ ID NO: 415729 - DNA, 1484 bp, Homo sapiens
cttcctgtctctccactttctttccctctccgttttggtgggctggttgaagatgaaatccactgaggagggaagtccagcaccctgtgtgccagtccagaactggcccatctgtagaccccctgaaaatcatatgggcttggatttggatattctcaacagaaagggttaaaggctgatggtacctaaagcctggtacttgaattttgatcaagataagctgccttaagttctcttcattacacaaatgatcctagataattgatagatcctgtggttcaactggatttctagatagaagctggattcatgtgatgccagaggagtaaaatttcaagagactgaaaccagatctgagtttcgctgttccagtctggacctctttggtgctgtaaatcctggatatactgtagatgagtactgcgtttttcttttatggactctcttcagcttctggagacctcactatcctattatgtctttgtgtgaagacatgctgctttgtaattatcgaaagtgtcgcatcaaactctctggctatgcatgggtcactgcctgctctcacatcttctgtgatcagcatggcagtggtgagtttagtcgctcaccagctatctgtcctgcctgcaacagtaccctttctggaaagctagatattgtccgcacagaactcagtccatcagaggaatataaagctatggtattggcaggactgcgaccagagatcgtgttggacattagctcccgagcgctggccttctggacatatcaggtacatcaggaacgtctctatcaagaatacaatttcagcaaggctgagggccatctgaaacagatggagaagatatatactcagcaaatacaaagcaaggatgtagaattgacctctatgaaaggggaggttacctccatgaagaaagtactagaagaatacaagaaaaagttcagtgacatctctgagaaacttatggagcgcaatcgtcagtatcaaaagctccaaggcctctatgatagccttaggctacgaaacatcactattgctaaccatgaaggcacccttgaaccatccatgattgcacagtctggtgttcttggcttcccattaggtaacaactccaagtttcctttggataatacacctgttcgaaatcggggcgatggagatggagattttcagttcagaccattttttgcgggttctcccacagcacctgaacccagcaacagcttttttagttttgtctctccaagtcgtgaattagagcagcagcaagtttctagcagggccttcaaagtaaaaagaatttgagccacgcatagtgtcacgcacctgtgatcccagctacttaggaggttgaggctgggaggatcacttgagcccaggagtctgaggctttagtgatctaagatcatgccactgcactccagcctgggcaacagagtgagaccctgtttctaaaaaaaaataaagataatttagctaa

SEQ ID NO: 415730 - DNA, 374 bp, Homo sapiens
tatcccacgccgcaccgccggttcaaaggtccaaggcctctatgatagccttaggctacgaaacatcactattgctaaccatgaaggcacccttgaaccatccatgattgcacagtctggtgttcttggcttcccattaggtaacaactccaagtttcctttggataatacacctgttcgaaatcggggcgatggagatggagattttcagttcagaccattttttgcgggttctcccacagcacctgaacccagcaacagcttttttagttttgtctctccaagtcgtgaattagagcagcagcaagtttctagcagggccttcaaagtaaaaagaatttgaaccgcgtgcgcgtggggatctctagatcgac

SEQ ID NO: 415731 - DNA, 265 bp, Homo sapiens
tataagatctgtctagattcattgggtcctcaattttttgctggctattggccagaggctgttcttagttacttgtctcttgggccttcctgacatgactgcttgcttcctcaaagccagcaagggagtgtgtctcctagtaagacagaccttatagtcttaggtaatatacttatgaagtgacaacctgtcacattttctgtagtattctagtcacaggtcctgcccacgtgcaaggggataggccgaaaattggggagcctca

SEQ ID NO: 415732 - DNA, 1631 bp, Homo sapiens
cttcctgtctctccactttctttccctctccgttttggtgggctggttgaagatgaaatccactgaggagggaagtccagcaccctgtgtgccagtccagaactggcccatctgtagaccccctgaaaatcatatgggcttggatttggatattctcaacagaaagggttaaaggctgatggtacctaaagcctggtacttgaattttgatcaagataagctgccttaagttctcttcattacacaaatgatcctagataattgatagatcctgtggttcaactggatttctagatagaagctggattcatgtgatgccagaggagtaaaatttcaagagactgaaaccagatctgagtttcgctgttccagtctggacctctttggtgctgtaaatcctggatatactgtagatgagtactgcgtttttcttttatggactctcttcagcttctggagacctcactatcctattatgtctttgtgtgaagacatgctgctttgtaattatcgaaagtgtcgcatcaaactctctggctatgcatgggtcactgcctgctctcacatcttctgtgatcagcatggcagtggtgagtttagtcgctcaccagctatctgtcctgcctgcaacagtaccctttctggaaagctagatattgtccgcacagaactcagtccatcagaggaatataaagctatggtattggcaggactgcgaccagagatcgtgttggacattagctcccgagcgctggccttctggacatatcaggtacatcaggaacgtctctatcaagaatacaatttcagcaaggctgagggccatctgaaacagatggagaagatatatactcagcaaatacaaagcaaggatgtagaattgacctctatgaaaggggaggttacctccatgaagaaagtactagaagaatacaagaaaaagttcagtgacatctctgagaaacttatggagcgcaatcgtcagtatcaaaagctccaaggcctctatgatagccttaggctacgaaacatcactattgctaaccatgaaggcacccttgaaccatccatgattgcacagtctggtgttcttggcttcccattaggtaacaactccaagtttcctttggataatacacctgttcgaaatcggggcgatggagatggagattttcagttcagaccattttttgcgggttctcccacagcacctgaacccagcaacagcttttttagttttgtctctccaagtcgtgaattagagcagcagcaagtttctagcagggccttcaaagtaaaaagaatttgagccacgcatagtgtcacgcacctgtgatcccagctacttaggaggttgaggctgggaggatcacttgagcccaggagtctgaggctttagtgatctaagatcatgccactgcactccagcctgggcaacagagtgagaccctgtttctaaaaaaaaataaagataatttagctaactaagctcttaagcacaagcgaacaacacaacacaacacacgcaggactccagagccggggtccgcacaaggggccacgaaatggcccgggctcccaagcgtgcccggacccgattgctgacaacggggaagatcgcgggagtaacc

SEQ ID NO: 415733 - DNA, 1351 bp, Homo sapiens
tataagatctgtctagattcattgggtcctcaattttttgctggctattggccagaggctgttcttagttacttgtctcttgggccttcctgacatgactgcttgcttcctcaaagccagcaagggagtgtgtctcctagtaagacagaccttatagtcttaggtaatatacttatgaagtgacaacctgtcacattttctgtagtattctagtcacaggtcctgcccacgtgcaaggggatagggagttacacaagggtgtatgtaccaggagacgataatttgtggttgtcttagagtctattcttcatgctctggattacttgaaaaatgggattatatttcttaaaaacctttggaaaacatgtcacttgttaagacaaatactcagttcttttggtggtataaagttagtggtttgagagtattcttccagactttttttctatgcatttagtaacataacttattgttttctgtgcctcattgtgtatcctgattgcttcttaaactgggttctaaatgataaaataacatccctatataagcatctttcttttccttttgtgtttgtataacattttacaatatataactttgtacccaataccttaaaaatcttttttcttttggaaccaggtacatcaggaacgtctctatcaagaatacaatttcagcaaggctgagggccatctgaaacagatggagaagatatatactcagcaaatacaaagcaaggatgtagaattgacctctatgaaaggggaggttacctccatgaagaaagtactagaagaatacaagaaaaagttcagtgacatctctgagaaacttatggagcgcaatcgtcagtatcaaaagctccaaggcctctatgatagccttaggctacgaaacatcactattgctaaccatgaaggcacccttgaaccatccatgattgcacagtctggtgttcttggcttcccattaggtaacaactccaagtttcctttggataatacacctgttcgaaatcggggcgatggagatggagattttcagttcagaccattttttgcgggttctcccacagcacctgaacccagcaacagcttttttagttttgtctctccaagtcgtgaattagagcagcagcaagtttctagcagggccttcaaagtaaaaagaatttgagccacgcatagtgtcacgcacctgtgatcccagctacttaggaggttgaggctgggaggatcacttgagcccaggagtctgaggctttagtgatctaagatcatgccactgcactccagcctgggcaacagagtgagaccctgtttctaaaaaaaaataaagataatttagctaa

SEQ ID NO: 415734 - DNA, 1554 bp, Homo sapiens
cttcctgtctctccactttctttccctctccgttttggtgggctggttgaagatgaaatccactgaggagggaagtccagcaccctgtgtgccagtccagaactggcccatctgtagaccccctgaaaatcatatgggcttggatttggatattctcaacagaaagggttaaaggctgatggtacctaaagcctggtacttgaattttgatcaagataagctgccttaagttctcttcattacacaaatgatcctagataattgatagatcctgtggttcaactggatttctagatagaagctggattcatgtgatgccagaggagtaaaatttcaagagactgaaaccagatctgagtttcgctgttccagtctggacctctttggtgctgtaaatcctggatatactgtagatgagtactgcgtttttcttttatggactctcttcagcttctggagacctcactatcctattatgtctttgtgtgaagacatgctgctttgtaattatcgaaagtgtcgcatcaaactctctggctatgcatgggtcactgcctgctctcacatcttctgtgatcagcatggcagtggtgagtttagtcgctcaccagctatctgtcctgcctgcaacagtaccctttctggaaagctagatattgtccgcacagaactcagtccatcagaggaatataaagctatggtattggcaggactgcgaccagagatcgtgttggacattagctcccgagcgctggccttctggacatatcaggctagtctctaactcctgggttcaagccattctcccgcctcagcctcctgagtagcctgtgcttcacttggtacatcaggaacgtctctatcaagaatacaatttcagcaaggctgagggccatctgaaacagatggagaagatatatactcagcaaatacaaagcaaggatgtagaattgacctctatgaaaggggaggttacctccatgaagaaagtactagaagaatacaagaaaaagttcagtgacatctctgagaaacttatggagcgcaatcgtcagtatcaaaagctccaaggcctctatgatagccttaggctacgaaacatcactattgctaaccatgaaggcacccttgaaccatccatgattgcacagtctggtgttcttggcttcccattaggtaacaactccaagtttcctttggataatacacctgttcgaaatcggggcgatggagatggagattttcagttcagaccattttttgcgggttctcccacagcacctgaacccagcaacagcttttttagttttgtctctccaagtcgtgaattagagcagcagcaagtttctagcagggccttcaaagtaaaaagaatttgagccacgcatagtgtcacgcacctgtgatcccagctacttaggaggttgaggctgggaggatcacttgagcccaggagtctgaggctttagtgatctaagatcatgccactgcactccagcctgggcaacagagtgagaccctgtttctaaaaaaaaataaagataatttagctaa

SEQ ID NO: 415735 - DNA, 518 bp, Homo sapiens
tatcccacgccgcaccgccggttcaaaggtccaaggcctctatgatagccttaggctacgaaacatcactattgctaaccatgaaggcacccttgaaccatccatgattgcacagtctggtgttcttggcttcccattaggtaacaactccaagtttcctttggataatacacctgttcgaaatcggggcgatggagatggagattttcagttcagaccattttttgcgggttctcccacagcacctgaacccagcaacagcttttttagttttgtctctccaagtcgtgaattagagcagcagcaagtttctagcagggccttcaaagtaaaaagaatttgagccacgcatagtgtcacgcacctgtgatcccagctacttaggaggttgaggctgggaggatcacttgagcccaggagtctgaggctttagtgatctaagatcatgccactgcactccagcctgggcaacagagtgagaccctgtttctaaaaaaaaataaagataatttagctaa

SEQ ID NO: 415736 - DNA, 845 bp, Homo sapiens
cttcctgtctctccactttctttccctctccgttttggtgggctggttgaagatgaaatccactgaggagggaagtccagcaccctgtgtgccagtccagaactggcccatctgtagaccccctgaaaatcatatgggcttggatttggatattctcaacagaaagggttaaaggctgatggtacctaaagcctggtacttgaattttgatcaagataagctgccttaagttctcttcattacacaaatgatcctagataattgatagatcctgtggttcaactggatttctagatagaagctggattcatgtgatgccagaggagtaaaatttcaagagactgaaaccagatctgagtttcgctgttccagtctggacctctttggtgctgtaaatcctggatatactgtagatgagtactgcgtttttcttttatggactctcttcagcttctggagacctcactatcctattatgtctttgtgtgaagacatgctgctttgtaattatcgaaagtgtcgcatcaaactctctggctatgcatgggtcactgcctgctctcacatcttctgtgatcagcatggcagtggtgagtttagtcgctcaccagctatctgtcctgcctgcaacagtaccctttctggaaagctagatattgtccgcacagaactcagtccatcagaggaatataaagctatggtattggcaggactgcgaccagagatcgtgttggacattagctcccgagcgctggccttctggacatatcagtatttcctttgaaagacctccctgtggatgactttaagcatgtccttgaatgtattgttatatcttacatata

SEQ ID NO: 415737 - DNA, 1038 bp, Homo sapiens
cttcctgtctctccactttctttccctctccgttttggtgggctggttgaagatgaaatccactgaggagggaagtccagcaccctgtgtgccagtccagaactggcccatctgtagaccccctgaaaatcatatgggcttggatttggatattctcaacagaaagggttaaaggctgatggtacctaaagcctggtacttgaattttgatcaagataagctgccttaagttctcttcattacacaaatgatcctagataattgatagatcctgtggttcaactggatttctagatagaagctggattcatgtgatgccagaggagtaaaatttcaagagactgaaaccagatctgagtttcgctgttccagtctggacctctttggtgctgtaaatcctggatatactgtagatgagtactgcgtttttcttttatggactctcttcagcttctggagacctcactatcctattatgtctttgtgtgaagacatgctgctttgtaattatcgaaagtgtcgcatcaaactctctggctatgcatgggtcactgcctgctctcacatcttctgtgatcagcatggcagtggtgagtttagtcgctcaccagctatctgtcctgcctgcaacagtaccctttctggaaagctagatattgtccgcacagaactcagtccatcagaggaatataaagctatggtattggcaggactgcgaccagagatcgtgttggacattagctcccgagcgctggccttctggacatatcagacatcaggaacgtctctatcaagaatacaatttacagccaactgatttttttacaaaagcaccaagaacgtgcattgggaaaaggacactttcttcaataaacgatgctgggaaaattggatatccacatgcagaagaatgaaatctgacccttgtctcaccatatgcaaattcaacttgagatggattaaagacttaagacctgaaattataaaagtactagacagaaaatctacggggaacacttcaggacatcgatctaacaa

SEQ ID NO: 415738 - DNA, 443 bp, Homo sapiens
ctctgaagtagattatatagataacaaatgaataaaattatgtttttcctttttttctgccctaggtaacaactccaagtttcctttggataatacacctgttcgaaatcggggcgatggagatggagattttcagttcagaccattttttgcgggttctcccacagcacctgaacccagcaacagcttttttagttttgtctctccaagtcgtgaattagagcagcagcaagtttctagcagggccttcaaagtaaaaagaatttgagccacgcatagtgtcacgcacctgtgatcccagctacttaggaggttgaggctgggaggatcacttgagcccaggagtctgaggctttagtgatctaagatcatgccactgcactccagcctgggcaacagagtgagaccctgtttctaaaaaaaaataaagataatttagctaa

SEQ ID NO: 415739 - DNA, 2621 bp, Homo sapiens
agctgcttcggaaagcgtgacgaagcagtagtcctcagtgtgtgtgtaagtgaagaggaccttgtggtagcagggaccatgcttcattcgtggctgtgtccccatctgagggcctggtatgcagtaagatcaataaatacttgtggaatgcatgactgctggctgcctgtgtctgcctggtgggagagctgtggaactaggggtccacatgaggacagactactgtggtgctgcctacctgccaggctggcccaccttccccacccccacttgaccttactctcttgaggtcctaaaggtatgattcagacctttcagccctttccagaactttgaccctctggagacagggcggttctgcagggggcggtctagcccctagctttgttctgggcagcccaatcagctctggattgcccgagctgccctgaagagtcagccgaaagagctggaggcttcttccctgtggttgcgggttcctgcattctctgctctaaatcccagcctgcccttggggctgcccacgcccccttcagatcctttgctccggagagagacctgtccgagcagaggcctggactacatctcccggcgtgcctggcagtgtggtggcctctgtgcgccgtctgcactcgttgcaggcgacgatgcagagggctgtaagtgtggtggcccgtctgggctttcgcctgcaggcattccccccggccttgtgtcgtccacttagttgcgcacaggaggtgctccgcaggacaccgctctatgacttccacctggcccacggcgggaaaatggtggcgtttgcgggttggagtctgccagtgcagtaccgggacagtcacactgactcgcacctgcacacacgccagcactgctcgctctttgacgtgtctcatatgctgcagaccaagatacttggtagtgaccgggtgaagctgatggagagtctagtggttggagacattgcagagctaagaccaaaccaggggacactgtcgctgtttaccaacgaggctggaggcatcttagatgacttgattgtaaccaatacttctgagggccacctgtatgtggtgtccaacgctggctgctgggagaaagatttggccctcatgcaggacaaggtcagggagcttcagaaccagggcagagatgtgggcctggaggtgttggataatgccctgctagctctgcaaggccccactgcagcccaggtactacaggccggcgtggcagatgacctgaggaaactgcccttcatgaccagtgctgtgatggaggtgtttggcgtgtctggctgccgcgtgacccgctgtggctacacaggagaggatggtgtggagatctcggtgccggtagcgggggcagttcacctggcaacagctattctgaaaaacccagaggtgaagctggcagggctggcagccagggacagcctgcgcctggaggcaggcctctgcctgtatgggaatgacattgatgaacacactacacctgtggagggcagcctcagttggacactggggaagcgccgccgagctgctatggacttccctggagccaaggtcattgttccccagctgaagggcagggtgcagcggaggcgtgtggggttgatgtgtgagggggcccccatgcgggcacacagtcccatcctgaacatggagggtaccaagattggtactgtgactagtggctgcccctccccctctctgaagaagaatgtggcgatgggttatgtgccctgcgagtacagtcgtccagggacaatgctgctggtagaggtgcggcggaagcagcagatggctgtagtcagcaagatgccctttgtgcccacaaactactataccctcaagtgaagctggctcagggtggggctgtcccttccaggagttttgcccctacaaggggttagtcaagaagctgaggcagaactcactgggggtgggcagttaaggtggaggctgattctaattgtctggttgaggggccacaccacctattccccccacctaactcatgccattccagcttccttcaggaccctgcttctgagtgacggaccagctcacacaatgtcttgtttcagtccatgatcccactgacctactcttgcctgctggagggtaatgagaagctttggttctgccatctctcccactctgccaggtgctggctgtggagcaaaggctcacctttgtggagaggataaaacctgcccaacctacctcaccatggtttttcacattgcaaagggtaataacatgggcagtgcggacttaggctaccccctccagtttgctttccgtaaatgcaaattgtccttactgcaagtcaggaatgattgctgactcacagtagggctgctatgcctgtgtgtaaacttggggatggctgagggaacatagactcactcttccacattcccaagttggtctagtgtgctgcccagtagcaaaccatggcagactcaccacctattctgagttccagggctgctgtagggcagggtgggcttcctcccagacttgccttaccctgggctgatctttgcccctggtatgcattaatggactccactgaatcctgaaaaaaaaattaaacttccttcttacttgcca

SEQ ID NO: 415740 - DNA, 2374 bp, Homo sapiens
agctgcttcggaaagcgtgacgaagcagtagtcctcagtgtgtgtgtaagtgaagaggaccttgtggtagcagggaccatgcttcattcgtggctgtgtccccatctgagggcctggtatgcagtaagatcaataaatacttgtggaatgcatgactgctggctgcctgtgtctgcctggtgggagagctgtggaactaggggtccacatgaggacagactactgtggtgctgcctacctgccaggctggcccaccttccccacccccacttgaccttactctcttgaggtcctaaaggtatgattcagacctttcagccctttccagaactttgaccctctggagacagggcggttctgcagggggcggtctagcccctagctttgttctgggcagcccaatcagctctggattgcccgagctgccctgaagagtcagccgaaagagctggaggcttcttccctgtggttgcgggttcctgcattctctgctctaaatcccagcctgcccttggggctgcccacgcccccttcagatcctttgctccggagagagacctgtccgagcagaggcctggactacatctcccggcgtgcctggcagtgtggtggcctctgtgcgccgtctgcactcgttgcaggcgacgatgcagagggctgtaagtgtggtggcccgtctgggctttcgcctgcaggcattccccccggccttgtgtcgtccacttagttgcgcacaggaggtgctccgcaggacaccgctctatgacttccacctggcccacggcgggaaaatggtggcgtttgcgggttggagtctgccagtgcagtaccgggacagtcacactgactcgcacctgcacacacgccagcactgctcgctctttgacgtgtctcatatgctgcagaccaagatacttggtagtgaccgggtgaagctgatggagagtctagtggttggagacattgcagagctaagaccaaaccaggggacactgtcgctgtttaccaacgaggctggaggcatcttagatgacttgattgtaaccaatacttctgagggccacctgtatgtggtgtccaacgctggctgctgggagaaagatttggccctcatgcaggacaaggtcagggagcttcagaaccagggcagagatgtgggcctggaggtgttggataatgccctgctagctctgcaaggccccactgcagcccaggtactacaggccggcgtggcagatgacctgaggaaactgcccttcatgaccagtgctgtgatggaggtgtttggcgtgtctggctgccgcgtgacccgctgtggctacacaggagaggatggtgtggagatctcggtgccggtagcgggggcagttcacctggcaacagctattctgaaaaacccagaggtgaagctggcagggctggcagccagggacagcctgcgcctggaggcaggcctctgcctgtatgggaatgacattgatgaacacactacacctgtggagggcagcctcagttggacactggggaagcgccgccgagctgctatggacttccctggagccaaggtcattgttccccagctgaagggcagggtgcagcggaggcgtgtggggttgatgtgtgagggggcccccatgcgggcacacagtcccatcctgaacatggagggtaccaagattggtactgtgactagtggctgcccctccccctctctgaagaagaatgtggcgatgggttatgtgccctgcgagtacagtcgtccagggacaatgctgctggtagagcttccttcaggaccctgcttctgagtgacggaccagctcacacaatgtcttgtttcagtccatgatcccactgacctactcttgcctgctggagggtaatgagaagctttggttctgccatctctcccactctgccaggtgctggctgtggagcaaaggctcacctttgtggagaggataaaacctgcccaacctacctcaccatggtttttcacattgcaaagggtaataacatgggcagtgcggacttaggctaccccctccagtttgctttccgtaaatgcaaattgtccttactgcaagtcaggaatgattgctgactcacagtagggctgctatgcctgtgtgtaaacttggggatggctgagggaacatagactcactcttccacattcccaagttggtctagtgtgctgcccagtagcaaaccatggcagactcaccacctattctgagttccagggctgctgtagggcagggtgggcttcctcccagacttgccttaccctgggctgatctttgcccctggtatgcattaatggactccactgaatcctgaaaaaaaaattaaacttccttcttacttgcca

SEQ ID NO: 415741 - DNA, 798 bp, Homo sapiens
agctgcttcggaaagcgtgacgaagcagtagtcctcagtgtgtgtgtaagtgaagaggaccttgtggtagcagggaccatgcttcattcgtggctgtgtccccatctgagggcctggtatgcagtaagatcaataaatacttgtggaatgcatgactgctggctgcctgtgtctgcctggtgggagagctgtggaactaggggtccacatgaggacagactactgtggtgctgcctacctgccaggctggcccaccttccccacccccacttgaccttactctcttgaggtcctaaaggtatgattcagacctttcagccctttccagaactttgaccctctggagacagggcggttctgcagggggcggtctagcccctagctttgttctgggcagcccaatcagctctggattgcccgagctgccctgaagagtcagccgaaagagctggaggcttcttccctgtggttgcgggttcctgcattctctgctctaaatcccagcctgcccttggggctgcccacgcccccttcagatcctttgctccggagagagacctgtccgagcagaggcctggactacatctcccggcgtgcctggcagtgtggtggcctctgtgcgccgtctgcactcgttgcaggcgacgatgcagagggctgtaagtgtggtggcccgtctgggctttcgcctgcaggcattccccccggccttgtgtcgtccacttagttgcgcacaggtgggatagagggtgctgatcttggagggtgggggagggaagcggctgggggctagggccc

SEQ ID NO: 415742 - DNA, 513 bp, Homo sapiens
atagtttatgctgtaatagtttatgctgtaatagtttatgctgtaatagtttatgctgtaatagtttatgctgtaatagtttatgctgtaatagtttatgctgtaatagtttatgagcataaactattctgaaaaacccagaggtgaagctggcagggctggcagccagggacagcctgcgcctggaggcaggcctctgcctgtatgggaatgacattgatgaacacactacacctgtggagggcagcctcagttggacactgggtgagctgggccagcactaaaggatagggtcctggaggtcagggtgacccttgataagactagccagcccatgactcatccaaaggttatgtagcctgaagccttcctgagcctcccttccctgaaggtgccactgtgcctttgcccattagaaactgcagatgttggccggatgcggtggctcacatctgtaatcccagcactttgggaggccgaggcgggtggatcacgaggtcaggagatcaagac

SEQ ID NO: 415743 - DNA, 2567 bp, Homo sapiens
agctgcttcggaaagcgtgacgaagcagtagtcctcagtgtgtgtgtaagtgaagaggaccttgtggtagcagggaccatgcttcattcgtggctgtgtccccatctgagggcctggtatgcagtaagatcaataaatacttgtggaatgcatgactgctggctgcctgtgtctgcctggtgggagagctgtggaactaggggtccacatgaggacagactactgtggtgctgcctacctgccaggctggcccaccttccccacccccacttgaccttactctcttgaggtcctaaaggtatgattcagacctttcagccctttccagaactttgaccctctggagacagggcggttctgcagggggcggtctagcccctagctttgttctgggcagcccaatcagctctggattgcccgagctgccctgaagagtcagccgaaagagctggaggcttcttccctgtggttgcgggttcctgcattctctgctctaaatcccagcctgcccttggggctgcccacgcccccttcagatcctttgctccggagagagacctgtccgagcagaggcctggactacatctcccggcgtgcctggcagtgtggtggcctctgtgcgccgtctgcactcgttgcaggcgacgatgcagagggctgtaagtgtggtggcccgtctgggctttcgcctgcaggcattccccccggccttgtgtcgtccacttagttgcgcacaggaggtgctccgcaggacaccgctctatgacttccacctggcccacggcgggaaaatggtggcgtttgcgggttggagtctgccagtgcagtaccgggacagtcacactgactcgcacctgcacacacgccagcactgctcgctctttgacgtgtctcatatgctgcagaccaagatacttggtagtgaccgggtgaagctgatggagagtctagtggttggagacattgcagagctaagaccaaaccaggggacactgtcgctgtttaccaacgaggctggaggcatcttagatgacttgattgtaaccaatacttctgagggccacctgtatgtggtgtccaacgctggctgctgggagaaagatttggccctcatgcaggacaaggtcagggagcttcagaaccagggcagagatgtgggcctggaggtgttggataatgccctgctagctctgcaaggccccactgcagcccaggtactacaggccggcgtggcagatgacctgaggaaactgcccttcatgaccagtgctgtgatggaggtgtttggcgtgtctggctgccgcgtgacccgctgtggctacacaggagaggatggtgtggagatctcggtgccggtagcgggggcagttcacctggcaacagctattctggaggcaggcctctgcctgtatgggaatgacattgatgaacacactacacctgtggagggcagcctcagttggacactggggaagcgccgccgagctgctatggacttccctggagccaaggtcattgttccccagctgaagggcagggtgcagcggaggcgtgtggggttgatgtgtgagggggcccccatgcgggcacacagtcccatcctgaacatggagggtaccaagattggtactgtgactagtggctgcccctccccctctctgaagaagaatgtggcgatgggttatgtgccctgcgagtacagtcgtccagggacaatgctgctggtagaggtgcggcggaagcagcagatggctgtagtcagcaagatgccctttgtgcccacaaactactataccctcaagtgaagctggctcagggtggggctgtcccttccaggagttttgcccctacaaggggttagtcaagaagctgaggcagaactcactgggggtgggcagttaaggtggaggctgattctaattgtctggttgaggggccacaccacctattccccccacctaactcatgccattccagcttccttcaggaccctgcttctgagtgacggaccagctcacacaatgtcttgtttcagtccatgatcccactgacctactcttgcctgctggagggtaatgagaagctttggttctgccatctctcccactctgccaggtgctggctgtggagcaaaggctcacctttgtggagaggataaaacctgcccaacctacctcaccatggtttttcacattgcaaagggtaataacatgggcagtgcggacttaggctaccccctccagtttgctttccgtaaatgcaaattgtccttactgcaagtcaggaatgattgctgactcacagtagggctgctatgcctgtgtgtaaacttggggatggctgagggaacatagactcactcttccacattcccaagttggtctagtgtgctgcccagtagcaaaccatggcagactcaccacctattctgagttccagggctgctgtagggcagggtgggcttcctcccagacttgccttaccctgggctgatctttgcccctggtatgcattaatggactccactgaatcctgaaaaaaaaattaaacttccttcttacttgcca

SEQ ID NO: 415744 - DNA, 2729 bp, Homo sapiens
agctgcttcggaaagcgtgacgaagcagtagtcctcagtgtgtgtgtaagtgaagaggaccttgtggtagcagggaccatgcttcattcgtggctgtgtccccatctgagggcctggtatgcagtaagatcaataaatacttgtggaatgcatgactgctggctgcctgtgtctgcctggtgggagagctgtggaactaggggtccacatgaggacagactactgtggtgctgcctacctgccaggctggcccaccttccccacccccacttgaccttactctcttgaggtcctaaaggtatgattcagacctttcagccctttccagaactttgaccctctggagacagggcggttctgcagggggcggtctagcccctagctttgttctgggcagcccaatcagctctggattgcccgagctgccctgaagagtcagccgaaagagctggaggcttcttccctgtggttgcgggttcctgcattctctgctctaaatcccagcctgcccttggggctgcccacgcccccttcagatcctttgctccggagagagacctgtccgagcagaggcctggactacatctcccggcgtgcctggcagtgtggtggcctctgtgcgccgtctgcactcgttgcaggcgacgatgcagagggctgtaagtgtggtggcccgtctgggctttcgcctgcaggcattccccccggccttgtgtcgtccacttagttgcgcacaggaggtgctccgcaggacaccgctctatgacttccacctggcccacggcgggaaaatggtggcgtttgcgggttggagtctgccagtgcagtaccgggacagtcacactgactcgcacctgcacacacgccagcactgctcgctctttgacgtgtctcatatgctgcagaccaagatacttggtagtgaccgggtgaagctgatggagagtctagtggttggagacattgcagagctaagaccaaaccaggggacactgtcgctgtttaccaacgaggctggaggcatcttagatgacttgattgtaaccaatacttctgagggccacctgtatgtggtgtccaacgctggctgctgggagaaagatttggccctcatgcaggacaaggtcagggagcttcagaaccagggcagagatgtgggcctggaggtgttggataatgccctgctagctctgcaaggccccactgcagcccaggtactacaggccggcgtggcagatgacctgaggaaactgcccttcatgaccagtgctgtgatggaggtgtttggcgtgtctggctgccgcgtgacccgctgtggctacacaggagaggatggtgtggaggtgtgtcaagaagtggtgtgggggcagtacagggcacaggatgcatgtgaggggttgggggtatgtggtacagggagcttcccatctgccctctggtgtttcatacagatctcggtgccggtagcgggggcagttcacctggcaacagctattctgaaaaacccagaggtgaagctggcagggctggcagccagggacagcctgcgcctggaggcaggcctctgcctgtatgggaatgacattgatgaacacactacacctgtggagggcagcctcagttggacactggggaagcgccgccgagctgctatggacttccctggagccaaggtcattgttccccagctgaagggcagggtgcagcggaggcgtgtggggttgatgtgtgagggggcccccatgcgggcacacagtcccatcctgaacatggagggtaccaagattggtactgtgactagtggctgcccctccccctctctgaagaagaatgtggcgatgggttatgtgccctgcgagtacagtcgtccagggacaatgctgctggtagaggtgcggcggaagcagcagatggctgtagtcagcaagatgccctttgtgcccacaaactactataccctcaagtgaagctggctcagggtggggctgtcccttccaggagttttgcccctacaaggggttagtcaagaagctgaggcagaactcactgggggtgggcagttaaggtggaggctgattctaattgtctggttgaggggccacaccacctattccccccacctaactcatgccattccagcttccttcaggaccctgcttctgagtgacggaccagctcacacaatgtcttgtttcagtccatgatcccactgacctactcttgcctgctggagggtaatgagaagctttggttctgccatctctcccactctgccaggtgctggctgtggagcaaaggctcacctttgtggagaggataaaacctgcccaacctacctcaccatggtttttcacattgcaaagggtaataacatgggcagtgcggacttaggctaccccctccagtttgctttccgtaaatgcaaattgtccttactgcaagtcaggaatgattgctgactcacagtagggctgctatgcctgtgtgtaaacttggggatggctgagggaacatagactcactcttccacattcccaagttggtctagtgtgctgcccagtagcaaaccatggcagactcaccacctattctgagttccagggctgctgtagggcagggtgggcttcctcccagacttgccttaccctgggctgatctttgcccctggtatgcattaatggactccactgaatcctgaaaaaaaaattaaacttccttcttacttgcca

SEQ ID NO: 415745 - DNA, 2683 bp, Homo sapiens
agctgcttcggaaagcgtgacgaagcagtagtcctcagtgtgtgtgtaagtgaagaggaccttgtggtagcagggaccatgcttcattcgtggctgtgtccccatctgagggcctggtatgcagtaagatcaataaatacttgtggaatgcatgactgctggctgcctgtgtctgcctggtgggagagctgtggaactaggggtccacatgaggacagactactgtggtgctgcctacctgccaggctggcccaccttccccacccccacttgaccttactctcttgaggtcctaaaggtatgattcagacctttcagccctttccagaactttgaccctctggagacagggcggttctgcagggggcggtctagcccctagctttgttctgggcagcccaatcagctctggattgcccgagctgccctgaagagtcagccgaaagagctggaggcttcttccctgtggttgcgggttcctgcattctctgctctaaatcccagcctgcccttggggctgcccacgcccccttcagatcctttgctccggagagagacctgtccgagcagaggcctggactacatctcccggcgtgcctggcagtgtggtggcctctgtgcgccgtctgcactcgttgcaggcgacgatgcagagggctgtaagtgtggtggcccgtctgggctttcgcctgcaggcattccccccggccttgtgtcgtccacttagttgcgcacaggaggtgctccgcaggacaccgctctatgacttccacctggcccacggcgggaaaatggtggcgtttgcgggttggagtctgccagtgcagtaccgggacagtcacactgactcgcacctgcacacacgccagcactgctcgctctttgacgtgtctcatatgctgcagaccaagatacttggtagtgaccgggtgaagctgatggagagtctagtggttggagacattgcagagctaagaccaaaccaggggacactgtcgctgtttaccaacgaggctggaggcatcttagatgacttgattgtaaccaatacttctgagggccacctgtatgtggtgtccaacgctggctgctgggagaaagatttggccctcatgcaggacaaggtcagggagcttcagaaccagggcagagatgtgggcctggaggtgttggataatgccctgctagctctgcaaggccccactgcagcccaggtactacaggccggcgtggcagatgacctgaggaaactgcccttcatgaccagtgctgtgatggaggtgtttggcgtgtctggctgccgcgtgacccgctgtggctacacaggagaggatggtgtggagatctcggtgccggtagcgggggcagttcacctggcaacagctattctgaaaaacccagaggtgaagctggcagggctggcagccagggacagcctgcgcctggaggcaggcctctgcctgtatgggaatgacattgatgaacacactacacctgtggagggcagcctcagttggacactggggaagcgccgccgagctgctatggacttccctggagccaaggtcattgttccccagctgaagggcagggtgcagcggaggcgtgtggggttgatgtgtgagggggcccccatgcgggcacacagtcccatcctgaacatggagggtaccaagattggtactgtgactagtggctgcccctccccctctctgaagaagaatgtggcgatgggttatgtgccctgcgagtacagtcgtccagggacaatgctgctggtagaggtgcggcggaagcagcagatggctgtagtcagcaagatgccctttgtgcccacaaactactataccctcaagtgaagctggctcagggtggggctgtcccttccaggagttttgcccctacaaggggttagtcaagaagctgaggcagaactcactgggggtgggcagttaaggtggaggctgattctaattgtctggttgaggggccacaccacctattccccccacctaactcatgccattccagcttccttcaggaccctgcttctgagtgacggaccagctcacacaatgtcttgtttcagtccatgatcccactgacctactcttgcctgctggagggtaatgagaagctttggttctgccatctctcccactctgccaggtgctggctgtggagcaaaggctcacctttgtggagaggataaaacctgcccaacctacctcaccatggtttttcacattgcaaagggtaataacatgggcagtgcggacttaggctaccccctccagtttgctttccgtaaatgcaaattgtccttactgcaagtcaggaatgattgctgactcacagtagggctgctatgcctgtgtgtaaacttggggatggctgagggaacatagactcactcttccacattcccaagttggtctagtgtgctgcccagtagcaaaccatggcagactcaccacctattctgagttccagggctgctgtagggcagggtgggcttcctcccagacttgccttaccctgggctgatctttgcccctggtatgcattaatggactccactgaatcctgaaaaaaaaattaaacttccttcttacttgccagtctctagcttcattgttctctgttcacagggttcctgaaatgccaacccaatgcctgcctt

SEQ ID NO: 415746 - DNA, 3033 bp, Homo sapiens
agctgcttcggaaagcgtgacgaagcagtagtcctcagtgtgtgtgtaagtgaagaggaccttgtggtagcagggaccatgcttcattcgtggctgtgtccccatctgagggcctggtatgcagtaagatcaataaatacttgtggaatgcatgactgctggctgcctgtgtctgcctggtgggagagctgtggaactaggggtccacatgaggacagactactgtggtgctgcctacctgccaggctggcccaccttccccacccccacttgaccttactctcttgaggtcctaaaggtatgattcagacctttcagccctttccagaactttgaccctctggagacagggcggttctgcagggggcggtctagcccctagctttgttctgggcagcccaatcagctctggattgcccgagctgccctgaagagtcagccgaaagagctggaggcttcttccctgtggttgcgggttcctgcattctctgctctaaatcccagcctgcccttggggctgcccacgcccccttcagatcctttgctccggagagagacctgtccgagcagaggcctggactacatctcccggcgtgcctggcagtgtggtggcctctgtgcgccgtctgcactcgttgcaggcgacgatgcagagggctgtaagtgtggtggcccgtctgggctttcgcctgcaggcattccccccggccttgtgtcgtccacttagttgcgcacaggaggtgctccgcaggacaccgctctatgacttccacctggcccacggcgggaaaatggtggcgtttgcgggttggagtctgccagtgcagtaccgggacagtcacactgactcgcacctgcacacacgccagcactgctcgctctttgacgtgtctcatatgctgcagaccaagatacttggtagtgaccgggtgaagctgatggagagtctagtggttggagacattgcagagctaagaccaaaccaggggacactgtcgctgtttaccaacgaggctggaggcatcttagatgacttgattgtaaccaatacttctgagggccacctgtatgtggtgtccaacgctggctgctgggagaaagatttggccctcatgcaggacaaggtcagggagcttcagaaccagggcagagatgtgggcctggaggtgttggataatgccctgctagctctgcaaggtgagagggctgggctggggttggagccaacctttgccttcctggcttcattgactgcttagcacagaggccataccaagaagaatgtgtggaaggtgtgatatttgtgtgccataattttaagttttgtatcttgccctcctcctacctaccacaaggctccatgggctagggacaagggcatcttctcccacttgcagagtaagacatgctcagggcttgttctggtccctgaataaggctttagtccagctttgagggatgctgggacctggatacttggtcactggctccctgggcccaggccccactgcagcccaggtactacaggccggcgtggcagatgacctgaggaaactgcccttcatgaccagtgctgtgatggaggtgtttggcgtgtctggctgccgcgtgacccgctgtggctacacaggagaggatggtgtggaggtgtgtcaagaagtggtgtgggggcagtacagggcacaggatgcatgtgaggggttgggggtatgtggtacagggagcttcccatctgccctctggtgtttcatacagatctcggtgccggtagcgggggcagttcacctggcaacagctattctgaaaaacccagaggtgaagctggcagggctggcagccagggacagcctgcgcctggaggcaggcctctgcctgtatgggaatgacattgatgaacacactacacctgtggagggcagcctcagttggacactggggaagcgccgccgagctgctatggacttccctggagccaaggtcattgttccccagctgaagggcagggtgcagcggaggcgtgtggggttgatgtgtgagggggcccccatgcgggcacacagtcccatcctgaacatggagggtaccaagattggtactgtgactagtggctgcccctccccctctctgaagaagaatgtggcgatgggttatgtgccctgcgagtacagtcgtccagggacaatgctgctggtagaggtgcggcggaagcagcagatggctgtagtcagcaagatgccctttgtgcccacaaactactataccctcaagtgaagctggctcagggtggggctgtcccttccaggagttttgcccctacaaggggttagtcaagaagctgaggcagaactcactgggggtgggcagttaaggtggaggctgattctaattgtctggttgaggggccacaccacctattccccccacctaactcatgccattccagcttccttcaggaccctgcttctgagtgacggaccagctcacacaatgtcttgtttcagtccatgatcccactgacctactcttgcctgctggagggtaatgagaagctttggttctgccatctctcccactctgccaggtgctggctgtggagcaaaggctcacctttgtggagaggataaaacctgcccaacctacctcaccatggtttttcacattgcaaagggtaataacatgggcagtgcggacttaggctaccccctccagtttgctttccgtaaatgcaaattgtccttactgcaagtcaggaatgattgctgactcacagtagggctgctatgcctgtgtgtaaacttggggatggctgagggaacatagactcactcttccacattcccaagttggtctagtgtgctgcccagtagcaaaccatggcagactcaccacctattctgagttccagggctgctgtagggcagggtgggcttcctcccagacttgccttaccctgggctgatctttgcccctggtatgcattaatggactccactgaatcctgaaaaaaaaattaaacttccttcttacttgcca

SEQ ID NO: 415747 - DNA, 2055 bp, Homo sapiens
aggaaggtgctaggtcctgtccagttccctggcagtccccccacacagagtgactgggggaggtcaggaaatcagaaggtggtcctttgccacgtgtagaaccaaaagactggttagtcactttgggtgggctggactgcactgtggatggcagggaggatgcatccttgcttagtagccttttggattgtagctgttgcaatggcctgaggctttcaatctcttccccagaccaagatacttggtagtgaccgggtgaagctgatggagagtctagtggttggagacattgcagagctaagaccaaaccaggggacactgtcgctgtttaccaacgaggctggaggcatcttagatgacttgattgtaaccaatacttctgagggccacctgtatgtggtgtccaacgctggctgctgggagaaagatttggccctcatgcaggacaaggtcagggagcttcagaaccagggcagagatgtgggcctggaggtgttggataatgccctgctagctctgcaaggccccactgcagcccaggtactacaggccggcgtggcagatgacctgaggaaactgcccttcatgaccagtgctgtgatggaggtgtttggcgtgtctggctgccgcgtgacccgctgtggctacacaggagaggatggtgtggaggtgtgtcaagaagtggtgtgggggcagtacagggcacaggatgcatgtgaggggttgggggtatgtggtacagggagcttcccatctgccctctggtgtttcatacagatctcggtgccggtagcgggggcagttcacctggcaacagctattctgaaaaacccagaggtgaagctggcagggctggcagccagggacagcctgcgcctggaggcaggcctctgcctgtatgggaatgacattgatgaacacactacacctgtggagggcagcctcagttggacactggggaagcgccgccgagctgctatggacttccctggagccaaggtcattgttccccagctgaagggcagggtgcagcggaggcgtgtggggttgatgtgtgagggggcccccatgcgggcacacagtcccatcctgaacatggagggtaccaagattggtactgtgactagtggctgcccctccccctctctgaagaagaatgtggcgatgggttatgtgccctgcgagtacagtcgtccagggacaatgctgctggtagaggtgcggcggaagcagcagatggctgtagtcagcaagatgccctttgtgcccacaaactactataccctcaagtgaagctggctcagggtggggctgtcccttccaggagttttgcccctacaaggggttagtcaagaagctgaggcagaactcactgggggtgggcagttaaggtggaggctgattctaattgtctggttgaggggccacaccacctattccccccacctaactcatgccattccagcttccttcaggaccctgcttctgagtgacggaccagctcacacaatgtcttgtttcagtccatgatcccactgacctactcttgcctgctggagggtaatgagaagctttggttctgccatctctcccactctgccaggtgctggctgtggagcaaaggctcacctttgtggagaggataaaacctgcccaacctacctcaccatggtttttcacattgcaaagggtaataacatgggcagtgcggacttaggctaccccctccagtttgctttccgtaaatgcaaattgtccttactgcaagtcaggaatgattgctgactcacagtagggctgctatgcctgtgtgtaaacttggggatggctgagggaacatagactcactcttccacattcccaagttggtctagtgtgctgcccagtagcaaaccatggcagactcaccacctattctgagttccagggctgctgtagggcagggtgggcttcctcccagacttgccttaccctgggctgatctttgcccctggtatgcattaatggactccactgaatcctgaaaaaaaaattaaacttccttcttacttgcca

SEQ ID NO: 415748 - DNA, 1982 bp, Homo sapiens
gcagcgtccagcccatggtagctgctcagtaagtggccccagatgctcttgtgtttctgtcttttaggacaaggtcagggagcttcagaaccagggcagagatgtgggcctggaggtgttggataatgccctgctagctctgcaaggtgagagggctgggctggggttggagccaacctttgccttcctggcttcattgactgcttagcacagaggccataccaagaagaatgtgtggaaggtgtgatatttgtgtgccataattttaagttttgtatcttgccctcctcctacctaccacaaggctccatgggctagggacaagggcatcttctcccacttgcagagtaagacatgctcagggcttgttctggtccctgaataaggctttagtccagctttgagggatgctgggacctggatacttggtcactggctccctgggcccaggccccactgcagcccaggtactacaggccggcgtggcagatgacctgaggaaactgcccttcatgaccagtgctgtgatggaggtgtttggcgtgtctggctgccgcgtgacccgctgtggctacacaggagaggatggtgtggaggtgtgtcaagaagtggtgtgggggcagtacagggcacaggatgcatgtgaggggttgggggtatgtggtacagggagcttcccatctgccctctggtgtttcatacagatctcggtgccggtagcgggggcagttcacctggcaacagctattctgaaaaacccagaggtgaagctggcagggctggcagccagggacagcctgcgcctggaggcaggcctctgcctgtatgggaatgacattgatgaacacactacacctgtggagggcagcctcagttggacactggggaagcgccgccgagctgctatggacttccctggagccaaggtcattgttccccagctgaagggcagggtgcagcggaggcgtgtggggttgatgtgtgagggggcccccatgcgggcacacagtcccatcctgaacatggagggtaccaagattggtactgtgactagtggctgcccctccccctctctgaagaagaatgtggcgatgggttatgtgccctgcgagtacagtcgtccagggacaatgctgctggtagaggtgcggcggaagcagcagatggctgtagtcagcaagatgccctttgtgcccacaaactactataccctcaagtgaagctggctcagggtggggctgtcccttccaggagttttgcccctacaaggggttagtcaagaagctgaggcagaactcactgggggtgggcagttaaggtggaggctgattctaattgtctggttgaggggccacaccacctattccccccacctaactcatgccattccagcttccttcaggaccctgcttctgagtgacggaccagctcacacaatgtcttgtttcagtccatgatcccactgacctactcttgcctgctggagggtaatgagaagctttggttctgccatctctcccactctgccaggtgctggctgtggagcaaaggctcacctttgtggagaggataaaacctgcccaacctacctcaccatggtttttcacattgcaaagggtaataacatgggcagtgcggacttaggctaccccctccagtttgctttccgtaaatgcaaattgtccttactgcaagtcaggaatgattgctgactcacagtagggctgctatgcctgtgtgtaaacttggggatggctgagggaacatagactcactcttccacattcccaagttggtctagtgtgctgcccagtagcaaaccatggcagactcaccacctattctgagttccagggctgctgtagggcagggtgggcttcctcccagacttgccttaccctgggctgatctttgcccctggtatgcattaatggactccactgaatcctgaaaaaaaaattaaacttccttcttacttgcca

SEQ ID NO: 415749 - DNA, 875 bp, Homo sapiens
gtcccgtctgaagctgtgactaaggagaggcgacggcagtgcggcggaagcagcagatggctgtagtcagcaagatgccctttgtgcccacaaactactataccctcaagtgaagctggctcagggtggggctgtcccttccaggagttttgcccctacaaggggttagtcaagaagctgaggcagaactcactgggggtgggcagttaaggtggaggctgattctaattgtctggttgaggggccacaccacctattccccccacctaactcatgccattccagcttccttcaggaccctgcttctgagtgacggaccagctcacacaatgtcttgtttcagtccatgatcccactgacctactcttgcctgctggagggtaatgagaagctttggttctgccatctctcccactctgccaggtgctggctgtggagcaaaggctcacctttgtggagaggataaaacctgcccaacctacctcaccatggtttttcacattgcaaagggtaataacatgggcagtgcggacttaggctaccccctccagtttgctttccgtaaatgcaaattgtccttactgcaagtcaggaatgattgctgactcacagtagggctgctatgcctgtgtgtaaacttggggatggctgagggaacatagactcactcttccacattcccaagttggtctagtgtgctgcccagtagcaaaccatggcagactcaccacctattctgagttccagggctgctgtagggcagggtgggcttcctcccagacttgccttaccctgggctgatctttgcccctggtatgcattaatggactccactgaatcctgaaaaaaaaattaaacttccttcttacttgcca

SEQ ID NO: 415750 - DNA, 1963 bp, Homo sapiens
agctgcttcggaaagcgtgacgaagcagtagtcctcagtgtgtgtgtaagtgaagaggaccttgtggtagcagggaccatgcttcattcgtggctgtgtccccatctgagggcctggtatgcagtaagatcaataaatacttgtggaatgcatgactgctggctgcctgtgtctgcctggtgggagagctgtggaactaggggtccacatgaggacagactactgtggtgctgcctacctgccaggctggcccaccttccccacccccacttgaccttactctcttgaggtcctaaaggtatgattcagacctttcagccctttccagaactttgaccctctggagacagggcggttctgcagggggcggtctagcccctagctttgttctgggcagcccaatcagctctggattgcccgagctgccctgaagagtcagccgaaagagctggaggcttcttccctgtggttgcgggttcctgcattctctgctctaaatcccagcctgcccttggggctgcccacgcccccttcagatcctttgctccggagagagacctgtccgagcagaggcctggactacatctcccggcgtgcctggcagtgtggtggcctctgtgcgccgtctgcactcgttgcaggcgacgatgcagagggctgtaagtgtggtggcccgtctgggctttcgcctgcaggcattccccccggccttgtgtcgtccacttagttgcgcacaggaggtgctccgcaggacaccgctctatgacttccacctggcccacggcgggaaaatggtggcgtttgcgggttggagtctgccagtgcagtaccgggacagtcacactgactcgcacctgcacacacgccagcactgctcgctctttgacgtgtctcatatgctgcagaccaagatacttggtagtgaccgggtgaagctgatggagagtctagtggttggagacattgcagagctaagaccaaaccaggggacactgtcgctgtttaccaacgaggctggaggcatcttagatgacttgattgtaaccaatacttctgagggccacctgtatgtggtgtccaacgctggctgctgggagaaagatttggccctcatgcaggacaaggtcagggagcttcagaaccagggcagagatgtgggcctggaggtgttggataatgccctgctagctctgcaaggtgagagggctgggctggggttggagccaacctttgccttcctggcttcattgactgcttagcacagaggccataccaagaagaatgtgtggaaggtgtgatatttgtgtgccataattttaagttttgtatcttgccctcctcctacctaccacaaggctccatgggctagggacaagggcatcttctcccacttgcagagtaagacatgctcagggcttgttctggtccctgaataaggctttagtccagctttgagggatgctgggacctggatacttggtcactggctccctgggcccaggccccactgcagcccaggtactacaggccggcgtggcagatgacctgaggaaactgcccttcatgaccagtgctgtgatggaggtgtttggcgtgtctggctgccgcgtgacccgctgtggctacacaggagaggatggtgtggaggtgtgtcaagaagtggtgtgggggcagtacagggcacaggatgcatgtgaggggttgggggtatgtggtacagggagcttcccatctgccctctggtgtttcatacagatctcggtgccggtagcgggggcagttcacctggcaacagctattctgaaaaacccagaggtgaagctggcagggctggcagccagggacagcctgcgcctggaggcaggcctctgcctgtatgggaatgacattgatgaacacactacacctgtggagggcagcctcagttggacactgggcctgggcgacagagtgactccatctc

SEQ ID NO: 415751 - DNA, 4517 bp, Homo sapiens
  misc_feature (269)..(269): n is a, c, g, or t
  misc_feature (407)..(407): n is a, c, g, or t
ccgggcggtagagcggcgctgggacccatgcggccgtgacccccggctccctagaggcccagcgcagccgcagcggacaaaggagcatgtccgcgccggggaaggcccgtcctccggccgccataaggctccggtcgccgctgggcccgcgccgcgctcctgcccgcccgggctccggggcggcccgctaggccagtgcgccgccgctcgccccgcaggccccggcccgcagcatggagccccccggacgccgggggggccgcgcgcancgccgctgttgctgccgctctcgctgttagcgctgctcgcgctgctgggaggcggcggcggcggcggcgccgggcgctgcccgccggctgcaacacgatgggcggccccgaggggctggcagggcggcgggcgccgcnggggcaaggtggtgtgcagcagcctggaactcgcgcaggtcctgcccccagatactctgcccaaccgcacggtcaccctgattctgagtaacaataagatatccgagctgaagaatggctcattttctgggttaagtctccttgaaagattggacctccgaaacaatcttattagtagtatagatccaggtgccttctggggactgtcatctctaaaaagattggatctgacaaacaatcgaataggatgtctgaatgcagacatatttcgaggactcaccaatctggttcggctaaacctttcggggaatttgttttcttcattatctcaaggaacttttgattatcttgcgtcattacggtctttggaattccagactgagtatcttttgtgtgactgtaacatactgtggatgcatcgctgggtaaaggagaagaacatcacggtacgggataccaggtgtgtttatcctaagtcactgcaggcccaaccagtcacaggcgtgaagcaggagctgttgacatgcgaccctccgcttgaattgccgtctttctacatgactccatctcatcgccaagttgtgtttgaaggagacagccttcctttccagtgcatggcttcatatattgatcaggacatgcaagtgttgtggtatcaggatgggagaatagttgaaaccgatgaatcgcaaggtatttttgttgaaaagaacatgattcacaactgctccttgattgcaagtgccctaaccatttctaatattcaggctggatctactggaaattggggctgtcatgtccagaccaaacgtgggaataatacgaggactgtggatattgtggtattagagagttctgcacagtactgtccgccagagagggtggtaaacaacaaaggtgacttcagatggcccagaacattggcaggcattactgcatatctgcagtgtacgcggaacacccatggcagtgggatatatcccggaaacccacaggatgagagaaaagcttggcgcagatgtgatagaggtggcttttgggcagatgatgattattctcgctgtcagtatgcaaatgatgtcactagagttctttatatgtttaatcagatgcccctcaatcttaccaatgccgtggcaacagctcgacagttactggcttacactgtggaagcagccaacttttctgacaaaatggatgttatatttgtggcagaaatgattgaaaaatttggaagatttaccaaggaggaaaaatcaaaagagctaggtgacgtgatggttgacattgcaagtaacatcatgttggctgatgaacgtgtcctgtggctggcgcagagggaagctaaagcctgcagtaggattgtgcagtgtcttcagcgcattgctacctaccggctagccggtggagctcacgtttattcaacatattcacccaatattgctctggaagcttatgtcatcaagtctactggcttcacggggatgacctgtaccgtgttccagaaagtggcagcctctgatcgtacaggactttcggattatgggaggcgggatccagagggaaacctggataagcagctgagctttaagtgcaatgtttcaaatacattttcgagtctggcactaaagaatactattgtggaggcttctattcagcttcctccttcccttttctcaccaaagcaaaaaagagaactcagaccaactgatgactctctttacaagcttcaactcattgcattccgcaatggaaagctttttccagccactggaaattcaacaaatttggctgatgatggaaaacgacgtactgtggttacccctgtgattctcaccaaaatagatggtgtgaatgtagatacccaccacatccctgttaatgtgacactgcgtcgaattgcacatggagcagatgctgttgcagcccggtgggatttcgatttgctgaacggacaaggaggctggaagtcagatgggtgccatatactctattcagatgaaaatatcactacgattcagtgctactcccttagtaactatgcagttttaatggatttgacgggatctgaactatacacccaggcggccagcctcctgcatcctgtggtttatactaccgctatcattctcctcttatgtctcttagccgtcattgtcagttacatataccatcacagtttgattagaatcagcctcaagagctggcacatgcttgtgaacttgtgctttcatattttcctaacctgtgtggtctttgtgggaggaataacccagactaggaatgccagcatctgccaagcagttgggataattcttcactattccacccttgccacagtactatgggtaggagtgacagctcgaaatatctacaaacaagtcactaaaaaagctaaaagatgccaggatcctgatgaaccaccacctccaccaagaccaatgctcagattttacctgattggtggtggtatccccatcattgtttgcggcataactgcagcagcgaacattaagaattacggcagtcggccaaacgcaccctattgctggatggcatgggaaccctccttgggagccttctatgggccagccagcttcatcacttttgtaaactgcatgtactttctgagcatatttattcagttgaaaagacaccctgagcgcaaatatgagcttaaggagcccacggaggagcaacagagattggcagccaatgaaaatggcgaaataaatcatcaggattcaatgtctttgtctctgatttctacatcagccttggaaaatgagcacacttttcattctcagctcttgggggccagccttactttgctcttatatgttgcactgtggatgtttggggctttggctgtttctttgtattaccctttggacttggtttttagcttcgtttttggagccacaagtttaagcttcagtgcgttcttcgtggtccaccattgtgttaatagggaggatgttagacttgcgtggatcatgacttgctgcccaggacggagctcgtattcagtgcaagtcaacgtccagccccccaactctaatgggacgaatggagaggcacccaaatgccccaatagcagtgcggagtcttcatgcacaaacaaaagtgcttcaagcttcaaaaattcctcccagggctgcaaattaacaaacttgcaggcggctgcagctcagtgccatgccaattctttacctttgaactccacccctcagcttgataatagtctgacagaacattcaatggacaatgatattaaaatgcacgtggcgcctttagaagttcagtttcgaacaaatgtgcactcaagccgccaccataaaaacagaagtaaaggacaccgggcaagccgactcacagtcctgagagaatatgcctacgatgtcccaacgagcgtggaaggaagcgtgcagaacggcttacctaaaagccggctgggcaataacgaaggacactcgaggagccgaagagcttatttagcctacagagagagacagtacaacccaccccagcaagacagcagcgatgcttgtagcacacttcccaaaagtagcagaaattttgaaaagccagtttcaaccactagtaaaaaagatgcgttaaggaagccagctgtggttgaacttgaaaatcagcaaaaatcttatggcctcaacttggccattcagaatggaccaattaaaagcaatgggcaggagggacccttgctcggtaccgatagcactggcaatgttaggactggattatggaaacacgaaactactgtgtaacattgctgggcttcctaggcagaaattcatataaactgtgatactcacattccttgaagctatgagcatttaaaaactgtttacagccaccatagggattcaaaagaatttggaataaactttgaagttttggattttacttatttttatccccaaattgttgctattttttaggatctgaaacaaaatctttctaaaacattgttttagttgtcaaagcaccaacaggacattttgggatgtgaaatgtaatttcttggaatctgtaatttgtacttaatatttcaggcttgtatttaatataataaataggtgtttgtta

SEQ ID NO: 415752 - DNA, 3639 bp, Homo sapiens
catttctgtaatcatctgatactcttaggatgccactgaagaggaataactctaaataccctccgcttgaattgccgtctttctacatgactccatctcatcgccaagttgtgtttgaaggagacagccttcctttccagtgcatggcttcatatattgatcaggacatgcaagtgttgtggtatcaggatgggagaatagttgaaaccgatgaatcgcaaggtatttttgttgaaaagaacatgattcacaactgctccttgattgcaagtgccctaaccatttctaatattcaggctggatctactggaaattggggctgtcatgtccagaccaaacgtgggaataatacgaggactgtggatattgtggtattagagagttctgcacagtactgtccgccagagagggtggtaaacaacaaaggtgacttcagatggcccagaacattggcaggcattactgcatatctgcagtgtacgcggaacacccatggcagtgggatatatcccggaaacccacaggatgagagaaaagcttggcgcagatgtgatagaggtggcttttgggcagatgatgattattctcgctgtcagtatgcaaatgatgtcactagagttctttatatgtttaatcagatgcccctcaatcttaccaatgccgtggcaacagctcgacagttactggcttacactgtggaagcagccaacttttctgacaaaatggatgttatatttgtggcagaaatgattgaaaaatttggaagatttaccaaggaggaaaaatcaaaagagctaggtgacgtgatggttgacattgcaagtaacatcatgttggctgatgaacgtgtcctgtggctggcgcagagggaagctaaagcctgcagtaggattgtgcagtgtcttcagcgcattgctacctaccggctagccggtggagctcacgtttattcaacatattcacccaatattgctctggaagcttatgtcatcaagtctactggcttcacggggatgacctgtaccgtgttccagaaagtggcagcctctgatcgtacaggactttcggattatgggaggcgggatccagagggaaacctggataagcagctgagctttaagtgcaatgtttcaaatacattttcgagtctggcactaaagaatactattgtggaggcttctattcagcttcctccttcccttttctcaccaaagcaaaaaagagaactcagaccaactgatgactctctttacaagcttcaactcattgcattccgcaatggaaagctttttccagccactggaaattcaacaaatttggctgatgatggaaaacgacgtactgtggttacccctgtgattctcaccaaaatagatggtgtgaatgtagatacccaccacatccctgttaatgtgacactgcgtcgaattgcacatggagcagatgctgttgcagcccggtgggatttcgatttgctgaacggacaaggaggctggaagtcagatgggtgccatatactctattcagatgaaaatatcactacgattcagtgctactcccttagtaactatgcagttttaatggatttgacgggatctgaactatacacccaggcggccagcctcctgcatcctgtggtttatactaccgctatcattctcctcttatgtctcttagccgtcattgtcagttacatataccatcacagtttgattagaatcagcctcaagagctggcacatgcttgtgaacttgtgctttcatattttcctaacctgtgtggtctttgtgggaggaataacccagactaggaatgccagcatctgccaagcagttgggataattcttcactattccacccttgccacagtactatgggtaggagtgacagctcgaaatatctacaaacaagtcactaaaaaagctaaaagatgccaggatcctgatgaaccaccacctccaccaagaccaatgctcagattttacctgattggtggtggtatccccatcattgtttgcggcataactgcagcagcgaacattaagaattacggcagtcggccaaacgcaccctattgctggatggcatgggaaccctccttgggagccttctatgggccagccagcttcatcacttttgtaaactgcatgtactttctgagcatatttattcagttgaaaagacaccctgagcgcaaatatgagcttaaggagcccacggaggagcaacagagattggcagccaatgaaaatggcgaaataaatcatcaggattcaatgtctttgtctctgatttctacatcagccttggaaaatgagcacacttttcattctcagctcttgggggccagccttactttgctcttatatgttgcactgtggatgtttggggctttggctgtttctttgtattaccctttggacttggtttttagcttcgtttttggagccacaagtttaagcttcagtgcgttcttcgtggtccaccattgtgttaatagggaggatgttagacttgcgtggatcatgacttgctgcccaggacggagctcgtattcagtgcaagtcaacgtccagccccccaactctaatgggacgaatggagaggcacccaaatgccccaatagcagtgcggagtcttcatgcacaaacaaaagtgcttcaagcttcaaaaattcctcccagggctgcaaattaacaaacttgcaggcggctgcagctcagtgccatgccaattctttacctttgaactccacccctcagcttgataatagtctgacagaacattcaatggacaatgatattaaaatgcacgtggcgcctttagaagttcagtttcgaacaaatgtgcactcaagccgccaccataaaaacagaagtaaaggacaccgggcaagccgactcacagtcctgagagaatatgcctacgatgtcccaacgagcgtggaaggaagcgtgcagaacggcttacctaaaagccggctgggcaataacgaaggacactcgaggagccgaagagcttatttagcctacagagagagacagtacaacccaccccagcaagacagcagcgatgcttgtagcacacttcccaaaagtagcagaaattttgaaaagccagtttcaaccactagtaaaaaagatgcgttaaggaagccagctgtggttgaacttgaaaatcagcaaaaatcttatggcctcaacttggccattcagaatggaccaattaaaagcaatgggcaggagggacccttgctcggtaccgatagcactggcaatgttaggactggattatggaaacacgaaactactgtgtaacattgctgggcttcctaggcagaaattcatataaactgtgatactcacattccttgaagctatgagcatttaaaaactgtttacagccaccatagggattcaaaagaatttggaataaactttgaagttttggattttacttatttttatccccaaattgttgctattttttaggatctgaaacaaaatctttctaaaacattgttttagttgtcaaagcaccaacaggacattttgggatgtgaaatgtaatttcttggaatctgtaatttgtacttaatatttcaggcttgtatttaatataataaataggtgtttgtta

SEQ ID NO: 415753 - DNA, 2369 bp, Homo sapiens
acccactactggctgacccactactggctctggaaattcaacaaatttggctgatgatggaaaacgacgtactgtggttacccctgtgattctcaccaaaatagatggtgtgaatgtagatacccaccacatccctgttaatgtgacactgcgtcgaattgcacatggagcagatgctgttgcagcccggtgggatttcgatttgctgaacggacaaggaggctggaagtcagatgggtgccatatactctattcagatgaaaatatcactacgattcagtgctactcccttagtaactatgcagttttaatggatttgacgggatctgaactatacacccaggcggccagcctcctgcatcctgtggtttatactaccgctatcattctcctcttatgtctcttagccgtcattgtcagttacatataccatcacagtttgattagaatcagcctcaagagctggcacatgcttgtgaacttgtgctttcatattttcctaacctgtgtggtctttgtgggaggaataacccagactaggaatgccagcatctgccaagcagttgggataattcttcactattccacccttgccacagtactatgggtaggagtgacagctcgaaatatctacaaacaagtcactaaaaaagctaaaagatgccaggatcctgatgaaccaccacctccaccaagaccaatgctcagattttacctgattggtggtggtatccccatcattgtttgcggcataactgcagcagcgaacattaagaattacggcagtcggccaaacgcaccctattgctggatggcatgggaaccctccttgggagccttctatgggccagccagcttcatcacttttgtaaactgcatgtactttctgagcatatttattcagttgaaaagacaccctgagcgcaaatatgagcttaaggagcccacggaggagcaacagagattggcagccaatgaaaatggcgaaataaatcatcaggattcaatgtctttgtctctgatttctacatcagccttggaaaatgagcacacttttcattctcagctcttgggggccagccttactttgctcttatatgttgcactgtggatgtttggggctttggctgtttctttgtattaccctttggacttggtttttagcttcgtttttggagccacaagtttaagcttcagtgcgttcttcgtggtccaccattgtgttaatagggaggatgttagacttgcgtggatcatgacttgctgcccaggacggagctcgtattcagtgcaagtcaacgtccagccccccaactctaatgggacgaatggagaggcacccaaatgccccaatagcagtgcggagtcttcatgcacaaacaaaagtgcttcaagcttcaaaaattcctcccagggctgcaaattaacaaacttgcaggcggctgcagctcagtgccatgccaattctttacctttgaactccacccctcagcttgataatagtctgacagaacattcaatggacaatgatattaaaatgcacgtggcgcctttagaagttcagtttcgaacaaatgtgcactcaagccgccaccataaaaacagaagtaaaggacaccgggcaagccgactcacagtcctgagagaatatgcctacgatgtcccaacgagcgtggaaggaagcgtgcagaacggcttacctaaaagccggctgggcaataacgaaggacactcgaggagccgaagagcttatttagcctacagagagagacagtacaacccaccccagcaagacagcagcgatgcttgtagcacacttcccaaaagtagcagaaattttgaaaagccagtttcaaccactagtaaaaaagatgcgttaaggaagccagctgtggttgaacttgaaaatcagcaaaaatcttatggcctcaacttggccattcagaatggaccaattaaaagcaatgggcaggagggacccttgctcggtaccgatagcactggcaatgttaggactggattatggaaacacgaaactactgtgtaacattgctgggcttcctaggcagaaattcatataaactgtgatactcacattccttgaagctatgagcatttaaaaactgtttacagccaccatagggattcaaaagaatttggaataaactttgaagttttggattttacttatttttatccccaaattgttgctattttttaggatctgaaacaaaatctttctaaaacattgttttagttgtcaaagcaccaacaggacattttgggatgtgaaatgtaatttcttggaatctgtaatttgtacttaatatttcaggcttgtatttaatataataaataggtgtttgtta

SEQ ID NO: 415754 - DNA, 4463 bp, Homo sapiens
  misc_feature (269)..(269): n is a, c, g, or t
  misc_feature (407)..(407): n is a, c, g, or t
ccgggcggtagagcggcgctgggacccatgcggccgtgacccccggctccctagaggcccagcgcagccgcagcggacaaaggagcatgtccgcgccggggaaggcccgtcctccggccgccataaggctccggtcgccgctgggcccgcgccgcgctcctgcccgcccgggctccggggcggcccgctaggccagtgcgccgccgctcgccccgcaggccccggcccgcagcatggagccccccggacgccgggggggccgcgcgcancgccgctgttgctgccgctctcgctgttagcgctgctcgcgctgctgggaggcggcggcggcggcggcgccgggcgctgcccgccggctgcaacacgatgggcggccccgaggggctggcagggcggcgggcgccgcnggggcaaggtggtgtgcagcagcctggaactcgcgcaggtcctgcccccagatactctgcccaaccgcacggtcaccctgattctgagtaacaataagatatccgagctgaagaatggctcattttctgggttaagtctccttgaaagattggacctccgaaacaatcttattagtagtatagatccaggtgccttctggggactgtcatctctaaaaagattggatctgacaaacaatcgaataggatgtctgaatgcagacatatttcgaggactcaccaatctggttcggctaaacctttcggggaatttgttttcttcattatctcaaggaacttttgattatcttgcgtcattacggtctttggaattccagactgagtatcttttgtgtgactgtaacatactgtggatgcatcgctgggtaaaggagaagaacatcacggtacgggataccaggtgtgtttatcctaagtcactgcaggcccaaccagtcacaggcgtgaagcaggagctgttgacatgcgaccctccgcttgaattgccgtctttctacatgactccatctcatcgccaagttgtgtttgaaggagacagccttcctttccagtgcatggcttcatatattgatcaggacatgcaagtgttgtggtatcaggatgggagaatagttgaaaccgatgaatcgcaaggtatttttgttgaaaagaacatgattcacaactgctccttgattgcaagtgccctaaccatttctaatattcaggctggatctactggaaattggggctgtcatgtccagaccaaacgtgggaataatacgaggactgtggatattgtggtattagagagttctgcacagtactgtccgccagagagggtggtaaacaacaaaggtgacttcagatggcccagaacattggcaggcattactgcatatctgcagtgtacgcggaacacccatggcagtgggatatatcccggaaacccacaggatgagagaaaagcttggcgcagatgtgatagaggtggcttttgggcagatgatgattattctcgctgtcagtatgcaaatgatgtcactagagttctttatatgtttaatcagatgcccctcaatcttaccaatgccgtggcaacagctcgacagttactggcttacactgtggaagcagccaacttttctgacaaaatggatgttatatttgtggcagaaatgattgaaaaatttggaagatttaccaaggaggaaaaatcaaaagagctaggtgacgtgatggttgacattgcaagtaacatcatgttggctgatgaacgtgtcctgtggctggcgcagagggaagctaaagcctgcagtaggattgtgcagtgtcttcagcgcattgctacctaccggctagccggtggagctcacgtttattcaacatattcacccaatattgctctggaagcttatgtcatcaagtctactggcttcacggggatgacctgtaccgtgttccagaaagtggcagcctctgatcgtacaggactttcggattatgggaggcgggatccagagggaaacctggataagcagctgagctttaagtgcaatgtttcaaatacattttcgagtctggcactaaagaatactattgtggaggcttctattcagcttcctccttcccttttctcaccaaagcaaaaaagagaactcagaccaactgatgactctctttacaagcttcaactcattgcattccgcaatggaaagctttttccagccactggaaattcaacaaatttggctgatgatggaaaacgacgtactgtggttacccctgtgattctcaccaaaatagatggtgtgaatgtagatacccaccacatccctgttaatgtgacactgcgtcgaattgcacatggagcagatgctgttgcagcccggtgggatttcgatttgctgaacggacaaggaggctggaagtcagatgggtgccatatactctattcagatgaaaatatcactacgattcagtgctactcccttagtaactatgcagttttaatggatttgacgggatctgaactatacacccaggcggccagcctcctgcatcctgtggtttatactaccgctatcattctcctcttatgtctcttagccgtcattgtcagttacatataccatcacagtttgattagaatcagcctcaagagctggcacatgcttgtgaacttgtgctttcatattttcctaacctgtgtggtctttgtgggaggaataacccagactaggaatgccagcatctgccaagcagttgggataattcttcactattccacccttgccacagtactatgggtaggagtgacagctcgaaatatctacaaacaagtcactaaaaaagctaaaagatgccaggatcctgatgaaccaccacctccaccaagaccaatgctcagattttacctgattggtggtggtatccccatcattgtttgcggcataactgcagcagcgaacattaagaattacggcagtcggccaaacgcaccctattgctggatggcatgggaaccctccttgggagccttctatgggccagccagcttcatcacttttgtaaactgcatgtactttctgagcatatttattcagttgaaaagacaccctgagcgcaaatatgagcttaaggagcccacggaggagcaacagagattggcagccaatgaaaatggcgaaataaatcatcaggattcaatgtctttgtctctgatttctacatcagccttggaaaatgagcacacttttcattctcagctcttgggggccagccttactttgctcttatatgttgcactgtggatgtttggggctttggctgtttctttgtattaccctttggacttggtttttagcttcgtttttggagccacaagtttaagcttcagtgcgttcttcgtggtccaccattgtgttaatagggaggatgttagacttgcgtggatcatgacttgctgcccaggacggagctcgtattcagtgcaagtcaacgtccagccccccaactctaatgggacgaatggagaggcacccaaatgccccaatagcagtgcggagtcttcatgcacaaacaaaagtgcttcaagcttcaaaaattcctcccagggctgcaaattaacaaacttgcaggcggctgcagctcagtgccatgccaattctttacctttgaactccacccctcagcttgataatagtctgacagaacattcaatggacaatgatattaaaatgcacgtggcgcctttagaagttcagtttcgaacaaatgtgcactcaagccgccaccataaaaacagaagtaaaggacaccgggcaagccgactcacagtcctgagagaatatgcctacgatgtcccaacgagcgtggaaggaagcgtgcagaacggcttacctacctacagagagagacagtacaacccaccccagcaagacagcagcgatgcttgtagcacacttcccaaaagtagcagaaattttgaaaagccagtttcaaccactagtaaaaaagatgcgttaaggaagccagctgtggttgaacttgaaaatcagcaaaaatcttatggcctcaacttggccattcagaatggaccaattaaaagcaatgggcaggagggacccttgctcggtaccgatagcactggcaatgttaggactggattatggaaacacgaaactactgtgtaacattgctgggcttcctaggcagaaattcatataaactgtgatactcacattccttgaagctatgagcatttaaaaactgtttacagccaccatagggattcaaaagaatttggaataaactttgaagttttggattttacttatttttatccccaaattgttgctattttttaggatctgaaacaaaatctttctaaaacattgttttagttgtcaaagcaccaacaggacattttgggatgtgaaatgtaatttcttggaatctgtaatttgtacttaatatttcaggcttgtatttaatataataaataggtgtttgtta

SEQ ID NO: 415755 - DNA, 2860 bp, Homo sapiens
  misc_feature (269)..(269): n is a, c, g, or t
  misc_feature (407)..(407): n is a, c, g, or t
ccgggcggtagagcggcgctgggacccatgcggccgtgacccccggctccctagaggcccagcgcagccgcagcggacaaaggagcatgtccgcgccggggaaggcccgtcctccggccgccataaggctccggtcgccgctgggcccgcgccgcgctcctgcccgcccgggctccggggcggcccgctaggccagtgcgccgccgctcgccccgcaggccccggcccgcagcatggagccccccggacgccgggggggccgcgcgcancgccgctgttgctgccgctctcgctgttagcgctgctcgcgctgctgggaggcggcggcggcggcggcgccgggcgctgcccgccggctgcaacacgatgggcggccccgaggggctggcagggcggcgggcgccgcnggggcaaggtggtgtgcagcagcctggaactcgcgcaggtcctgcccccagatactctgcccaaccgcacggtcaccctgattctgagtaacaataagatatccgagctgaagaatggctcattttctgggttaagtctccttgaaagattggacctccgaaacaatcttattagtagtatagatccaggtgccttctggggactgtcatctctaaaaagattggatctgacaaacaatcgaataggatgtctgaatgcagacatatttcgaggactcaccaatctggttcggctaaacctttcggggaatttgttttcttcattatctcaaggaacttttgattatcttgcgtcattacggtctttggaattccagactgagtatcttttgtgtgactgtaacatactgtggatgcatcgctgggtaaaggagaagaacatcacggtacgggataccaggtgtgtttatcctaagtcactgcaggcccaaccagtcacaggcgtgaagcaggagctgttgacatgcgaccctccgcttgaattgccgtctttctacatgactccatctcatcgccaagttgtgtttgaaggagacagccttcctttccagtgcatggcttcatatattgatcaggacatgcaagtgttgtggtatcaggatgggagaatagttgaaaccgatgaatcgcaaggtatttttgttgaaaagaacatgattcacaactgctccttgattgcaagtgccctaaccatttctaatattcaggctggatctactggaaattggggctgtcatgtccagaccaaacgtgggaataatacgaggactgtggatattgtggtattagagagttctgcacagtactgtccgccagagagggtggtaaacaacaaaggtgacttcagatggcccagaacattggcaggcattactgcatatctgcagtgtacgcggaacacccatggcagtgggatatatcccggaaacccacaggatgagagaaaagcttggcgcagatgtgatagaggtggcttttgggcagatgatgattattctcgctgtcagtatgcaaatgatgtcactagagttctttatatgtttaatcagatgcccctcaatcttaccaatgccgtggcaacagctcgacagttactggcttacactgtggaagcagccaacttttctgacaaaatggatgttatatttgtggcagaaatgattgaaaaatttggaagatttaccaaggaggaaaaatcaaaagagctaggtgacgtgatggttgacattgcaagtaacatcatgttggctgatgaacgtgtcctgtggctggcgcagagggaagctaaagcctgcagtaggattgtgcagtgtcttcagcgcattgctacctaccggctagccggtggagctcacgtttattcaacaaatgccccaatagcagtgcggagtcttcatgcacaaacaaaagtgcttcaagcttcaaaaattcctcccagggctgcaaattaacaaacttgcaggcggctgcagctcagtgccatgccaattctttacctttgaactccacccctcagcttgataatagtctgacagaacattcaatggacaatgatattaaaatgcacgtggcgcctttagaagttcagtttcgaacaaatgtgcactcaagccgccaccataaaaacagaagtaaaggacaccgggcaagccgactcacagtcctgagagaatatgcctacgatgtcccaacgagcgtggaaggaagcgtgcagaacggcttacctaaaagccggctgggcaataacgaaggacactcgaggagccgaagagcttatttagcctacagagagagacagtacaacccaccccagcaagacagcagcgatgcttgtagcacacttcccaaaagtagcagaaattttgaaaagccagtttcaaccactagtaaaaaagatgcgttaaggaagccagctgtggttgaacttgaaaatcagcaaaaatcttatggcctcaacttggccattcagaatggaccaattaaaagcaatgggcaggagggacccttgctcggtaccgatagcactggcaatgttaggactggattatggaaacacgaaactactgtgtaacattgctgggcttcctaggcagaaattcatataaactgtgatactcacattccttgaagctatgagcatttaaaaactgtttacagccaccatagggattcaaaagaatttggaataaactttgaagttttggattttacttatttttatccccaaattgttgctattttttaggatctgaaacaaaatctttctaaaacattgttttagttgtcaaagcaccaacaggacattttgggatgtgaaatgtaatttcttggaatctgtaatttgtacttaatatttcaggcttgtatttaatataataaataggtgtttgtta

SEQ ID NO: 415756 - DNA, 1520 bp, Homo sapiens
  misc_feature (269)..(269): n is a, c, g, or t
  misc_feature (407)..(407): n is a, c, g, or t
ccgggcggtagagcggcgctgggacccatgcggccgtgacccccggctccctagaggcccagcgcagccgcagcggacaaaggagcatgtccgcgccggggaaggcccgtcctccggccgccataaggctccggtcgccgctgggcccgcgccgcgctcctgcccgcccgggctccggggcggcccgctaggccagtgcgccgccgctcgccccgcaggccccggcccgcagcatggagccccccggacgccgggggggccgcgcgcancgccgctgttgctgccgctctcgctgttagcgctgctcgcgctgctgggaggcggcggcggcggcggcgccgggcgctgcccgccggctgcaacacgatgggcggccccgaggggctggcagggcggcgggcgccgcnggggcaaggtggtgtgcagcagcctggaactcgcgcaggtcctgcccccagatactctgcccaaccgcacggtcaccctgattctgagtaacaataagatatccgagctgaagaatggctcattttctgggttaagtctccttgaaagattggacctccgaaacaatcttattagtagtatagatccaggtgccttctggggactgtcatctctaaaaagattgtaagtgtttgaattgcttgcttacgagtttgaattgttgcttatataaatagctgtcaacttactttaacatgatgaaaaatggacatttaataattttttgagctttacctggccaggtccctgatacagaaagaggctgggcacagtggctcacgcctgtattcccagcactttgggaggctgaggcgggtggatcacctgaggtcaggaattcaagaccagcctggccaaggtggtgaaaccccgtctctactaaaaatacgaaaatgagctggcatggtggtgtgtgcctgtagtcccagctacctgggaggctgaggcaggagaatcactggaacctgggaatgggagactacaatgagctgagattgtgccactgcaagacagagcgagactctgtctcaataaaacaaaaagaaagaaaaacaaagagtattttatataagtagctgagaaggtggttgatttgcacagtggtttgatttgtttggtggtggatggctgtgttactcttatgctactaaaatcattaccatgtcggctttgccggcgcacataatctgtagacgattttcaaattatgaatccattcaaactgtgtctgttgtaaatgccatataaacagaggtaccttttaagtaatgatttaaagtcttgctattttcatgtgtatctatatattacaattttaaaacctaaggaccagtttttattgcttctgaagctaaacaactcccctatctcctatacgaagctcctttcacagttgctgtctgagcaggcccacatttgagaagcggctctacacaaaagccatgaggactgtctctccatcctttatgctttctgaaagcgtttactgagcacttgccacttaccatgccctg

SEQ ID NO: 415757 - DNA, 770 bp, Homo sapiens
  misc_feature (269)..(269): n is a, c, g, or t
  misc_feature (407)..(407): n is a, c, g, or t
ccgggcggtagagcggcgctgggacccatgcggccgtgacccccggctccctagaggcccagcgcagccgcagcggacaaaggagcatgtccgcgccggggaaggcccgtcctccggccgccataaggctccggtcgccgctgggcccgcgccgcgctcctgcccgcccgggctccggggcggcccgctaggccagtgcgccgccgctcgccccgcaggccccggcccgcagcatggagccccccggacgccgggggggccgcgcgcancgccgctgttgctgccgctctcgctgttagcgctgctcgcgctgctgggaggcggcggcggcggcggcgccgggcgctgcccgccggctgcaacacgatgggcggccccgaggggctggcagggcggcgggcgccgcnggggcaaggtggtgtgcagcagcctggaactcgcgcaggtcctgcccccagatactctgcccaaccgcacggtcaccctgattctgagtaacaataagatatccgagctgaagaatggctcattttctgggttaagtctccttgaaagattgctgtacaggaagcatggagctggcatctgctcggcttctaaggaggcctcaggaagcttacaatcatggtggaaggccaaacttgcatgtcacatggcgaaaacagaagcgaggatgtgatgtcaaggggaaaaacactagtataaactttgatattttattcagatgtctttaaatgtgatatatttgtaaatatatatttttcttagca

SEQ ID NO: 415758 - DNA, 716 bp, Homo sapiens
gtgcgtgccagcagtaagtgaaagcaaggatcattttcagcctcactgctatccttatctcatttgcgtacagtaaatatctcaaagttgctagaataaaggtcttgtgcgatacctgggtgctgttcttgaatactgaatgcatgagaccttctttaaccaagagaactaattgaagacacttttccacccttctccttagggatctgacaaacaatcgaataggatgtctgaatgcagacatatttcgaggactcaccaatctggttcggctgtaagtatatcttttctttcccattaaaagataaggaagcatttgagccagtacctaaatatgtatgaaacttatgtatttaattataagtagcaactgtaggggttatagaagccataggggacaaggagctcacaatttaatcatggggatgtaatctcctcagaatataatgctaccttaccacaccacacacggacacatgtgcatgtacaccacacacacacaccaaataacacagtgtagtacatgcaacagagagcacgttcatgctgagcagtatgatcaaaagctttgctagtctgggaaaatttctaggaaatagtaaaatgtgagctgatggcccagaagatttgcagagatctggatagtgagaaaggaaaagaagccaaactaatgatacatgaaggtgggaatgagaacaaggccatttgtcaagggg

SEQ ID NO: 415759 - DNA, 534 bp, Homo sapiens
ttatgtactagcctgaatattaatattttctctcttttttaaacagtttgattagaatcagcctcaagagctggcacatgcttgtgaacttgtgctttcatattttcctaacctgtgtggtctttgtgggaggaataacccagactaggaatgccagcatctgccaagcagtaagtcagagtgaaaaaccgaaatggaaaaaattactggtattagaagataatttcattaactataaaaagaaaaaatcattctttaataccttttctttaactgattaaagttaaatttattgtctgtcacttaaacaatctgccagtttacttcctgttttaaattaccattttgcaactgaatatataacttaaacagctcatccctttatcattgggaatttagtgttacacgttatggctattattacaatgcctgttacttatttttaaaatgtatgaaattctgactttggctgaaagagaagtgacattttctgatagtagaattttaaaaattattttatgtgttgatgaaaac

SEQ ID NO: 415760 - DNA, 6705 bp, Homo sapiens
cagatggccggggctcaacccggagtgcacgccttgcaactcaagcccgtgtgcgtgtccgacagcctcaagaagggcaccaaattcgtcaagtgggatgatgactcaactattgttactccaattattttgaggactgaccctcagggatttttcttttactggacagatcaaaacaaggagacagagctactggatctcagccttgtcaaagatgccagatgtgggagacacgccaaagctcccaaggaccccaaattacgtgaacttttggatgtggggaacatcgggcgcctggagcagcgcatgatcacagtggtgtatgggcctgacctcgtgaacatctcccatttgaatctcgtggctttccaagaagaagtggccaaggaatggacaaatgaggttttcagtttggcaacaaacctgctggcccaaaacatgtccagggatgcatttctggaaaaagcctatactaaacttaagctgcaagtcactccagaagggcgtattcctctcaaaaacatatatcgcttgttttcagcagatcggaagcgagttgaaactgctttagaggcttgtagtcttccatcttcaaggaatgattcaatacctcaagaagatttcactccagaagtgtacagagttttcctcaacaacctttgccctcgacctgaaattgataacatcttttcagaatttggtgcaaaaagcaaaccatatcttaccgttgatcagatgatggattttatcaaccttaagcagcgagatcctcggcttaatgaaatactttatccacctctaaaacaagagcaagtccaagtattgattgagaagtatgaacccaacaacagcctcgccagaaaaggacaaatatcagtggatgggttcatgcgctatctgagtggagaagaaaacggagtcgtttcacctgagaaactggatttgaatgaagacatgtctcagcccctttctcactatttcattaattcctcgcacaacacctacctcacagctggccaactggctggaaactcctctgttgagatgtatcgccaagtgctcctgtctggttgtcgctgtgtggagctggactgctggaagggacggactgcagaagaggaacctgtcatcacccatggcttcaccatgacaactgaaatatctttcaaggaagtgatagaagcaattgcggagtgtgcatttaagacttcaccttttccaattctcctttcgtttgagaaccatgtggattccccaaagcagcaagccaagatggcggagtactgccgactgatctttggggatgcccttctcatggagcccctggaaaaatatccactggaatctggagttcctcttccaagccctatggatttaatgtataaaattttggtgaaaaataagaagaaatcacacaagtcatcagaaggaagcggcaaaaagaagctctcagaacaagcctccaacacctacagtgactcctccagcatgttcgagccctcatccccaggagccggagaagctgatacggaaagtgacgacgacgatgatgatgatgactgtaaaaaatcttcaatggatgaggggactgctggaagtgaggctatggccacagaagaaatgtctaatctggtgaactatattcagccagtcaagtttgagtcatttgaaatttcaaaaaaaagaaataaaagttttgaaatgtcttccttcgtggaaaccaaaggacttgaacaactcaccaagtctccagtggaatttgtagaatataacaaaatgcagcttagcaggatatatccaaaaggaacacgtgtggattcatccaactatatgcctcagctcttctggaatgcaggttgtcagatggtggcacttaatttccagacaatggacctggctatgcaaataaatatggggatgtatgaatacaacgggaagagtggctacagattgaagccagagttcatgaggaggcctgacaagcattttgatccatttactgaaggcatcgtagatgggatagtggcaaacactttgtctgttaagattatttcaggtcagtttctttctgataagaaagttgggacttacgtggaagtagatatgtttggtttgcctgtggatacaaggaggaaggcatttaagaccaaaacatcccaaggaaatgctgtgaatcctgtctgggaagaagaacctattgtgttcaaaaaggtggttcttcctactctggcctgtttgagaatagcagtttatgaagaaggaggtaaattcattggccaccgtatcttgccagtgcaagccattcggccaggctatcactatatctgtctaaggaatgaaaggaaccagcctctgacgctgcctgctgtctttgtctacatagaagtgaaagactatgtgccagacacatatgcagatgtcatcgaagctttatcaaacccaatccgatatgtgaacctgatggaacagagagctaagcaattggctgctttgacactggaagatgaagaagaagtaaagaaagaggctgatcctggagaaacaccatcagaggctccaagtgaagcgagaacgactccagcagaaaatggggtgaatcacactacaaccctgacacccaagccaccctcccaggctctccacagccagccagctccaggttctgtaaaggcacctgccaaaacagaagatcttattcagagtgtcttaacagaagtggaagcacagaccatcgaagaactaaagcaacagaaatcgtttgtgaaacttcaaaagaaacactacaaagaaatgaaagacctggttaagagacaccacaagaaaaccactgaccttatcaaagaacacactaccaagtataatgaaattcagaatgactacttgagaaggagagccgctttggaaaagtccgccaaaaaggacagtaagaaaaaatcggaacccagcagccctgatcatggttcatcaacgattgagcaagacctcgctgctctggatgctgaaatgacccaaaagttaatagacttgaaggacaaacaacagcagcagctgcttaatcttcggcaagaacagtattatagtgaaaaataccagaagcgagaacatattaaactgcttattcaaaagttgacggatgtcgcagaagagtgtcagaacaatcagttaaagaagctcaaagaaatctgtgagaaagaaaagaaagaattaaagaagaaaatggataaaaagaggcaggagaagataacagaagctaaatccaaagacaaaagtcagatggaagaggagaagacagagatgatccggtcatatatccaggaagtggtgcagtatatcaagaggctagaagaagcgcaaagtaaacggcaagaaaaactcgtagagaaacacaaggaaatacgtcagcagatcctggatgaaaagcccaagctgcaggtggagctggagcaagaataccaagacaaattcaaaagactgcccctcgagattttggaattcgtgcaggaagccatgaaaggaaagatcagtgaagacagcaatcacggttctgcccctctctccctgtcctcagaccctggaaaagtgaaccacaagactccctccagtgaggagctgggaggagacatcccaggaaaagaatttgatactcctctgtgaatgctcctgccaggccttcagaaattgcatggccactccagcgtcatcggactctctcttattacaaagatcactgcccaggaccatcttcccgagaagcatcccttagcctaaaatccacaccaaagggagagttccagaggaatccatgaagaattcccatgcccaggctccatgtgtcatgtggaaacctccacaggtctgctagtgaagaatgcatgtatgtgagatttttgttttctttccaatagcaaattcaaagcaagcaacttgcaggctccatggaacttttaatgaaggacagtgtcttctttgaagaaaatcaagctcgtgtttttattcgaagctctggtgtaaaatatttcaaagtcatagaaatagtttgagaaatgcatagcattatttaacactattgaacagccgactttgagcattgtttcttctaactgcccctcaactaccattatcttcaagtcaacatgcatattacattttcatcctttgctttgcaagcactggtggcttgcagtttgctaatttatttatcatagagtcatcaatgtatttgttgctgacatggttttattagatactgtagtgattcaaataagttttctatttgaaaaaaaaaatcacttgattgtatccttgcccagtgaagccatcctaagacttagcaatatggattgtacatttggctgcatgagcaagtcggccgcacacttccagacagtgtgctgtttgaattgactatttgcactcaaagtctgggtattcattggttattggcctgaaatgatcaaataactacaaatgatctgttgaataaaaatagttgagctgatatatgttaagcagatattcaatcagaatgaacaggttccggtggttattttgccgtttgacattttttatggttcatttatttttaatatagagaggaagattgaatatttatctagagaatacaaagacccacatgtaaatgataggtattatctccatgtatatatgtacccacttagtcatgtaagtgcatatacacatacacacacatgagtgtagacatgtgtttattaattgacaatgacccaaatctcttccacaagacttaaaaccaaattcagggacaaatggatagagaagaaaagggtcaaacatcgagattacatggatgttaaattatatggagacgctaagaaataattgatggagccattgatgcaaaccgaagtagatttagaacttatatgaatttgatttatattttgcaagatcaaaaattagatgttaagtatcagattttaagcttgttttaatggtcaaaaaattaggacagaaataatatggacatttattagtatcttccataatttttaagtctgacacatttctattttattctaacataaaaaaacttccattatatatttactaagtatatttaattcacttaactctgtctttataagttcctattttagatggaataagagaaacaaattatatcaaggtaaaactgatcaaaagcataattgaaagttctgaaaaaagaaaaataataatatgtagaaaaatgtaacttagagagtaacacatgaacattgaagttaaaacccagaagccagatgctcacagttttattttactttaaaataaacctgtctgactgtagctttgcgaaatatcttaaaacgcaaaaaccagttgtgtcctgaaaattgtttcaagaatttaatatttttatgaaaattattttatttaactttaagcaataactagagattacaattaaattttaatcaaaatgaaggcttagttcaaacataaggaaacagtgtttgattaaaaaaaacacatctagtaagacgtaaggggaaaatcacatcctctttggagatgattatattttgatctgaagggtttggggtgttcattagacacttaataaaacttaacttccaatgaaaaagaaatcttttgtaaatcattctacttttgcactttgaaagaaaggcgttaatcataaagaagcaagaatggtcaaaatcgaatgctgcatttttataaacaaaattacagactgtctgaaattgaagaagaatgaactaataatagcattcataaccaaacacaatgatgattattgcagaacattgtatcacattttagtccagagatagaataaagttgaataaccttgacttacacaaaactgttttggtagttggatttcattatcttagtgaatttagtcattttacaatatgtttgtatttggccatttactgtaatcacatttttatatctgtacaatgacactttttgcagttgtggggtagtgtgtaacactgtccatcttgcatcattgaaactactacaatgatactatcatttaataatattaatattacttgaaatagactaagataaagaaaaggggtctgtatgatgtgcagttttgtgcctttatgtatttgccttgttctttgtcgaatgtgtgaaattctgtactgtggtttttcctataatagaaagtagagctgtgtattaaattagactgtgtctctctgatacctttacactactgagaatagcatggttttggccatgtaaaccaattttcaaagttctaatgacatagccatgtgtttttggttttttatatttcattttaaaatttgagtatcaccatacattaattaatactcctgtagtagataagctgtcattaagtaattcccaaaaaaagggccatttgcttgcattactttgaatttaatgttgcgcttgtgcactgtgttaatattgtttgtgatggattggacgttgtgactcttgccttttaagaagaaaaaaaagataggacaaagtatttgaagctcttaaaatgtacatattttggttcttctatctcaaattatttaaaatgcataattcacatttttgtaataattctatgcaattttgtggcatgatgtttcttccacttgtaattttatgtgctttcatcacaaatccaaaggaaagaataaaaatttcttaacacaa

SEQ ID NO: 415761 - DNA, 6688 bp, Homo sapiens
atgggatccttgcagggaatcgccaccaagattttgattagaattttgtcagatgctctgataagaaaagaaactgacctgaaaagactcaactattgttactccaattattttgaggactgaccctcagggatttttcttttactggacagatcaaaacaaggagacagagctactggatctcagccttgtcaaagatgccagatgtgggagacacgccaaagctcccaaggaccccaaattacgtgaacttttggatgtggggaacatcgggcgcctggagcagcgcatgatcacagtggtgtatgggcctgacctcgtgaacatctcccatttgaatctcgtggctttccaagaagaagtggccaaggaatggacaaatgaggttttcagtttggcaacaaacctgctggcccaaaacatgtccagggatgcatttctggaaaaagcctatactaaacttaagctgcaagtcactccagaagggcgtattcctctcaaaaacatatatcgcttgttttcagcagatcggaagcgagttgaaactgctttagaggcttgtagtcttccatcttcaaggaatgattcaatacctcaagaagatttcactccagaagtgtacagagttttcctcaacaacctttgccctcgacctgaaattgataacatcttttcagaatttggtgcaaaaagcaaaccatatcttaccgttgatcagatgatggattttatcaaccttaagcagcgagatcctcggcttaatgaaatactttatccacctctaaaacaagagcaagtccaagtattgattgagaagtatgaacccaacaacagcctcgccagaaaaggacaaatatcagtggatgggttcatgcgctatctgagtggagaagaaaacggagtcgtttcacctgagaaactggatttgaatgaagacatgtctcagcccctttctcactatttcattaattcctcgcacaacacctacctcacagctggccaactggctggaaactcctctgttgagatgtatcgccaagtgctcctgtctggttgtcgctgtgtggagctggactgctggaagggacggactgcagaagaggaacctgtcatcacccatggcttcaccatgacaactgaaatatctttcaaggaagtgatagaagcaattgcggagtgtgcatttaagacttcaccttttccaattctcctttcgtttgagaaccatgtggattccccaaagcagcaagccaagatggcggagtactgccgactgatctttggggatgcccttctcatggagcccctggaaaaatatccactggaatctggagttcctcttccaagccctatggatttaatgtataaaattttggtgaaaaataagaagaaatcacacaagtcatcagaaggaagcggcaaaaagaagctctcagaacaagcctccaacacctacagtgactcctccagcatgttcgagccctcatccccaggagccggagaagctgatacggaaagtgacgacgacgatgatgatgatgactgtaaaaaatcttcaatggatgaggggactgctggaagtgaggctatggccacagaagaaatgtctaatctggtgaactatattcagccagtcaagtttgagtcatttgaaatttcaaaaaaaagaaataaaagttttgaaatgtcttccttcgtggaaaccaaaggacttgaacaactcaccaagtctccagtggaatttgtagaatataacaaaatgcagcttagcaggatatatccaaaaggaacacgtgtggattcatccaactatatgcctcagctcttctggaatgcaggttgtcagatggtggcacttaatttccagacaatggacctggctatgcaaataaatatggggatgtatgaatacaacgggaagagtggctacagattgaagccagagttcatgaggaggcctgacaagcattttgatccatttactgaaggcatcgtagatgggatagtggcaaacactttgtctgttaagattatttcaggtcagtttctttctgataagaaagttgggacttacgtggaagtagatatgtttggtttgcctgtggatacaaggaggaaggcatttaagaccaaaacatcccaaggaaatgctgtgaatcctgtctgggaagaagaacctattgtgttcaaaaaggtggttcttcctactctggcctgtttgagaatagcagtttatgaagaaggaggtaaattcattggccaccgtatcttgccagtgcaagccattcggccaggctatcactatatctgtctaaggaatgaaaggaaccagcctctgacgctgcctgctgtctttgtctacatagaagtgaaagactatgtgccagacacatatgcagatgtcatcgaagctttatcaaacccaatccgatatgtgaacctgatggaacagagagctaagcaattggctgctttgacactggaagatgaagaagaagtaaagaaagaggctgatcctggagaaacaccatcagaggctccaagtgaagcgagaacgactccagcagaaaatggggtgaatcacactacaaccctgacacccaagccaccctcccaggctctccacagccagccagctccaggttctgtaaaggcacctgccaaaacagaagatcttattcagagtgtcttaacagaagtggaagcacagaccatcgaagaactaaagcaacagaaatcgtttgtgaaacttcaaaagaaacactacaaagaaatgaaagacctggttaagagacaccacaagaaaaccactgaccttatcaaagaacacactaccaagtataatgaaattcagaatgactacttgagaaggagagccgctttggaaaagtccgccaaaaaggacagtaagaaaaaatcggaacccagcagccctgatcatggttcatcaacgattgagcaagacctcgctgctctggatgctgaaatgacccaaaagttaatagacttgaaggacaaacaacagcagcagctgcttaatcttcggcaagaacagtattatagtgaaaaataccagaagcgagaacatattaaactgcttattcaaaagttgacggatgtcgcagaagagtgtcagaacaatcagttaaagaagctcaaagaaatctgtgagaaagaaaagaaagaattaaagaagaaaatggataaaaagaggcaggagaagataacagaagctaaatccaaagacaaaagtcagatggaagaggagaagacagagatgatccggtcatatatccaggaagtggtgcagtatatcaagaggctagaagaagcgcaaagtaaacggcaagaaaaactcgtagagaaacacaaggaaatacgtcagcagatcctggatgaaaagcccaagctgcaggtggagctggagcaagaataccaagacaaattcaaaagactgcccctcgagattttggaattcgtgcaggaagccatgaaaggaaagatcagtgaagacagcaatcacggttctgcccctctctccctgtcctcagaccctggaaaagtgaaccacaagactccctccagtgaggagctgggaggagacatcccaggaaaagaatttgatactcctctgtgaatgctcctgccaggccttcagaaattgcatggccactccagcgtcatcggactctctcttattacaaagatcactgcccaggaccatcttcccgagaagcatcccttagcctaaaatccacaccaaagggagagttccagaggaatccatgaagaattcccatgcccaggctccatgtgtcatgtggaaacctccacaggtctgctagtgaagaatgcatgtatgtgagatttttgttttctttccaatagcaaattcaaagcaagcaacttgcaggctccatggaacttttaatgaaggacagtgtcttctttgaagaaaatcaagctcgtgtttttattcgaagctctggtgtaaaatatttcaaagtcatagaaatagtttgagaaatgcatagcattatttaacactattgaacagccgactttgagcattgtttcttctaactgcccctcaactaccattatcttcaagtcaacatgcatattacattttcatcctttgctttgcaagcactggtggcttgcagtttgctaatttatttatcatagagtcatcaatgtatttgttgctgacatggttttattagatactgtagtgattcaaataagttttctatttgaaaaaaaaaatcacttgattgtatccttgcccagtgaagccatcctaagacttagcaatatggattgtacatttggctgcatgagcaagtcggccgcacacttccagacagtgtgctgtttgaattgactatttgcactcaaagtctgggtattcattggttattggcctgaaatgatcaaataactacaaatgatctgttgaataaaaatagttgagctgatatatgttaagcagatattcaatcagaatgaacaggttccggtggttattttgccgtttgacattttttatggttcatttatttttaatatagagaggaagattgaatatttatctagagaatacaaagacccacatgtaaatgataggtattatctccatgtatatatgtacccacttagtcatgtaagtgcatatacacatacacacacatgagtgtagacatgtgtttattaattgacaatgacccaaatctcttccacaagacttaaaaccaaattcagggacaaatggatagagaagaaaagggtcaaacatcgagattacatggatgttaaattatatggagacgctaagaaataattgatggagccattgatgcaaaccgaagtagatttagaacttatatgaatttgatttatattttgcaagatcaaaaattagatgttaagtatcagattttaagcttgttttaatggtcaaaaaattaggacagaaataatatggacatttattagtatcttccataatttttaagtctgacacatttctattttattctaacataaaaaaacttccattatatatttactaagtatatttaattcacttaactctgtctttataagttcctattttagatggaataagagaaacaaattatatcaaggtaaaactgatcaaaagcataattgaaagttctgaaaaaagaaaaataataatatgtagaaaaatgtaacttagagagtaacacatgaacattgaagttaaaacccagaagccagatgctcacagttttattttactttaaaataaacctgtctgactgtagctttgcgaaatatcttaaaacgcaaaaaccagttgtgtcctgaaaattgtttcaagaatttaatatttttatgaaaattattttatttaactttaagcaataactagagattacaattaaattttaatcaaaatgaaggcttagttcaaacataaggaaacagtgtttgattaaaaaaaacacatctagtaagacgtaaggggaaaatcacatcctctttggagatgattatattttgatctgaagggtttggggtgttcattagacacttaataaaacttaacttccaatgaaaaagaaatcttttgtaaatcattctacttttgcactttgaaagaaaggcgttaatcataaagaagcaagaatggtcaaaatcgaatgctgcatttttataaacaaaattacagactgtctgaaattgaagaagaatgaactaataatagcattcataaccaaacacaatgatgattattgcagaacattgtatcacattttagtccagagatagaataaagttgaataaccttgacttacacaaaactgttttggtagttggatttcattatcttagtgaatttagtcattttacaatatgtttgtatttggccatttactgtaatcacatttttatatctgtacaatgacactttttgcagttgtggggtagtgtgtaacactgtccatcttgcatcattgaaactactacaatgatactatcatttaataatattaatattacttgaaatagactaagataaagaaaaggggtctgtatgatgtgcagttttgtgcctttatgtatttgccttgttctttgtcgaatgtgtgaaattctgtactgtggtttttcctataatagaaagtagagctgtgtattaaattagactgtgtctctctgatacctttacactactgagaatagcatggttttggccatgtaaaccaattttcaaagttctaatgacatagccatgtgtttttggttttttatatttcattttaaaatttgagtatcaccatacattaattaatactcctgtagtagataagctgtcattaagtaattcccaaaaaaagggccatttgcttgcattactttgaatttaatgttgcgcttgtgcactgtgttaatattgtttgtgatggattggacgttgtgactcttgccttttaagaagaaaaaaaagataggacaaagtatttgaagctcttaaaatgtacatattttggttcttctatctcaaattatttaaaatgcataattcacatttttgtaataattctatgcaattttgtggcatgatgtttcttccacttgtaattttatgtgctttcatcacaaatccaaaggaaagaataaaaatttcttaacacaa

SEQ ID NO: 415762 - DNA, 5854 bp, Homo sapiens
ttacaaatttcacttgataatttacatggaaatatgaaagggttctttctccaagtgtcttgcaattgacttggaatcagcgagttaaacaaaagggactgagcctctaactctgggaatttcaaggctccagttacagcaaatgacatgctgtcccctccacctatgtctatgcaggtctgccttgggaaccacctcacacatcagtgccttcgctgtccatctgtgtatgttattcaaattcacataagttaagataaagatccaggatgataaaaaccaatcctgataggtgggattagagaattacttctttctgtagttaataacacaaagcaatcctgttcaggttctttggataagcctccctactttccttcttctgttcttgttctcccttagcccaaagcagcaagccaagatggcggagtactgccgactgatctttggggatgcccttctcatggagcccctggaaaaatatccactggaatctggagttcctcttccaagccctatggatttaatgtataaaattttggtgaaaaataagaagaaatcacacaagtcatcagaaggaagcggcaaaaagaagctctcagaacaagcctccaacacctacagtgactcctccagcatgttcgagccctcatccccaggagccggagaagctgatacggaaagtgacgacgacgatgatgatgatgactgtaaaaaatcttcaatggatgaggggactgctggaagtgaggctatggccacagaagaaatgtctaatctggtgaactatattcagccagtcaagtttgagtcatttgaaatttcaaaaaaaagaaataaaagttttgaaatgtcttccttcgtggaaaccaaaggacttgaacaactcaccaagtctccagtggaatttgtagaatataacaaaatgcagcttagcaggatatatccaaaaggaacacgtgtggattcatccaactatatgcctcagctcttctggaatgcaggttgtcagatggtggcacttaatttccagacaatggacctggctatgcaaataaatatggggatgtatgaatacaacgggaagagtggctacagattgaagccagagttcatgaggaggcctgacaagcattttgatccatttactgaaggcatcgtagatgggatagtggcaaacactttgtctgttaagattatttcaggtcagtttctttctgataagaaagttgggacttacgtggaagtagatatgtttggtttgcctgtggatacaaggaggaaggcatttaagaccaaaacatcccaaggaaatgctgtgaatcctgtctgggaagaagaacctattgtgttcaaaaaggtggttcttcctactctggcctgtttgagaatagcagtttatgaagaaggaggtaaattcattggccaccgtatcttgccagtgcaagccattcggccaggctatcactatatctgtctaaggaatgaaaggaaccagcctctgacgctgcctgctgtctttgtctacatagaagtgaaagactatgtgccagacacatatgcagatgtcatcgaagctttatcaaacccaatccgatatgtgaacctgatggaacagagagctaagcaattggctgctttgacactggaagatgaagaagaagtaaagaaagaggctgatcctggagaaacaccatcagaggctccaagtgaagcgagaacgactccagcagaaaatggggtgaatcacactacaaccctgacacccaagccaccctcccaggctctccacagccagccagctccaggttctgtaaaggcacctgccaaaacagaagatcttattcagagtgtcttaacagaagtggaagcacagaccatcgaagaactaaagcaacagaaatcgtttgtgaaacttcaaaagaaacactacaaagaaatgaaagacctggttaagagacaccacaagaaaaccactgaccttatcaaagaacacactaccaagtataatgaaattcagaatgactacttgagaaggagagccgctttggaaaagtccgccaaaaaggacagtaagaaaaaatcggaacccagcagccctgatcatggttcatcaacgattgagcaagacctcgctgctctggatgctgaaatgacccaaaagttaatagacttgaaggacaaacaacagcagcagctgcttaatcttcggcaagaacagtattatagtgaaaaataccagaagcgagaacatattaaactgcttattcaaaagttgacggatgtcgcagaagagtgtcagaacaatcagttaaagaagctcaaagaaatctgtgagaaagaaaagaaagaattaaagaagaaaatggataaaaagaggcaggagaagataacagaagctaaatccaaagacaaaagtcagatggaagaggagaagacagagatgatccggtcatatatccaggaagtggtgcagtatatcaagaggctagaagaagcgcaaagtaaacggcaagaaaaactcgtagagaaacacaaggaaatacgtcagcagatcctggatgaaaagcccaagctgcaggtggagctggagcaagaataccaagacaaattcaaaagactgcccctcgagattttggaattcgtgcaggaagccatgaaaggaaagatcagtgaagacagcaatcacggttctgcccctctctccctgtcctcagaccctggaaaagtgaaccacaagactccctccagtgaggagctgggaggagacatcccaggaaaagaatttgatactcctctgtgaatgctcctgccaggccttcagaaattgcatggccactccagcgtcatcggactctctcttattacaaagatcactgcccaggaccatcttcccgagaagcatcccttagcctaaaatccacaccaaagggagagttccagaggaatccatgaagaattcccatgcccaggctccatgtgtcatgtggaaacctccacaggtctgctagtgaagaatgcatgtatgtgagatttttgttttctttccaatagcaaattcaaagcaagcaacttgcaggctccatggaacttttaatgaaggacagtgtcttctttgaagaaaatcaagctcgtgtttttattcgaagctctggtgtaaaatatttcaaagtcatagaaatagtttgagaaatgcatagcattatttaacactattgaacagccgactttgagcattgtttcttctaactgcccctcaactaccattatcttcaagtcaacatgcatattacattttcatcctttgctttgcaagcactggtggcttgcagtttgctaatttatttatcatagagtcatcaatgtatttgttgctgacatggttttattagatactgtagtgattcaaataagttttctatttgaaaaaaaaaatcacttgattgtatccttgcccagtgaagccatcctaagacttagcaatatggattgtacatttggctgcatgagcaagtcggccgcacacttccagacagtgtgctgtttgaattgactatttgcactcaaagtctgggtattcattggttattggcctgaaatgatcaaataactacaaatgatctgttgaataaaaatagttgagctgatatatgttaagcagatattcaatcagaatgaacaggttccggtggttattttgccgtttgacattttttatggttcatttatttttaatatagagaggaagattgaatatttatctagagaatacaaagacccacatgtaaatgataggtattatctccatgtatatatgtacccacttagtcatgtaagtgcatatacacatacacacacatgagtgtagacatgtgtttattaattgacaatgacccaaatctcttccacaagacttaaaaccaaattcagggacaaatggatagagaagaaaagggtcaaacatcgagattacatggatgttaaattatatggagacgctaagaaataattgatggagccattgatgcaaaccgaagtagatttagaacttatatgaatttgatttatattttgcaagatcaaaaattagatgttaagtatcagattttaagcttgttttaatggtcaaaaaattaggacagaaataatatggacatttattagtatcttccataatttttaagtctgacacatttctattttattctaacataaaaaaacttccattatatatttactaagtatatttaattcacttaactctgtctttataagttcctattttagatggaataagagaaacaaattatatcaaggtaaaactgatcaaaagcataattgaaagttctgaaaaaagaaaaataataatatgtagaaaaatgtaacttagagagtaacacatgaacattgaagttaaaacccagaagccagatgctcacagttttattttactttaaaataaacctgtctgactgtagctttgcgaaatatcttaaaacgcaaaaaccagttgtgtcctgaaaattgtttcaagaatttaatatttttatgaaaattattttatttaactttaagcaataactagagattacaattaaattttaatcaaaatgaaggcttagttcaaacataaggaaacagtgtttgattaaaaaaaacacatctagtaagacgtaaggggaaaatcacatcctctttggagatgattatattttgatctgaagggtttggggtgttcattagacacttaataaaacttaacttccaatgaaaaagaaatcttttgtaaatcattctacttttgcactttgaaagaaaggcgttaatcataaagaagcaagaatggtcaaaatcgaatgctgcatttttataaacaaaattacagactgtctgaaattgaagaagaatgaactaataatagcattcataaccaaacacaatgatgattattgcagaacattgtatcacattttagtccagagatagaataaagttgaataaccttgacttacacaaaactgttttggtagttggatttcattatcttagtgaatttagtcattttacaatatgtttgtatttggccatttactgtaatcacatttttatatctgtacaatgacactttttgcagttgtggggtagtgtgtaacactgtccatcttgcatcattgaaactactacaatgatactatcatttaataatattaatattacttgaaatagactaagataaagaaaaggggtctgtatgatgtgcagttttgtgcctttatgtatttgccttgttctttgtcgaatgtgtgaaattctgtactgtggtttttcctataatagaaagtagagctgtgtattaaattagactgtgtctctctgatacctttacactactgagaatagcatggttttggccatgtaaaccaattttcaaagttctaatgacatagccatgtgtttttggttttttatatttcattttaaaatttgagtatcaccatacattaattaatactcctgtagtagataagctgtcattaagtaattcccaaaaaaagggccatttgcttgcattactttgaatttaatgttgcgcttgtgcactgtgttaatattgtttgtgatggattggacgttgtgactcttgccttttaagaagaaaaaaaagataggacaaagtatttgaagctcttaaaatgtacatattttggttcttctatctcaaattatttaaaatgcataattcacatttttgtaataattctatgcaattttgtggcatgatgtttcttccacttgtaattttatgtgctttcatcacaaatccaaaggaaagaataaaaatttcttaacacaa

SEQ ID NO: 415763 - DNA, 6651 bp, Homo sapiens
cagatggccggggctcaacccggagtgcacgccttgcaactcaagcccgtgtgcgtgtccgacagcctcaagaagggcaccaaattcgtcaagtgggatgatgactcaactattgttactccaattattttgaggactgaccctcagggatttttcttttactggacagatcaaaacaaggagacagagctactggatctcagccttgtcaaagatgccagatgtgggagacacgccaaagctcccaaggaccccaaattacgtgaacttttggatgtggggaacatcgggcgcctggagcagcgcatgatcacagtggtgtatgggcctgacctcgtgaacatctcccatttgaatctcgtggctttccaagaagaagtggccaaggaatggacaaatgaggttttcagtttggcaacaaacctgctggcccaaaacatgtccagggatgcatttctggaaaaagcctatactaaacttaagctgcaagtcactccagaagggcgtattcctctcaaaaacatatatcgcttgttttcagcagatcggaagcgagttgaaactgctttagaggcttgtagtcttccatcttcaaggaatgattcaatacctcaagaagatttcactccagaagtgtacagagttttcctcaacaacctttgccctcgacctgaaattgataacatcttttcagaatttggtgcaaaaagcaaaccatatcttaccgttgatcagatgatggattttatcaaccttaagcagcgagatcctcggcttaatgaaatactttatccacctctaaaacaagagcaagtccaagtattgattgagaagtatgaacccaacaacagcctcgccagaaaaggacaaatatcagtggatgggttcatgcgctatctgagtggagaagaaaacggagtcgtttcacctgagaaactggatttgaatgaagacatgtctcagcccctttctcactatttcattaattcctcgcacaacacctacctcacagctggccaactggctggaaactcctctgttgagatgtatcgccaagtgctcctgtctggttgtcgctgtgtggagctggactgctggaagggacggactgcagaagaggaacctgtcatcacccatggcttcaccatgacaactgaaatatctttcaaggaagtgatagaagcaattgcggagtgtgcatttaagacttcaccttttccaattctcctttcgtttgagaaccatgtggattccccaaagcagcaagccaagatggcggagtactgccgactgatctttggggatgcccttctcatggagcccctggaaaaatatccactggaatctggagttcctcttccaagccctatggatttaatgtataaaattttggtgaaaaataagaagaaatcacacaagtcatcagaaggaagcggcaaaaagaagctctcagaacaagcctccaacacctacagtgactcctccagcatgttcgagccctcatccccaggagccggagaagctgatacggaaagtgacgacgacgatgatgatgatgactgtaaaaaatcttcaatggatgaggggactgctggaagtgaggctatggccacagaagaaatgtctaatctggtgaactatattcagccagtcaagtttgagtcatttgaaatttcaaaaaaaagaaataaaagttttgaaatgtcttccttcgtggaaaccaaaggacttgaacaactcaccaagtctccagtggaatttgtagaatataacaaaatgcagcttagcaggatatatccaaaaggaacacgtgtggattcatccaactatatgcctcagctcttctggaatgcaggttgtcagatggtggcacttaatttccagacaatggacctggctatgcaaataaatatggggatgtatgaatacaacgggaagagtggctacagattgaagccagagttcatgaggaggcctgacaagcattttgatccatttactgaaggcatcgtagatgggatagtggcaaacactttgtctgttaagattatttcaggtcagtttctttctgataagaaagttgggacttacgtggaagtagatatgtttggtttgcctgtggatacaaggaggaaggcatttaagaccaaaacatcccaaggaaatgctgtgaatcctgtctgggaagaagaacctattgtgttcaaaaaggtggttcttcctactctggcctgtttgagaatagcagtttatgaagaaggaggtaaattcattggccaccgtatcttgccagtgcaagccattcggccaggctatcactatatctgtctaaggaatgaaaggaaccagcctctgacgctgcctgctgtctttgtctacatagaagtgaaagactatgtgccagacacatatgcagatgtcatcgaagctttatcaaacccaatccgatatgtgaacctgatggaacagagagctaagcaattggctgctttgacactggaagatgaagaagaagtaaagaaagaggctgatcctggagaaacaccatcagaggctccaagtgaagcgagaacgactccagcagaaaatggggtgaatcacactacaaccctgacacccaagccaccctcccaggctctccacagccagccagctccaggttctgtaaaggcacctgccaaaacagaagatcttattcagagtgtcttaacagaagtggaagcacagaccatcgaagaactaaagcaacagaaatcgtttgtgaaacttcaaaagaaacactacaaagaaatgaaagacctggttaagagacaccacaagaaaaccactgaccttatcaaagaacacactaccaagtataatgaaattcagaatgactacttgagaaggagagccgctttggaaaagtccgccaaaaaggacagtaagaaaaaatcggaacccagcagccctgatcatggttcatcaacgattgagcaagacctcgctgctctggatgctgaaatgacccaaaagttaatagacttgaaggacaaacaacagcagcagctgcttaatcttcggcaagaacagtattatagtgaaaaataccagaagcgagaacatattaaactgcttattcaaaagttgacggatgtcgcagaagagtgtcagaacaatcagttaaagaagctcaaagaaatctgtgagaaagaaaagaaagaattaaagaagaaaatggataaaaagaggcaggagaagataacagaagctaaatccaaagacaaaagtcagatggaagaggagaagacagagatgatccggtcatatatccaggaagtggtgcagtatatcaagaggctagaagaagcgcaaagtaaacggcaagaaaaactcgtagagaaacacaaggaaatacgtcagcagatcctggatgaaaagcccaagctgcaggtggagctggagcaagaataccaagacaaattcaaaagactgcccctcgagattttggaattcgtgcaggaagccatgaaaggaaagatcagtgaagacagcaatcacggttctgcccctctctccctgtcctcagaccctggaaaagtgaaccacaagactccctccagtgaggagctgggaggagacatcccaggaaaagaatttgatactcctctgtgaatgctcctgccaggccttcagaaattgcatggccactccagcgtcatcggactctctcttattacaaagatcactgcccaggaccatcttcccgagaagcatcccttagcctaaaatccacaccaaagggagagttccagaggaatccatgaagaattcccatgcccaggctccatgtgtcatgtggaaacctccacaggtctgctagtgaagaatgcatgtatgtgagatttttgttttctttccaatagcaaattcaaagcaagcaacttgcaggctccatggaacttttaatgaaggacagtgtcttctttgaagaaaatcaagctcgtgtttttattcgaagctctggtgtaaaatatttcaaagtcatagaaatagtttgagaaatgcatagcattatttaacactattgaacagccgactttgagcattgtttcttctaactgcccctcaactaccattatcttcaagtcaacatgcatattacattttcatcctttgctttgcaagcactggtggcttgcagtttgctaatttatttatcatagagtcatcaatgtatttgttgctgacatggttttattagatactgtagtgattcaaataagttttctatttgaaaaaaaaaatcacttgattgtatccttgcccagtgaagccatcctaagacttagcaatatggattgtacatttggctgcatgagcaagtcggccgcacacttccagacagtgtgctgtttgaattgactatttgcactcaaagtctgggtattcattggttattggcctgaaatgatcaaataactacaaatgatctgttgaataccggtggttattttgccgtttgacattttttatggttcatttatttttaatatagagaggaagattgaatatttatctagagaatacaaagacccacatgtaaatgataggtattatctccatgtatatatgtacccacttagtcatgtaagtgcatatacacatacacacacatgagtgtagacatgtgtttattaattgacaatgacccaaatctcttccacaagacttaaaaccaaattcagggacaaatggatagagaagaaaagggtcaaacatcgagattacatggatgttaaattatatggagacgctaagaaataattgatggagccattgatgcaaaccgaagtagatttagaacttatatgaatttgatttatattttgcaagatcaaaaattagatgttaagtatcagattttaagcttgttttaatggtcaaaaaattaggacagaaataatatggacatttattagtatcttccataatttttaagtctgacacatttctattttattctaacataaaaaaacttccattatatatttactaagtatatttaattcacttaactctgtctttataagttcctattttagatggaataagagaaacaaattatatcaaggtaaaactgatcaaaagcataattgaaagttctgaaaaaagaaaaataataatatgtagaaaaatgtaacttagagagtaacacatgaacattgaagttaaaacccagaagccagatgctcacagttttattttactttaaaataaacctgtctgactgtagctttgcgaaatatcttaaaacgcaaaaaccagttgtgtcctgaaaattgtttcaagaatttaatatttttatgaaaattattttatttaactttaagcaataactagagattacaattaaattttaatcaaaatgaaggcttagttcaaacataaggaaacagtgtttgattaaaaaaaacacatctagtaagacgtaaggggaaaatcacatcctctttggagatgattatattttgatctgaagggtttggggtgttcattagacacttaataaaacttaacttccaatgaaaaagaaatcttttgtaaatcattctacttttgcactttgaaagaaaggcgttaatcataaagaagcaagaatggtcaaaatcgaatgctgcatttttataaacaaaattacagactgtctgaaattgaagaagaatgaactaataatagcattcataaccaaacacaatgatgattattgcagaacattgtatcacattttagtccagagatagaataaagttgaataaccttgacttacacaaaactgttttggtagttggatttcattatcttagtgaatttagtcattttacaatatgtttgtatttggccatttactgtaatcacatttttatatctgtacaatgacactttttgcagttgtggggtagtgtgtaacactgtccatcttgcatcattgaaactactacaatgatactatcatttaataatattaatattacttgaaatagactaagataaagaaaaggggtctgtatgatgtgcagttttgtgcctttatgtatttgccttgttctttgtcgaatgtgtgaaattctgtactgtggtttttcctataatagaaagtagagctgtgtattaaattagactgtgtctctctgatacctttacactactgagaatagcatggttttggccatgtaaaccaattttcaaagttctaatgacatagccatgtgtttttggttttttatatttcattttaaaatttgagtatcaccatacattaattaatactcctgtagtagataagctgtcattaagtaattcccaaaaaaagggccatttgcttgcattactttgaatttaatgttgcgcttgtgcactgtgttaatattgtttgtgatggattggacgttgtgactcttgccttttaagaagaaaaaaaagataggacaaagtatttgaagctcttaaaatgtacatattttggttcttctatctcaaattatttaaaatgcataattcacatttttgtaataattctatgcaattttgtggcatgatgtttcttccacttgtaattttatgtgctttcatcacaaatccaaaggaaagaataaaaatttcttaacacaa

SEQ ID NO: 415764 - DNA, 6993 bp, Homo sapiens
cagatggccggggctcaacccggagtgcacgccttgcaactcaagcccgtgtgcgtgtccgacagcctcaagaagggcaccaaattcgtcaagtgggatgatgactcaactattgttactccaattattttgaggactgaccctcagggatttttcttttactggacagatcaaaacaaggagacagagctactggatctcagccttgtcaaagatgccagatgtgggagacacgccaaagctcccaaggaccccaaattacgtgaacttttggatgtggggaacatcgggcgcctggagcagcgcatgatcacagtggtgtatgggcctgacctcgtgaacatctcccatttgaatctcgtggctttccaagaagaagtggccaaggaatggacaaatgaggttttcagtttggcaacaaacctgctggcccaaaacatgtccagggatgcatttctggaaaaagcctatactaaacttaagctgcaagtcactccagaagggcgtattcctctcaaaaacatatatcgcttgttttcagcagatcggaagcgagttgaaactgctttagaggcttgtagtcttccatcttcaaggaatgattcaatacctcaagaagatttcactccagaagtgtacagagttttcctcaacaacctttgccctcgacctgaaattgataacatcttttcagaatttggtgcaaaaagcaaaccatatcttaccgttgatcagatgatggattttatcaaccttaagcagcgagatcctcggcttaatgaaatactttatccacctctaaaacaagagcaagtccaagtattgattgagaagtatgaacccaacaacagcctcgccagaaaaggacaaatatcagtggatgggttcatgcgctatctgagtggagaagaaaacggagtcgtttcacctgagaaactggatttgaatgaagacatgtctcagcccctttctcactatttcattaattcctcgcacaacacctacctcacagctggccaactggctggaaactcctctgttgagatgtatcgccaagtgctcctgtctggttgtcgctgtgtggagctggactgctggaagggacggactgcagaagaggaacctgtcatcacccatggcttcaccatgacaactgaaatatctttcaaggaagtgatagaagcaattgcggagtgtgcatttaagacttcaccttttccaattctcctttcgtttgagaaccatgtggattccccaaagcagcaagccaagatggcggagtactgccgactgatctttggggatgcccttctcatggagcccctggaaaaatatccactggaatctggagttcctcttccaagccctatggatttaatgtataaaattttggtgaaaaataagaagaaatcacacaagtcatcagaaggaagcggcaaaaagaagctctcagaacaagcctccaacacctacagtgactcctccagcatgttcgagccctcatccccaggagccggagaagctgatacggaaagtgacgacgacgatgatgatgatgactgtaaaaaatcttcaatggatgaggggactgctggaagtgaggctatggccacagaagaaatgtctaatctggtgaactatattcagccagtcaagtttgagtcatttgaaatttcaaaaaaaagaaataaaagttttgaaatgtcttccttcgtggaaaccaaaggacttgaacaactcaccaagtctccagtggaatttgtagaatataacaaaatgcagcttagcaggatatatccaaaaggaacacgtgtggattcatccaactatatgcctcagctcttctggaatgcaggttgtcagatggtggcacttaatttccagacaatggacctggctatgcaaataaatatggggatgtatgaatacaacgggaagagtggctacagattgaagccagagttcatgaggaggcctgacaagcattttgatccatttactgaaggcatcgtagatgggatagtggcaaacactttgtctgttaagattatttcaggtcagtttctttctgataagaaagttgggacttacgtggaagtagatatgtttggtttgcctgtggatacaaggaggaaggcatttaagaccaaaacatcccaaggaaatgctgtgaatcctgtctgggaagaagaacctattgtgttcaaaaaggtggttcttcctactctggcctgtttgagaatagcagtttatgaagaaggaggtaaattcattggccaccgtatcttgccagtgcaagccattcggccaggctatcactatatctgtctaaggaatgaaaggaaccagcctctgacgctgcctgctgtctttgtctacatagaagtgaaagactatgtgccagacacatatgcagatgtcatcgaagctttatcaaacccaatccgatatgtgaacctgatggaacagagagctaagcaattggctgctttgacactggaagatgaagaagaagtaaagaaagaggctgatcctggagaaacaccatcagaggctccaagtgaagcgagaacgactccagcagaaaatggggtgaatcacactacaaccctgacacccaagccaccctcccaggctctccacagccagccagctccaggttctgtaaaggcacctgccaaaacagaagatcttattcagagtgtcttaacagaagtggaagcacagaccatcgaagaactaaagcaacagaaatcgtttgtgaaacttcaaaagaaacactacaaagaaatgaaagacctggttaagagacaccacaagaaaaccactgaccttatcaaagaacacactaccaagtataatgaaattcagaatgactacttgagaaggagagccgctttggaaaagtccgccaaaaaggacagtaagaaaaaatcggaacccagcagccctgatcatggttcatcaacgattgagcaagacctcgctgctctggatgctgaaatgacccaaaagttaatagacttgaaggacaaacaacagcagcagctgcttaatcttcggcaagaacagtattatagtgaaaaataccagaagcgagaacatattaaactgcttattcaaaagttgacggatgtcgcagaagagtgtcagaacaatcagttaaagaagctcaaagaaatctgtgagaaagaaaagaaagaattaaagaagaaaatggataaaaagaggcaggagaagataacagaagctaaatccaaagacaaaagtcagatggaagaggagaagacagagatgatccggtcatatatccaggaagtggtgcagtatatcaagaggctagaagaagcgcaaagtaaacggcaagaaaaactcgtagagaaacacaaggaaatacgtcagcagatcctggatgaaaagcccaagctgcaggtggagctggagcaagaataccaagacaaattcaaaagactgcccctcgagattttggaattcgtgcaggaagccatgaaaggaaagatcagtgaagacagcaatcacggttctgcccctctctccctgtcctcagaccctggaaaagtgaaccacaagactccctccagtgaggagctgggaggagacatcccaggaaaagaatttgatactcctctgtgaatgctcctgccaggccttcagaaattgcatggccactccagcgtcatcggactctctcttattacaaagatcactgcccaggaccatcttcccgagaagcatcccttagcctaaaatccacaccaaagggagagttccagaggaatccatgaagaattcccatgcccaggctccatgtgtcatgtggaaacctccacaggtctgctagtgaagaatgcatgtatgtgagatttttgttttctttccaatagcaaattcaaagcaagcaacttgcaggctccatggaacttttaatgaaggacagtgtcttctttgaagaaaatcaagctcgtgtttttattcgaagctctggtgtaaaatatttcaaagtcatagaaatagtttgagaaatgcatagcattatttaacactattgaacagccgactttgagcattgtttcttctaactgcccctcaactaccattatcttcaagtcaacatgcatattacattttcatcctttgctttgcaagcactggtggcttgcagtttgctaatttatttatcatagagtcatcaatgtatttgttgctgacatggttttattagatactgtagtgattcaaataagttttctatttgaaaaaaaaaatcacttgattgtatccttgcccagtgaagccatcctaagacttagcaatatggattgtacatttggctgcatgagcaagtcggccgcacacttccagacagtgtgctgtttgaattgactatttgcactcaaagtctgggtattcattggttattggcctgaaatgatcaaataactacaaatgatctgttgaataaaaatagttgagctgatatatgttaagcagatattcaatcagaatgaacaggttccggtggttattttgccgtttgacattttttatggttcatttatttttaatatagagaggaagattgaatatttatctagagaatacaaagacccacatgtaaatgataggtattatctccatgtatatatgtacccacttagtcatgtaagtgcatatacacatacacacacatgagtgtagacatgtgtttattaattgacaatgacccaaatctcttccacaagacttaaaaccaaattcagggacaaatggatagagaagaaaagggtcaaacatcgagattacatggatgttaaattatatggagacgctaagaaataattgatggagccattgatgcaaaccgaagtagatttagaacttatatgaatttgatttatattttgcaagatcaaaaattagatgttaagtatcagattttaagcttgttttaatggtcaaaaaattaggacagaaataatatggacatttattagtatcttccataatttttaagtctgacacatttctattttattctaacataaaaaaacttccattatatatttactaagtatatttaattcacttaactctgtctttataagttcctattttagatggaataagagaaacaaattatatcaaggtaaaactgatcaaaagcataattgaaagttctgaaaaaagaaaaataataatatgtagaaaaatgtaacttagagagtaacacatgaacattgaagttaaaacccagaagccagatgctcacagttttattttactttaaaataaacctgtctgactgtagctttgcgaaatatcttaaaacgcaaaaaccagttgtgtcctgaaaattgtttcaagaatttaatatttttatgaaaattattttatttaactttaagcaataactagagattacaattaaattttaatcaaaatgaaggcttagttcaaacataaggaaacagtgtttgattaaaaaaaacacatctagtaagacgtaaggggaaaatcacatcctctttggagatgattatattttgatctgaagggtttggggtgttcattagacacttaataaaacttaacttccaatgaaaaagaaatcttttgtaaatcattctacttttgcactttgaaagaaaggcgttaatcataaagaagcaagaatggtcaaaatcgaatgctgcatttttataaacaaaattacagactgtctgaaattgaagaagaatgaactaataatagcattcataaccaaacacaatgatgattattgcagaacattgtatcacattttagtccagagatagaataaagttgaataaccttgacttacacaaaactgttttggtagttggatttcattatcttagtgaatttagtcattttacaatatgtttgtatttggccatttactgtaatcacatttttatatctgtacaatgacactttttgcagttgtggggtagtgtgtaacactgtccatcttgcatcattgaaactactacaatgatactatcatttaataatattaatattacttgaaatagactaagataaagaaaaggggtctgtatgatgtgcagttttgtgcctttatgtatttgccttgttctttgtcgaatgtgtgaaattctgtactgtggtttttcctataatagaaagtagagctgtgtattaaattagactgtgtctctctgatacctttacactactgagaatagcatggttttggccatgtaaaccaattttcaaagttctaatgacatagccatgtgtttttggttttttatatttcattttaaaatttgagtatcaccatacattaattaatactcctgtagtagataagctgtcattaagtaattcccaaaaaaagggccatttgcttgcattactttgaatttaatgttgcgcttgtgcactgtgttaatattgtttgtgatggattggacgttgtgactcttgccttttaagaagaaaaaaaagataggacaaagtatttgaagctcttaaaatgtacatattttggttcttctatctcaaattatttaaaatgcataattcacatttttgtaataattctatgcaattttgtggcatgatgtttcttccacttgtaattttatgtgctttcatcacaaatccaaaggaaagaataaaaatttcttaacacaaaaaaaaaacacaacggacacaaacaaaagctgtggtggggccgctggcgacctcggaagaaagttctctagaaacccatgccgggtggggggaggcggggccgccgagcggtgtgcaggaacaccgcgccccaaggacgtgtgcccgagggaaacccgggtgcagacaaaagggggcggtgtctctcccccataaaaaaaagcggcgggcgacagcgggctttgcgaaacaccccgaagggtggcggggcaagacggggcccacaacagggctcacggaagcattatc

SEQ ID NO: 415765 - DNA, 6276 bp, Homo sapiens
cacacgcatcacagccatttgagaaatggcttctttgcagagctggggaagccgggcagaagatgccgcagcctcctactctgggtcctgagggggggtggcaggtaccacagtgtaggcagcagggtcagggcccctttagaggcttgtagtcttccatcttcaaggaatgattcaatacctcaagaagatttcactccagaagtgtacagagttttcctcaacaacctttgccctcgacctgaaattgataacatcttttcagaatttggtgcaaaaagcaaaccatatcttaccgttgatcagatgatggattttatcaaccttaagcagcgagatcctcggcttaatgaaatactttatccacctctaaaacaagagcaagtccaagtattgattgagaagtatgaacccaacaacagcctcgccagaaaaggacaaatatcagtggatgggttcatgcgctatctgagtggagaagaaaacggagtcgtttcacctgagaaactggatttgaatgaagacatgtctcagcccctttctcactatttcattaattcctcgcacaacacctacctcacagctggccaactggctggaaactcctctgttgagatgtatcgccaagtgctcctgtctggttgtcgctgtgtggagctggactgctggaagggacggactgcagaagaggaacctgtcatcacccatggcttcaccatgacaactgaaatatctttcaaggaagtgatagaagcaattgcggagtgtgcatttaagacttcaccttttccaattctcctttcgtttgagaaccatgtggattccccaaagcagcaagccaagatggcggagtactgccgactgatctttggggatgcccttctcatggagcccctggaaaaatatccactggaatctggagttcctcttccaagccctatggatttaatgtataaaattttggtgaaaaataagaagaaatcacacaagtcatcagaaggaagcggcaaaaagaagctctcagaacaagcctccaacacctacagtgactcctccagcatgttcgagccctcatccccaggagccggagaagctgatacggaaagtgacgacgacgatgatgatgatgactgtaaaaaatcttcaatggatgaggggactgctggaagtgaggctatggccacagaagaaatgtctaatctggtgaactatattcagccagtcaagtttgagtcatttgaaatttcaaaaaaaagaaataaaagttttgaaatgtcttccttcgtggaaaccaaaggacttgaacaactcaccaagtctccagtggaatttgtagaatataacaaaatgcagcttagcaggatatatccaaaaggaacacgtgtggattcatccaactatatgcctcagctcttctggaatgcaggttgtcagatggtggcacttaatttccagacaatggacctggctatgcaaataaatatggggatgtatgaatacaacgggaagagtggctacagattgaagccagagttcatgaggaggcctgacaagcattttgatccatttactgaaggcatcgtagatgggatagtggcaaacactttgtctgttaagattatttcaggtcagtttctttctgataagaaagttgggacttacgtggaagtagatatgtttggtttgcctgtggatacaaggaggaaggcatttaagaccaaaacatcccaaggaaatgctgtgaatcctgtctgggaagaagaacctattgtgttcaaaaaggtggttcttcctactctggcctgtttgagaatagcagtttatgaagaaggaggtaaattcattggccaccgtatcttgccagtgcaagccattcggccaggctatcactatatctgtctaaggaatgaaaggaaccagcctctgacgctgcctgctgtctttgtctacatagaagtgaaagactatgtgccagacacatatgcagatgtcatcgaagctttatcaaacccaatccgatatgtgaacctgatggaacagagagctaagcaattggctgctttgacactggaagatgaagaagaagtaaagaaagaggctgatcctggagaaacaccatcagaggctccaagtgaagcgagaacgactccagcagaaaatggggtgaatcacactacaaccctgacacccaagccaccctcccaggctctccacagccagccagctccaggttctgtaaaggcacctgccaaaacagaagatcttattcagagtgtcttaacagaagtggaagcacagaccatcgaagaactaaagcaacagaaatcgtttgtgaaacttcaaaagaaacactacaaagaaatgaaagacctggttaagagacaccacaagaaaaccactgaccttatcaaagaacacactaccaagtataatgaaattcagaatgactacttgagaaggagagccgctttggaaaagtccgccaaaaaggacagtaagaaaaaatcggaacccagcagccctgatcatggttcatcaacgattgagcaagacctcgctgctctggatgctgaaatgacccaaaagttaatagacttgaaggacaaacaacagcagcagctgcttaatcttcggcaagaacagtattatagtgaaaaataccagaagcgagaacatattaaactgcttattcaaaagttgacggatgtcgcagaagagtgtcagaacaatcagttaaagaagctcaaagaaatctgtgagaaagaaaagaaagaattaaagaagaaaatggataaaaagaggcaggagaagataacagaagctaaatccaaagacaaaagtcagatggaagaggagaagacagagatgatccggtcatatatccaggaagtggtgcagtatatcaagaggctagaagaagcgcaaagtaaacggcaagaaaaactcgtagagaaacacaaggaaatacgtcagcagatcctggatgaaaagcccaagctgcaggtggagctggagcaagaataccaagacaaattcaaaagactgcccctcgagattttggaattcgtgcaggaagccatgaaaggaaagatcagtgaagacagcaatcacggttctgcccctctctccctgtcctcagaccctggaaaagtgaaccacaagactccctccagtgaggagctgggaggagacatcccaggaaaagaatttgatactcctctgtgaatgctcctgccaggccttcagaaattgcatggccactccagcgtcatcggactctctcttattacaaagatcactgcccaggaccatcttcccgagaagcatcccttagcctaaaatccacaccaaagggagagttccagaggaatccatgaagaattcccatgcccaggctccatgtgtcatgtggaaacctccacaggtctgctagtgaagaatgcatgtatgtgagatttttgttttctttccaatagcaaattcaaagcaagcaacttgcaggctccatggaacttttaatgaaggacagtgtcttctttgaagaaaatcaagctcgtgtttttattcgaagctctggtgtaaaatatttcaaagtcatagaaatagtttgagaaatgcatagcattatttaacactattgaacagccgactttgagcattgtttcttctaactgcccctcaactaccattatcttcaagtcaacatgcatattacattttcatcctttgctttgcaagcactggtggcttgcagtttgctaatttatttatcatagagtcatcaatgtatttgttgctgacatggttttattagatactgtagtgattcaaataagttttctatttgaaaaaaaaaatcacttgattgtatccttgcccagtgaagccatcctaagacttagcaatatggattgtacatttggctgcatgagcaagtcggccgcacacttccagacagtgtgctgtttgaattgactatttgcactcaaagtctgggtattcattggttattggcctgaaatgatcaaataactacaaatgatctgttgaataaaaatagttgagctgatatatgttaagcagatattcaatcagaatgaacaggttccggtggttattttgccgtttgacattttttatggttcatttatttttaatatagagaggaagattgaatatttatctagagaatacaaagacccacatgtaaatgataggtattatctccatgtatatatgtacccacttagtcatgtaagtgcatatacacatacacacacatgagtgtagacatgtgtttattaattgacaatgacccaaatctcttccacaagacttaaaaccaaattcagggacaaatggatagagaagaaaagggtcaaacatcgagattacatggatgttaaattatatggagacgctaagaaataattgatggagccattgatgcaaaccgaagtagatttagaacttatatgaatttgatttatattttgcaagatcaaaaattagatgttaagtatcagattttaagcttgttttaatggtcaaaaaattaggacagaaataatatggacatttattagtatcttccataatttttaagtctgacacatttctattttattctaacataaaaaaacttccattatatatttactaagtatatttaattcacttaactctgtctttataagttcctattttagatggaataagagaaacaaattatatcaaggtaaaactgatcaaaagcataattgaaagttctgaaaaaagaaaaataataatatgtagaaaaatgtaacttagagagtaacacatgaacattgaagttaaaacccagaagccagatgctcacagttttattttactttaaaataaacctgtctgactgtagctttgcgaaatatcttaaaacgcaaaaaccagttgtgtcctgaaaattgtttcaagaatttaatatttttatgaaaattattttatttaactttaagcaataactagagattacaattaaattttaatcaaaatgaaggcttagttcaaacataaggaaacagtgtttgattaaaaaaaacacatctagtaagacgtaaggggaaaatcacatcctctttggagatgattatattttgatctgaagggtttggggtgttcattagacacttaataaaacttaacttccaatgaaaaagaaatcttttgtaaatcattctacttttgcactttgaaagaaaggcgttaatcataaagaagcaagaatggtcaaaatcgaatgctgcatttttataaacaaaattacagactgtctgaaattgaagaagaatgaactaataatagcattcataaccaaacacaatgatgattattgcagaacattgtatcacattttagtccagagatagaataaagttgaataaccttgacttacacaaaactgttttggtagttggatttcattatcttagtgaatttagtcattttacaatatgtttgtatttggccatttactgtaatcacatttttatatctgtacaatgacactttttgcagttgtggggtagtgtgtaacactgtccatcttgcatcattgaaactactacaatgatactatcatttaataatattaatattacttgaaatagactaagataaagaaaaggggtctgtatgatgtgcagttttgtgcctttatgtatttgccttgttctttgtcgaatgtgtgaaattctgtactgtggtttttcctataatagaaagtagagctgtgtattaaattagactgtgtctctctgatacctttacactactgagaatagcatggttttggccatgtaaaccaattttcaaagttctaatgacatagccatgtgtttttggttttttatatttcattttaaaatttgagtatcaccatacattaattaatactcctgtagtagataagctgtcattaagtaattcccaaaaaaagggccatttgcttgcattactttgaatttaatgttgcgcttgtgcactgtgttaatattgtttgtgatggattggacgttgtgactcttgccttttaagaagaaaaaaaagataggacaaagtatttgaagctcttaaaatgtacatattttggttcttctatctcaaattatttaaaatgcataattcacatttttgtaataattctatgcaattttgtggcatgatgtttcttccacttgtaattttatgtgctttcatcacaaatccaaaggaaagaataaaaatttcttaacacaa

SEQ ID NO: 415766 - DNA, 6823 bp, Homo sapiens
cagatggccggggctcaacccggagtgcacgccttgcaactcaagcccgtgtgcgtgtccgacagcctcaagaagggcaccaaattcgtcaagtgggatgatgactcaactattgttactccaattattttgaggactgaccctcagggatttttcttttactggacagatcaaaacaaggagacagagctactggatctcagccttgtcaaagatgccagatgtgggagacacgccaaagctcccaaggaccccaaattacgtgaacttttggatgtggggaacatcgggcgcctggagcagcgcatgatcacagtggtgtatgggcctgacctcgtgaacatctcccatttgaatctcgtggctttccaagaagaagtggccaaggaatggacaaatgaggttttcagtttggcaacaaacctgctggcccaaaacatgtccagggatgcatttctggaaaaagcctatactaaacttaagctgcaagtcactccagaagggcgtattcctctcaaaaacatatatcgcttgttttcagcagatcggaagcgagttgaaactgctttagaggcttgtagtcttccatcttcaaggaatgattcaatacctcaagaagatttcactccagaagtgtacagagttttcctcaacaacctttgccctcgacctgaaattgataacatcttttcagaatttggtgcaaaaagcaaaccatatcttaccgttgatcagatgatggattttatcaaccttaagcagcgagatcctcggcttaatgaaatactttatccacctctaaaacaagagcaagtccaagtattgattgagaagtatgaacccaacaacagcctcgccagaaaaggacaaatatcagtggatgggttcatgcgctatctgagtggagaagaaaacggagtcgtttcacctgagaaactggatttgaatgaagacatgtctcagcccctttctcactatttcattaattcctcgcacaacacctacctcacagctggccaactggctggaaactcctctgttgagatgtatcgccaagtgctcctgtctggttgtcgctgtgtggagctggactgctggaagggacggactgcagaagaggaacctgtcatcacccatggcttcaccatgacaactgaaatatctttcaaggaagtgatagaagcaattgcggagtgtgcatttaagacttcaccttttccaattctcctttcgtttgagaaccatgtggattccccaaagcagcaagccaagatggcggagtactgccgactgatctttggggatgcccttctcatggagcccctggaaaaatatccactggaatctggagttcctcttccaagccctatggatttaatgtataaaattttggtgaaaaataagaagaaatcacacaagtcatcagaaggaagcggcaaaaagaagctctcagaacaagcctccaacacctacagtgactcctccagcatgttcgagccctcatccccaggagccggagaagctgatacggaaagtgacgacgacgatgatgatgatgactgtaaaaaatcttcaatggatgaggggactgctggaagtgaggctatggccacagaagaaatgtctaatctggtgaactatattcagccagtcaagtttgagtcatttgaaatttcaaaaaaaagaaataaaagttttgaaatgtcttccttcgtggaaaccaaaggacttgaacaactcaccaagtctccagtggaatttgtagaatataacaaaatgcagcttagcaggatatatccaaaaggaacacgtgtggattcatccaactatatgcctcagctcttctggaatgcaggttgtcagatggtggcacttaatttccagacaatggacctggctatgcaaataaatatggggatgtatgaatacaacgggaagagtggctacagattgaagccagagttcatgaggaggcctgacaagcattttgatccatttactgaaggcatcgtagatgggatagtggcaaacactttgtctgttaagattatttcaggtcagtttctttctgataagaaagttgggacttacgtggaagtagatatgtttggtttgcctgtggatacaaggaggaaggcatttaagaccaaaacatcccaaggaaatgctgtgaatcctgtctgggaagaagaacctattgtgttcaaaaaggtggttcttcctactctggcctgtttgagaatagcagtttatgaagaaggaggtaaattcattggccaccgtatcttgccagtgcaagccattcggccaggctatcactatatctgtctaaggaatgaaaggaaccagcctctgacgctgcctgctgtctttgtctacatagaagtgaaagactatgtgccagacacatatgcagatgtcatcgaagctttatcaaacccaatccgatatgtgaacctgatggaacagagagctaagcaattggctgctttgacactggaagatgaagaagaagtaaagaaagaggctgatcctggagaaacaccatcagaggctccaagtgaagcgagaacgactccagcagaaaatggggtgaatcacactacaaccctgacacccaagccaccctcccaggctctccacagccagccagctccaggttctgtaaaggcacctgccaaaacagaagatcttattcagagtgtcttaacagaagtggaagcacagaccatcgaagaactaaagcaacagaaatcgtttgtgaaacttcaaaagaaacactacaaagaaatgaaagacctggttaagagacaccacaagaaaaccactgaccttatcaaagaacacactaccaagtataatgaaattcagaatgactacttgagaaggagagccgctttggaaaagtccgccaaaaaggacagtaagaaaaaatcggaacccagcagccctgatcatggttcatcaacgattgagcaagacctcgctgctctggatgctgaaatgacccaaaagttaatagacttgaaggacaaacaacagcagcagctgcttaatcttcggcaagaacagtattatagtgaaaaataccagaagcgagaacatattaaactgcttattcaaaagttgacggatgtcgcagaagagtgtcagaacaatcagttaaagaagctcaaagaaatctgtgagaaagaaaagaaagaattaaagaagaaaatggataaaaagaggcaggagaagataacagaagctaaatccaaagacaaaagtcagatggaagaggagaagacagagatgatccggtcatatatccaggaagtggtgcagtatatcaagaggctagaagaagcgcaaagtaaacggcaagaaaaactcgtagagaaacacaaggaaatacgtcagcagatcctggatgaaaagcccaagggggaaggttcctcctcattcttgtcggaaacttgccatgaggatccctctgtttcccccaactttactccccccaaccctcaagctctcaagtggtgaccaccgtccttccggccagctgcaggtggagctggagcaagaataccaagacaaattcaaaagactgcccctcgagattttggaattcgtgcaggaagccatgaaaggaaagatcagtgaagacagcaatcacggttctgcccctctctccctgtcctcagaccctggaaaagtgaaccacaagactccctccagtgaggagctgggaggagacatcccaggaaaagaatttgatactcctctgtgaatgctcctgccaggccttcagaaattgcatggccactccagcgtcatcggactctctcttattacaaagatcactgcccaggaccatcttcccgagaagcatcccttagcctaaaatccacaccaaagggagagttccagaggaatccatgaagaattcccatgcccaggctccatgtgtcatgtggaaacctccacaggtctgctagtgaagaatgcatgtatgtgagatttttgttttctttccaatagcaaattcaaagcaagcaacttgcaggctccatggaacttttaatgaaggacagtgtcttctttgaagaaaatcaagctcgtgtttttattcgaagctctggtgtaaaatatttcaaagtcatagaaatagtttgagaaatgcatagcattatttaacactattgaacagccgactttgagcattgtttcttctaactgcccctcaactaccattatcttcaagtcaacatgcatattacattttcatcctttgctttgcaagcactggtggcttgcagtttgctaatttatttatcatagagtcatcaatgtatttgttgctgacatggttttattagatactgtagtgattcaaataagttttctatttgaaaaaaaaaatcacttgattgtatccttgcccagtgaagccatcctaagacttagcaatatggattgtacatttggctgcatgagcaagtcggccgcacacttccagacagtgtgctgtttgaattgactatttgcactcaaagtctgggtattcattggttattggcctgaaatgatcaaataactacaaatgatctgttgaataaaaatagttgagctgatatatgttaagcagatattcaatcagaatgaacaggttccggtggttattttgccgtttgacattttttatggttcatttatttttaatatagagaggaagattgaatatttatctagagaatacaaagacccacatgtaaatgataggtattatctccatgtatatatgtacccacttagtcatgtaagtgcatatacacatacacacacatgagtgtagacatgtgtttattaattgacaatgacccaaatctcttccacaagacttaaaaccaaattcagggacaaatggatagagaagaaaagggtcaaacatcgagattacatggatgttaaattatatggagacgctaagaaataattgatggagccattgatgcaaaccgaagtagatttagaacttatatgaatttgatttatattttgcaagatcaaaaattagatgttaagtatcagattttaagcttgttttaatggtcaaaaaattaggacagaaataatatggacatttattagtatcttccataatttttaagtctgacacatttctattttattctaacataaaaaaacttccattatatatttactaagtatatttaattcacttaactctgtctttataagttcctattttagatggaataagagaaacaaattatatcaaggtaaaactgatcaaaagcataattgaaagttctgaaaaaagaaaaataataatatgtagaaaaatgtaacttagagagtaacacatgaacattgaagttaaaacccagaagccagatgctcacagttttattttactttaaaataaacctgtctgactgtagctttgcgaaatatcttaaaacgcaaaaaccagttgtgtcctgaaaattgtttcaagaatttaatatttttatgaaaattattttatttaactttaagcaataactagagattacaattaaattttaatcaaaatgaaggcttagttcaaacataaggaaacagtgtttgattaaaaaaaacacatctagtaagacgtaaggggaaaatcacatcctctttggagatgattatattttgatctgaagggtttggggtgttcattagacacttaataaaacttaacttccaatgaaaaagaaatcttttgtaaatcattctacttttgcactttgaaagaaaggcgttaatcataaagaagcaagaatggtcaaaatcgaatgctgcatttttataaacaaaattacagactgtctgaaattgaagaagaatgaactaataatagcattcataaccaaacacaatgatgattattgcagaacattgtatcacattttagtccagagatagaataaagttgaataaccttgacttacacaaaactgttttggtagttggatttcattatcttagtgaatttagtcattttacaatatgtttgtatttggccatttactgtaatcacatttttatatctgtacaatgacactttttgcagttgtggggtagtgtgtaacactgtccatcttgcatcattgaaactactacaatgatactatcatttaataatattaatattacttgaaatagactaagataaagaaaaggggtctgtatgatgtgcagttttgtgcctttatgtatttgccttgttctttgtcgaatgtgtgaaattctgtactgtggtttttcctataatagaaagtagagctgtgtattaaattagactgtgtctctctgatacctttacactactgagaatagcatggttttggccatgtaaaccaattttcaaagttctaatgacatagccatgtgtttttggttttttatatttcattttaaaatttgagtatcaccatacattaattaatactcctgtagtagataagctgtcattaagtaattcccaaaaaaagggccatttgcttgcattactttgaatttaatgttgcgcttgtgcactgtgttaatattgtttgtgatggattggacgttgtgactcttgccttttaagaagaaaaaaaagataggacaaagtatttgaagctcttaaaatgtacatattttggttcttctatctcaaattatttaaaatgcataattcacatttttgtaataattctatgcaattttgtggcatgatgtttcttccacttgtaattttatgtgctttcatcacaaatccaaaggaaagaataaaaatttcttaacacaa

SEQ ID NO: 415767 - DNA, 5557 bp, Homo sapiens
  misc_feature (5085)..(5085): n is a, c, g, or t
cagatggccggggctcaacccggagtgcacgccttgcaactcaagcccgtgtgcgtgtccgacagcctcaagaagggcaccaaattcgtcaagtgggatgatgactcaactattgttactccaattattttgaggactgaccctcagggatttttcttttactggacagatcaaaacaaggagacagagctactggatctcagccttgtcaaagatgccagatgtgggagacacgccaaagctcccaaggaccccaaattacgtgaacttttggatgtggggaacatcgggcgcctggagcagcgcatgatcacagtggtgtatgggcctgacctcgtgaacatctcccatttgaatctcgtggctttccaagaagaagtggccaaggaatggacaaatgaggttttcagtttggcaacaaacctgctggcccaaaacatgtccagggatgcatttctggaaaaagcctatactaaacttaagctgcaagtcactccagaagggcgtattcctctcaaaaacatatatcgcttgttttcagcagatcggaagcgagttgaaactgctttagaggcttgtagtcttccatcttcaaggaatgattcaatacctcaagaagatttcactccagaagtgtacagagttttcctcaacaacctttgccctcgacctgaaattgataacatcttttcagaatttggtgcaaaaagcaaaccatatcttaccgttgatcagatgatggattttatcaaccttaagcagcgagatcctcggcttaatgaaatactttatccacctctaaaacaagagcaagtccaagtattgattgagaagtatgaacccaacaacagcctcgccagaaaaggacaaatatcagtggatgggttcatgcgctatctgagtggagaagaaaacggagtcgtttcacctgagaaactggatttgaatgaagacatgtctcagcccctttctcactatttcattaattcctcgcacaacacctacctcacagctggccaactggctggaaactcctctgttgagatgtatcgccaagtgctcctgtctggttgtcgctgtgtggagctggactgctggaagggacggactgcagaagaggaacctgtcatcacccatggcttcaccatgacaactgaaatatctttcaaggaagtgatagaagcaattgcggagtgtgcatttaagacttcaccttttccaattctcctttcgtttgagaaccatgtggattccccaaagcagcaagccaagatggcggagtactgccgactgatctttggggatgcccttctcatggagcccctggaaaaatatccactggaatctggagttcctcttccaagccctatggatttaatgtataaaattttggtgaaaaataagaagaaatcacacaagtcatcagaaggaagcggcaaaaagaagctctcagaacaagcctccaacacctacagtgactcctccagcatgttcgagccctcatccccaggagccggagaagctgatacggaaagtgacgacgacgatgatgatgatgactgtaaaaaatcttcaatggatgaggggactgctggaagtgaggctatggccacagaagaaatgtctaatctggtgaactatattcagccagtcaagtttgagtcatttgaaatttcaaaaaaaagaaataaaagttttgaaatgtcttccttcgtggaaaccaaaggacttgaacaactcaccaagtctccagtggaatttgtagaatataacaaaatgcagcttagcaggatatatccaaaaggaacacgtgtggattcatccaactatatgcctcagctcttctggaatgcaggttgtcagatggtggcacttaatttccagacaatggacctggctatgcaaataaatatggggatgtatgaatacaacgggaagagtggctacagattgaagccagagttcatgaggaggcctgacaagcattttgatccatttactgaaggcatcgtagatgggatagtggcaaacactttgtctgttaagattatttcaggtcagtttctttctgataagaaagttgggacttacgtggaagtagatatgtttggtttgcctgtggatacaaggaggaaggcatttaagaccaaaacatcccaaggaaatgctgtgaatcctgtctgggaagaagaacctattgtgttcaaaaaggtggttcttcctactctggcctgtttgagaatagcagtttatgaagaaggaggtaaattcattggccaccgtatcttgccagtgcaagccattcggccaggctatcactatatctgtctaaggaatgaaaggaaccagcctctgacgctgcctgctgtctttgtctacatagaagtgaaagactatgtgccagacacatatgcagatgtcatcgaagctttatcaaacccaatccgatatgtgaacctgatggaacagagagctaagcaattggctgctttgacactggaagatgaagaagaagtaaagaaagaggctgatcctggagaaacaccatcagaggctccaagtgaagcgagaacgactccagcagaaaatggggtgaatcacactacaaccctgacacccaagccaccctcccaggctctccacagccagccagctccaggttctgtaaaggcacctgccaaaacagaagatcttattcagagtgtcttaacagaagtggaagcacagaccatcgaagaactaaagcaacagaaatcgtttgtgaaacttcaaaagaaacactacaaagaaatgaaagacctggttaagagacaccacaagaaaaccactgaccttatcaaagaacacactaccaagtataatgaaattcagaatgactacttgagaaggagagccgctttggaaaagtccgccaaaaaggacagtaagaaaaaatcggaacccagcagccctgatcatggttcatcaacgattgagcaagacctcgctgctctggatgctgaaatgacccaaaagttaatagacttgaaggacaaacaacagcagcagctgcttaatcttcggcaagaacagtattatagtgaaaaataccagaagcgagaacatattaaactgcttattcaaaagttgacggatgtcgcagaagagtgtcagaacaatcagttaaagaagctcaaagaaatctgtgagaaagaaaagaaagaattaaagaagaaaatggataaaaagaggcaggagaagataacagaagctaaatccaaagacaaaagtcagatggaagaggagaagacagagatgatccggtcatatatccaggaagtggtgcagtatatcaagaggctagaagaagcgcaaagtaaacggcaagaaaaactcgtagagaaacacaaggaaatacgtcagcagatcctggatgaaaagcccaagggggaaggttcctcctcattcttgtcggaaacttgccatgaggatccctctgtttcccccaactttactccccccaaccctcaagctctcaagtggtgaccaccgtccttccggccagtcatgacaagaaataattggcttgtgagaatcaacattgaagctggaaaaatgatggcatccgaacaagtagacacagccctagtcaaggcaataaactacactaaagacagaggagaaagactcaaagttgttctaacatgtgagtacctaggggtgctgcatgccgttgtgtggtttgtgtactgcatagttgtactcagccaaggaagtggatgaggccacagctttaacatgggctgctgtctgcccagaaggataatcttttccttattttatatctcatttcaggggttctccaacttctgaaatccatccagaaactccctgtatttgggtaacagtattataactttttgcaccagggcttttttgtttgtttgttaatattaattgatttttcttatgttctttatgaaagaataactcatccattaatgaaaccaaatgtgaacttagtgccttctgtgtagaaaaggctaggaatacatattgtgggagattcattacatcactggccttaatactacaccttctcatgttcccccttggctgtgtaactttctagtgtccatatgctctctcttggggtggccagtgtgacttgctttggccaatgggatattagcaaccatgacataacccgaggcttataaagttgcctgctcattgggacttgtttcactgttgcatcccagttattcacatcactccagctgacagccaaccaacaaacagccagacacgtgagcccaaccaagatcagaagaactgtcccactgagcatagtctaaattgctaacatgcaaatgcatgaaacagaccacagcaaggtaatcttacagcccaggactcagctgctgcaatctctgtgaaaggttctgctcatgaaacagagacaaccatgtgtggtgcctgcattcttggcctgcggggagtggaaaggagacaaagagtaaaacacggtgggaaagaagaaaaagaggttaagaaaagcaaatgtgcctactccaggtaattttgacttagggaccctgattaacttacacactaattaaaccatttccagattttgtgcagtctgaaagcagcccattttccccaacaccaggtcgctcaagatgaccacaggaaggttgtcatcttcatgtctaaaagccagttgacactcaagggtgtcatttcacttcagtgaaatgagaagcttcacagatgtgtagactctgaaaaatctaactggaaaacaatacagggaaatagcaatactaggcatcaaagcagcaaaaaaactactcaattatctgatatggggattatcaatggaataaatgtggggtttgttgtttgttgttgggattgttgtgggttttgtttcattttttagggtctcacttttctccaccaattagatctgtgctgtgagccacacaggttttgagtacatgttttgggactttatatcggtcagactttgccatggtaacactgtgtaacgagcagccccaaaaatctcagtggtggtcaaaagcaaacctttatttntcattcatgggttttcagtttgttcaggctaaaagtaaaatacacagattcttcacctgtctttcattccatgctgaaggagcaattgactgcctgggacatacttttctcataacagaggcaagggtgaaaaacaccaagtcatcttgattatgcaatcccatttttaatgtaaacaatgtcatgtctgcttctatttcattgagcaaagcaagtcatataggcaagcccaacatcagtggggtgataaagcacactctccaatggaaggaggaggggagcatgatcatttgctgaacagtaatgcaagatagcacaagacttgtctggggtgagagagagatcaaagctgtggatcccacccagtcttcaaccaaagcaatgtggctttgacctgttttctgtcttggacttgaataatactttatttgaaagaagtgttaaattgtttattaaaaaaaagacaagtttg

SEQ ID NO: 415768 - DNA, 2781 bp, Homo sapiens
ttacaaatttcacttgataatttacatggaaatatgaaagggttctttctccaagtgtcttgcaattgacttggaatcagcgagttaaacaaaagggactgagcctctaactctgggaatttcaaggctccagttacagcaaatgacatgctgtcccctccacctatgtctatgcaggtctgccttgggaaccacctcacacatcagtgccttcgctgtccatctgtgtatgttattcaaattcacataagttaagataaagatccaggatgataaaaaccaatcctgataggtgggattagagaattacttctttctgtagttaataacacaaagcaatcctgttcaggttctttggataagcctccctactttccttcttctgttcttgttctcccttagcccaaagcagcaagccaagatggcggagtactgccgactgatctttggggatgcccttctcatggagcccctggaaaaatatccactggaatctggagttcctcttccaagccctatggatttaatgtataaaattttggtgaaaaataagaagaaatcacacaagtcatcagaaggaagcggcaaaaagaagctctcagaacaagcctccaacacctacagtgactcctccagcatgttcgagccctcatccccaggagccggagaagctgatacggaaagtgacgacgacgatgatgatgatgactgtaaaaaatcttcaatggatgaggggactgctggaagtgaggctatggccacagaagaaatgtctaatctggtgaactatattcagccagtcaagtttgagtcatttgaaatttcaaaaaaaagaaataaaagttttgaaatgtcttccttcgtggaaaccaaaggacttgaacaactcaccaagtctccagtggaatttgtagaatataacaaaatgcagcttagcaggatatatccaaaaggaacacgtgtggattcatccaactatatgcctcagctcttctggaatgcaggttgtcagatggtggcacttaatttccagacaatggacctggctatgcaaataaatatggggatgtatgaatacaacgggaagagtggctacagattgaagccagagttcatgaggaggcctgacaagcattttgatccatttactgaaggcatcgtagatgggatagtggcaaacactttgtctgttaagattatttcaggtcagtttctttctgataagaaagttgggacttacgtggaagtagatatgtttggtttgcctgtggatacaaggaggaaggcatttaagaccaaaacatcccaaggaaatgctgtgaatcctgtctgggaagaagaacctattgtgttcaaaaaggtggttcttcctactctggcctgtttgagaatagcagtttatgaagaaggaggtaaattcattggccaccgtatcttgccagtgcaagccattcggccaggctatcactatatctgtctaaggaatgaaaggaaccagcctctgacgctgcctgctgtctttgtctacatagaagtgaaagactatgtgccagacacatatgcagatgtcatcgaagctttatcaaacccaatccgatatgtgaacctgatggaacagagagctaagcaattggctgctttgacactggaagatgaagaagaagtaaagaaagaggctgatcctggagaaacaccatcagaggctccaagtgaagcgagaacgactccagcagaaaatggggtgaatcacactacaaccctgacacccaagccaccctcccaggctctccacagccagccagctccaggttctgtaaaggcacctgccaaaacagaagatcttattcagagtgtcttaacagaagtggaagcacagaccatcgaagaactaaagcaacagaaatcgtttgtgaaacttcaaaagaaacactacaaagaaatgaaagacctggttaagagacaccacaagaaaaccactgaccttatcaaagaacacactaccaagtataatgaaattcagaatgactacttgagaaggagagccgctttggaaaagtccgccaaaaaggacagtaagaaaaaatcggaacccagcagccctgatcatggttcatcaacgattgagcaagacctcgctgctctggatgctgaaatgacccaaaagttaatagacttgaaggacaaacaacagcagcagctgcttaatcttcggcaagaacagtattatagtgaaaaataccagaagcgagaacatattaaactgcttattcaaaagttgacggatgtcgcagaagagtgtcagaacaatcagttaaagaagctcaaagaaatctgtgagaaagaaaagaaagaattaaagaagaaaatggataaaaagaggcaggagaagataacagaagctaaatccaaagacaaaagtcagatggaagaggagaagacagagatgatccggtcatatatccaggaagtggtgcagtatatcaagaggctagaagaagcgcaaagtaaacggcaagaaaaactcgtagagaaacacaaggaaatacgtcagcagatcctggatgaaaagcccaaggtaccatgatgaattcctctgtgcttttcttccatgaggttgctccatgaccatctttttgcgtctggatttgaaggttgcccatgaagattgttggttccatgtcaaactaaagcatttcttgagggtttttcttcatggcttaaaaacgttgtgccttaaagctgtgattttattaataaaataataaatcatgactgttaaca

SEQ ID NO: 415769 - DNA, 3551 bp, Homo sapiens
cagatggccggggctcaacccggagtgcacgccttgcaactcaagcccgtgtgcgtgtccgacagcctcaagaagggcaccaaattcgtcaagtgggatgatgactcaactattgttactccaattattttgaggactgaccctcagggatttttcttttactggacagatcaaaacaaggagacagagctactggatctcagccttgtcaaagatgccagatgtgggagacacgccaaagctcccaaggaccccaaattacgtgaacttttggatgtggggaacatcgggcgcctggagcagcgcatgatcacagtggtgtatgggcctgacctcgtgaacatctcccatttgaatctcgtggctttccaagaagaagtggccaaggaatggacaaatgaggttttcagtttggcaacaaacctgctggcccaaaacatgtccagggatgcatttctggaaaaagcctatactaaacttaagctgcaagtcactccagaagggcgtattcctctcaaaaacatatatcgcttgttttcagcagatcggaagcgagttgaaactgctttagaggcttgtagtcttccatcttcaaggaatgattcaatacctcaagaagatttcactccagaagtgtacagagttttcctcaacaacctttgccctcgacctgaaattgataacatcttttcagaatttggtgcaaaaagcaaaccatatcttaccgttgatcagatgatggattttatcaaccttaagcagcgagatcctcggcttaatgaaatactttatccacctctaaaacaagagcaagtccaagtattgattgagaagtatgaacccaacaacagcctcgccagaaaaggacaaatatcagtggatgggttcatgcgctatctgagtggagaagaaaacggagtcgtttcacctgagaaactggatttgaatgaagacatgtctcagcccctttctcactatttcattaattcctcgcacaacacctacctcacagctggccaactggctggaaactcctctgttgagatgtatcgccaagtgctcctgtctggttgtcgctgtgtggagctggactgctggaagggacggactgcagaagaggaacctgtcatcacccatggcttcaccatgacaactgaaatatctttcaaggaagtgatagaagcaattgcggagtgtgcatttaagacttcaccttttccaattctcctttcgtttgagaaccatgtggattccccaaagcagcaagccaagatggcggagtactgccgactgatctttggggatgcccttctcatggagcccctggaaaaatatccactggaatctggagttcctcttccaagccctatggatttaatgtataaaattttggtgaaaaataagaagaaatcacacaagtcatcagaaggaagcggcaaaaagaagctctcagaacaagcctccaacacctacagtgactcctccagcatgttcgagccctcatccccaggagccggagaagctgatacggaaagtgacgacgacgatgatgatgatgactgtaaaaaatcttcaatggatgaggggactgctggaagtgaggctatggccacagaagaaatgtctaatctggtgaactatattcagccagtcaagtttgagtcatttgaaatttcaaaaaaaagaaataaaagttttgaaatgtcttccttcgtggaaaccaaaggacttgaacaactcaccaagtctccagtggaatttgtagaatataacaaaatgcagcttagcaggatatatccaaaaggaacacgtgtggattcatccaactatatgcctcagctcttctggaatgcaggttgtcagatggtggcacttaatttccagacaatggacctggctatgcaaataaatatggggatgtatgaatacaacgggaagagtggctacagattgaagccagagttcatgaggaggcctgacaagcattttgatccatttactgaaggcatcgtagatgggatagtggcaaacactttgtctgttaagattatttcaggtcagtttctttctgataagaaagttgggacttacgtggaagtagatatgtttggtttgcctgtggatacaaggaggaaggcatttaagaccaaaacatcccaaggaaatgctgtgaatcctgtctgggaagaagaacctattgtgttcaaaaaggtggttcttcctactctggcctgtttgagaatagcagtttatgaagaaggaggtaaattcattggccaccgtatcttgccagtgcaagccattcggccaggctatcactatatctgtctaaggaatgaaaggaaccagcctctgacgctgcctgctgtctttgtctacatagaagtgaaagactatgtgccagacacatatgcagatgtcatcgaagctttatcaaacccaatccgatatgtgaacctgatggaacagagagctaagcaattggctgctttgacactggaagatgaagaagaagtaaagaaagagggtggatttctgcatgatgaaattatgagactcacccgtaatacgctggaaaaactgatggccttacctcttacccatgtggtgcccatccaaagcaagatgctgtcataagttttagtagagacgggatttcaccatgttagccaggatggtctcgatctcctgacctcgggatccacccgcctcggcctcccaaagtgctgggattacaggcatgagccaccgcgcccggccggaactgcactcttcagatgactcagacaaggaaagcatgatccaacacctctaatagcccagtaatacatatgatatttgaaaggcccttcacttaccatgttaaccattcagttaaatcctccaaatcctaattctctgctgctcaaccatcagatccaaactttcaatgcccaggacggaaatcttttcaaccagcacatcaaatggcttttcctccttctatagaacttataaaaatgatcttttcagttaccattttactggtccatctgtattctattttcagtgcacttctgttcattttggaattaggaagcgtacaaattctttttatatttaattttaacattcaagttaggcatattttgaagaaaaagatattgcaatgattgcatttgtccactagagggcaggaacttacttctgtggttcattctgcactttttttttcactacccacctaagaaaaatctagtcaatgcgactgaagtactaccaccttctgaatcttctttccttgataattgcttaattggaatttaaatctttgaatcaaattaagaaactagacattcctagtttctgtttctatcacaatttccagtaccagatttttattcactcataaaaacaaataatgggggagaaataaaatattgacttctgctgattctcttgagtgggataaggaatttggtttttgcactttggcttacagatccatatagtggaattattcgatctttcaattataatatcagaaagttcaattttagtattgtactcct

SEQ ID NO: 415770 - DNA, 3658 bp, Homo sapiens
  misc_feature (3540)..(3540): n is a, c, g, or t
  misc_feature (3552)..(3552): n is a, c, g, or t
cagatggccggggctcaacccggagtgcacgccttgcaactcaagcccgtgtgcgtgtccgacagcctcaagaagggcaccaaattcgtcaagtgggatgatgactcaactattgttactccaattattttgaggactgaccctcagggatttttcttttactggacagatcaaaacaaggagacagagctactggatctcagccttgtcaaagatgccagatgtgggagacacgccaaagctcccaaggaccccaaattacgtgaacttttggatgtggggaacatcgggcgcctggagcagcgcatgatcacagtggtgtatgggcctgacctcgtgaacatctcccatttgaatctcgtggctttccaagaagaagtggccaaggaatggacaaatgaggttttcagtttggcaacaaacctgctggcccaaaacatgtccagggatgcatttctggaaaaagcctatactaaacttaagctgcaagtcactccagaagggcgtattcctctcaaaaacatatatcgcttgttttcagcagatcggaagcgagttgaaactgctttagaggcttgtagtcttccatcttcaaggaatgattcaatacctcaagaagatttcactccagaagtgtacagagttttcctcaacaacctttgccctcgacctgaaattgataacatcttttcagaatttggtgcaaaaagcaaaccatatcttaccgttgatcagatgatggattttatcaaccttaagcagcgagatcctcggcttaatgaaatactttatccacctctaaaacaagagcaagtccaagtattgattgagaagtatgaacccaacaacagcctcgccagaaaaggacaaatatcagtggatgggttcatgcgctatctgagtggagaagaaaacggagtcgtttcacctgagaaactggatttgaatgaagacatgtctcagcccctttctcactatttcattaattcctcgcacaacacctacctcacagctggccaactggctggaaactcctctgttgagatgtatcgccaagtgctcctgtctggttgtcgctgtgtggagctggactgctggaagggacggactgcagaagaggaacctgtcatcacccatggcttcaccatgacaactgaaatatctttcaaggaagtgatagaagcaattgcggagtgtgcatttaagacttcaccttttccaattctcctttcgtttgagaaccatgtggattccccaaagcagcaagccaagatggcggagtactgccgactgatctttggggatgcccttctcatggagcccctggaaaaatatccactggaatctggagttcctcttccaagccctatggatttaatgtataaaattttggtgaaaaataagaagaaatcacacaagtcatcagaaggaagcggcaaaaagaagctctcagaacaagcctccaacacctacagtgactcctccagcatgttcgagccctcatccccaggagccggagaagctgatacggaaagtgacgacgacgatgatgatgatgactgtaaaaaatcttcaatggatgaggggactgctggaagtgaggctatggccacagaagaaatgtctaatctggtgaactatattcagccagtcaagtttgagtcatttgaaatttcaaaaaaaagaaataaaagttttgaaatgtcttccttcgtggaaaccaaaggacttgaacaactcaccaagtctccagtggaatttgtagaatataacaaaatgcagcttagcaggatatatccaaaaggaacacgtgtggattcatccaactatatgcctcagctcttctggaatgcaggttgtcagatggtggcacttaatttccagacaatggacctggctatgcaaataaatatggggatgtatgaatacaacgggaagagtggctacagattgaagccagagttcatgaggaggcctgacaagcattttgatccatttactgaaggcatcgtagatgggatagtggcaaacactttgtctgttaagattatttcaggtcagtttctttctgataagaaagttgggacttacgtggaagtagatatgtttggtttgcctgtggatacaaggaggaaggcatttaagaccaaaacatcccaaggaaatgctgtgaatcctgtctgggaagaagaacctattgtgttcaaaaaggtggttcttcctactctggcctgtttgagaatagcagtttatgaagaaggaggtaaattcattggccaccgtatcttgccagtgcaagccattcggccaggctatcactatatctgtctaaggaatgaaaggaaccagcctctgacgctgcctgctgtctttgtctacatagaagtgaaagactatgtgccagacacatatgcagatgtcatcgaagctttatcaaacccaatccgatatgtgaacctgatggaacagagagctaagcaattggctgctttgacactggaagatgaagaagaagtaaagaaagaggctgatcctggagaaacaccatcagaggctccaagtgaagcgagaacgactccagcagaaaatggggtgaatcacactacaaccctgacacccaagccaccctcccaggctctccacagccagccagctccaggttctgtaaaggcacctgccaaaacagaagatcttattcagagtgtcttaacagaagtggaagcacagaccatcgaagaactaaagcaacagaaatcgtttgtgaaacttcaaaagaaacactacaaagaaatgaaagacctggttaagagacaccacaagaaaaccactgaccttatcaaagaacacactaccaagtataatgaaattcagaatgactacttgagaaggagagccgctttggaaaagtccgccaaaaaggacagtaagaaaaaatcggaacccagcagccctgatcatggttcatcaacgattgagcaagacctcgctgctctggatgctgaaatgacccaaaagttaatagacttgaaggacaaacaacagcagcagctgcttaatcttcggcaagaacagtattatagtgaaaaataccagaagcgagaacatattaaactggtggagcaaaacaaaaaaaaaaaacaaaacaaaaaaaatgtgtgtgtgggcgcgcgcccgtgggcccccgcgagaaaactttttaaaacaaccaatcgtgggtgggggcggcgcgcgggccccggtgggggttaaggtgaacacgtgtgggtccaaagagggtgttcccagaggaaaaccgcgggccgaggacactaggtggggtgggtttctctcacaccaacatctaaaaaaaccgcgccccggggggcgcaacaccgagagcggggtctccgtgagacaacaaaatcaccaaagagggagagcgtcccagaggagggggccacataccaagcggggtactgcaccatactcaaaaaaggcgagtgcgctccaaaggcgagagcgtctcgaacattaatacaaatattaacccgccccggtccncagggggatganaagagcagaaacgccatcaacggactgagacaataaaacaccagagcaagaacaacaaatcgacacaagtaaacgaacagaacgaatcaagacaaacagaatgaga

SEQ ID NO: 415771 - DNA, 1780 bp, Homo sapiens
cagatggccggggctcaacccggagtgcacgccttgcaactcaagcccgtgtgcgtgtccgacagcctcaagaagggcaccaaattcgtcaagtgggatgatgactcaactattgttactccaattattttgaggactgaccctcagggatttttcttttactggacagatcaaaacaaggagacagagctactggatctcagccttgtcaaagatgccagatgtgggagacacgccaaagctcccaaggaccccaaattacgtgaacttttggatgtggggaacatcgggcgcctggagcagcgcatgatcacagtggtgtatgggcctgacctcgtgaacatctcccatttgaatctcgtggctttccaagaagaagtggccaaggaatggacaaatgaggttttcagtttggcaacaaacctgctggcccaaaacatgtccagggatgcatttctggaaaaagcctatactaaacttaagctgcaagtcactccagaagggcgtattcctctcaaaaacatatatcgcttgttttcagcagatcggaagcgagttgaaactgctttagaggcttgtagtcttccatcttcaagggtggaaaaagctaatgaggctgcgaaaagtgagcagagctgtggaaaggctcccccaaaacattttcaccttcattttataaagcaaaataaaatgcttgaacctgcttgctattgcttttttgttagatgctttggaataggaaaaatataacaattaaggtcctgtccccgacttcaacaaatatttcttgagctcttactatgtgcccataggcattgagaatatggtggtgaagaaaatgaaactcaaggtttcaaggacaatagagtcttctggggaaactagccaataagcatgccaacaaatgcgtctgtaaactgggggaagtgctataaaaagaaagactggagaactactattgagaagaagggaagctcattccagaaaaagaaaacaatgctcgcaaatccctgaggctggaaataatttccctactggatttaagcaactgagaaaagaccaccgcattcaagcataaagagaaaacatgagagatggatttgcaaagacatgcaaagaatttttttccttttgcaatcacttctgattttaccttttctggataacctctggtaaaatataataatcaaaatatttaacttatgaatctagctaagggaaagaaggaatagaaaattaaatgtatgaaccaattccccgtaaattgtaattttctaaacaactggattctgagcagtcaataaatacacattgagtaatctactatgtttattatatgttcaaactttcagaccaatgtcaattgcaggcaaatttaaaaggaaaatgagattcaaataacatgagttatgtttaaattagaaaaaattatctctaacaaattaaatgtaatgataattatctgaagttggagaaaactttaaaaaacctctatgctaaaactttgaaaaattattattcatagtaaagtataatttacttggatgacttatagaattagaatgctttttaaaaatctaaaaaccaaagactgtttcagagctaggaaataaatgtttctgtgaactgactatgatgtatcaaaactctgttttaaatctctgtgataatttcattcctacataacaatgactctagaaaatatccactaattagcaaaaaattttggccatattcacaagaggtattttaaacaagccacggaagaaaagggttatat

SEQ ID NO: 415772 - DNA, 1565 bp, Homo sapiens
cagatggccggggctcaacccggagtgcacgccttgcaactcaagcccgtgtgcgtgtccgacagcctcaagaagggcaccaaattcgtcaagtgggatgatgactcaactattgttactccaattattttgaggactgaccctcagggatttttcttttactggacagatcaaaacaaggagacagagctactggatctcagccttgtcaaagatgccagatgtgggagacacgccaaagctcccaaggaccccaaattacgtgaacttttggatgtggggaacatcgggcgcctggagcagcgcatgatcacagtggtgtatgggcctgacctcgtgaacatctcccatttgaatctcgtggctttccaagaagaagtggccaaggaatggacaaatgaggttttcagtttggcaacaaacctgctggcccaaaacatgtccagggatgcatttctggaaaaagcctatactaaacttaagctgcaagtcactccagaagggcgtattcctctcaaaaacatatatcgcttgttttcagcagatcggaagcgagttgaaactgctttagaggcttgtagtcttccatcttcaagggcattgagaatatggtggtgaagaaaatgaaactcaaggtttcaaggacaatagagtcttctggggaaactagccaataagcatgccaacaaatgcgtctgtaaactgggggaagtgctataaaaagaaagactggagaactactattgagaagaagggaagctcattccagaaaaagaaaacaatgctcgcaaatccctgaggctggaaataatttccctactggatttaagcaactgagaaaagaccaccgcattcaagcataaagagaaaacatgagagatggatttgcaaagacatgcaaagaatttttttccttttgcaatcacttctgattttaccttttctggataacctctggtaaaatataataatcaaaatatttaacttatgaatctagctaagggaaagaaggaatagaaaattaaatgtatgaaccaattccccgtaaattgtaattttctaaacaactggattctgagcagtcaataaatacacattgagtaatctactatgtttattatatgttcaaactttcagaccaatgtcaattgcaggcaaatttaaaaggaaaatgagattcaaataacatgagttatgtttaaattagaaaaaattatctctaacaaattaaatgtaatgataattatctgaagttggagaaaactttaaaaaacctctatgctaaaactttgaaaaattattattcatagtaaagtataatttacttggatgacttatagaattagaatgctttttaaaaatctaaaaaccaaagactgtttcagagctaggaaataaatgtttctgtgaactgactatgatgtatcaaaactctgttttaaatctctgtgataatttcattcctacataacaatgactctagaaaatatccactaattagcaaaaaattttggccatattcacaagaggtattttaaacaagccacggaagaaaagggttatat

SEQ ID NO: 415773 - DNA, 1024 bp, Homo sapiens
cacacgcatcacagccatttgagaaatggcttctttgcagagctggggaagccgggcagaagatgccgcagcctcctactctgggtcctgagggggggtggcaggtaccacagtgtaggcagcagggtcagggcccctttagaggcttgtagtcttccatcttcaaggaatgattcaatacctcaagaagatttcactccagaagtgtacagagttttcctcaacaacctttgccctcgacctgaaattgataacatcttttcagaatttggtgcaaaaagcaaaccatatcttaccgttgatcagatgatggattttatcaaccttaagcagcgagatcctcggcttaatgaaatactttatccacctctaaaacaagagcaagtccaagtattgattgagaagtatgaacccaacaacagcctcgccagaaaaggacaaatatcagtggatgggttcatgcgctatctgagtggagaagaaaacggagtcgtttcacctgagaaactggatttgaatgaagacatgtctcagcccctttctcactatttcattaattcctcgcacaacacctacctcacaggtatgaattttctagttctttgttactttagccagtctcaccaaatttcaccaacctctactttctgttgttcggaagctgaagtgtgttttcttccatttcctgcgaagtgcctctgagaactctggggttccaccactaaagcctcccgcctcccataagcagtcatgtccacatgtgtatgaagcaatagcatcatttctccacagcctaagtttttaagtcttctaaaatgcaaccacggctgacattttcagatcaatgggatttttgtgtaactgaactcattcttcagtgtacttgaagccatgtccagtcctacccggttctctgggctgtgttcatctacatgacagctccgaagttcttaagtggtggctcatgcttgtaatcccagcactttgggacggcgaggcgggcggatcacctgaggtcaggagt

SEQ ID NO: 415774 - DNA, 401 bp, Homo sapiens
cttctggtatgttgaggcagaagaaaggcaaagaataactgctgcagctcttagactctttgttttcctgttattgaggagcctttctaagaaagcaccacggtcatccttgcttcatgggaatctggggtttgttttgttggtgttttatagctggccaactggctggaaactcctctgttgagatgtatcgccaagtgctcctgtctggttgtcgctgtgtggagctggactgctggaagggacggactgcagaagaggaacctgtcatcacccatggcttcaccatgacaactgaaatatctttcaaggtagagtatatgaatgttactaagagaggcagctggagacacctgattccttttggttaaagcctcctaaggtagaaagtcccagtggtc

SEQ ID NO: 415775 - DNA, 4198 bp, Homo sapiens
agcagcgctcatggcgaagaggcttaaggccacaaaaccgtgggacagcaggaggaagagaagccaggtatctccactccagctgccctgcctcagactcctcagtttcgcacgtgaggatcgtcttgcaggcactgactggagatggaatcctaaagcataggtgaagcggaaatcctccttcagggagagcccactgaggaagccagcggctagcacgaggcaggacaggatacctccctcttcgcccacggcggcctctctgtcatagtagccaccgttctgccactcatgcagctttctaagacacctctcggttccccagcgctttcagtggggcggccggccactcccgagggttgcaagaggaggcccggggtgctgagccagcctcgctgcccccgcgtagaaagccggcccgccggcgagagccagcctaaggcgcggacaaccaacgaggtgtcaggctcggcaggggattgcttctgtctggggcccggccgaggttgcgttcgtgcctcgcgcgcacacgctccgcgttcactcagccaatccggtgctactcgcgcgcccaggagcgatccgcggtcctactcaggctgggccggctccttcccgctcccaatactcagcacccgagctctcactcctcccctcactctccacgagttccacgcctaggggtgtagctccgcccttgtccccgagtccgcccccgcaacctccagagcgtgtgctatcctttcctctcagtcctgccatctagctgccttgggtctcgcgctccgcagagcgttccgacactctccggcctcgttctgccgcctccgcgcgctctccccgtgcggccaccgcgccccccaagcttgcctccttcttgccggacttggggccgcgcgccctgactccttcccctcccgcggacccgcgcactcccggcgcggcctctcccccacgcaggccaccgtgcactctgtggcctccccctccttccccgctctcctcgcgcttctctggctccctagctgtcgcgctctcctcggcgagcgcgctcccggcccgcgcgctccgggctccggtttctcccggctcctgtcagtgcggtgactgcgctgggaaacatggcgaccgagggaatgatccttactaaccacgaccatcaaatccgtgtcggagtccttacagtgagtgatagttgcttcaggaatcttgcagaagaccgcagtgggataaatctcaaagatctcgtacaagatccttctttgttgggtgggactatatcagcatacaagatagtaccagatgaaatagaagaaatcaaggaaaccctgatagattggtgtgatgaaaaggaacttaatttgatattaacaactggaggaacaggatttgcaccacgagatgtcactccagaggccacaaaagaagtaatagaacgggaagcaccagggatggccctggcaatgctgatgggatcacttaatgttacacctctgggcatgctctctaggcctgtatgtggaatcagagggaaaacgctcataattaacctgccaggtagcaagaaaggatctcaggaatgctttcaattcatactgccagctctacctcatgccattgaccttttacgtgatgccattgtaaaagtaaaggaggtgcatgatgaacttgaagatttgccttccccacctccccctctttcccctcctcctactaccagcccccataaacagacagaagacaaaggagttcaatgtgaggaagaggaagaagagaagaaagacagtggtgttgcttcaacagaagatagttcctcatcacatataactgcagcagccattgctgccaagattccagactccatcatttctcgtggtgttcaggtgctcccacgagacacagcctccctcagcactactccttcagaatcgcctcgtgctcaggctacatctcgcctctctacagcttcctgcccaacaccaaaagtccagtccaggtgcagcagcaaggagaacattctcagagccagtcacagtgctgtcgatatcaccaaggtggctagaagacatcgcatgtctccttttcctctgacatctatggacaaagcctttatcacagtcctggagatgactccggtgcttgggacagaaatcatcaattaccgagatggaatggggcgagtccttgctcaagatgtatatgcaaaagacaatttaccccccttcccagcatcagtaaaagatggctatgctgtccgagctgctgatggcccaggagatcgtttcatcattggggaatcccaagctggtgaacagccaactcagacagtaatgccaggacaagtcatgcgggttacaacaggtgctccaataccctgcggtgctgatgcagtagtacaagtggaagataccgaacttatcagggaatcagatgatggcactgaagaacttgaagtgcgaattctggtgcaagctcggccaggccaagatatcagacccatcggccatgacattaaaagaggggaatgtgttttggccaaaggaacccacatgggcccctcagagattggtcttctggcaactgtaggtgtcacagaggttgaagttaataagtttccagtggttgcagtcatgtcaacagggaatgagctgctaaatcctgaagatgacctcttaccagggaagattcgagacagcaatcgttcaactcttctagcaacaattcaggaacatggttaccccacgatcaacttgggtattgtaggagacaacccagatgacttactcaatgccttgaatgagggtatcagtcgtgctgatgtcatcatcacatcagggggtgtatccatgggggaaaaggactatctcaagcaggtgctggacattgatcttcatgctcagatccattttggcagggtttttatgaaaccaggcttgccaacaacatttgcaactttggatattgatggtgtaagaaaaataatctttgcactacctgggaatcctgtatcggctgtggtcacctgcaatctctttgttgtgcctgcactgaggaaaatgcagggcatcttggatcctcggccaaccatcatcaaagcaaggttatcatgtgatgtaaaacttgatcctcgtccagaataccatcggtgtatactaacttggcatcaccaagaaccactaccttgggcacagagtacaggtaatcaaatgagcagccgtctgatgagcatgcgcagtgccaatggattgttgatgctacctccaaagacagaacagtacgtggagctccacaaaggcgaggtggtggatgtcatggtcattggacggctatgatggtcaccagcaggagaaagctttgatgcatgtccacatatcattgactgtatcctgtaatatgcaacggcacagctagttttcccgatttggataaaagttgatctgtatagtcaacatcttgaactatatttcaaatgaatttaaatatcttttaaagaaaaaaacacctaaaaataaatcttaacagaaaattctgttctgattatatcaaggcaaatttttcctttcttgcaaattgctttgtgtgttcaatgctaggtctgatagcgatagcttttagtagacagcggtaggtgcctgcagaacttgtgtttttctcatctttaaaatacaactacttatgctcttaaatcaaggctgtctgcttatttatactagcgtaggcaacacttggatttcccttcttagtatgcttcataactgctttacagagagcttttgcttgttctttctcatgtatctcgtgtttatgtgcacagtgccaaaagaagactgactgggtggaggctctgccttgcctcaagaaccatcccctgcagagcatccagggaggtttctcgccccaatagcctcacggcacagtactcttgggcagtaactggacaccttttatttgaagaaacaaactgaagaaaaaatgcttccttaagtgctgacagcctttttaaccaatacatttaaaattgtacagaacaaaaaaataaaatcaaagactgatcttgtacagatattagtgttaccagcattcatgtggaaatcaagagcaaagacaaaataatgttaaacaattctgtaccataacattttctgtaatgatactgaaacttaatgaataaaaaaattccttgatcattatttaaaaa

SEQ ID NO: 415776 - DNA, 2430 bp, Homo sapiens
  misc_feature (2402)..(2402): n is a, c, g, or t
agcagcgctcatggcgaagaggcttaaggccacaaaaccgtgggacagcaggaggaagagaagccaggtatctccactccagctgccctgcctcagactcctcagtttcgcacgtgaggatcgtcttgcaggcactgactggagatggaatcctaaagcataggtgaagcggaaatcctccttcagggagagcccactgaggaagccagcggctagcacgaggcaggacaggatacctccctcttcgcccacggcggcctctctgtcatagtagccaccgttctgccactcatgcagctttctaagacacctctcggttccccagcgctttcagtggggcggccggccactcccgagggttgcaagaggaggcccggggtgctgagccagcctcgctgcccccgcgtagaaagccggcccgccggcgagagccagcctaaggcgcggacaaccaacgaggtgtcaggctcggcaggggattgcttctgtctggggcccggccgaggttgcgttcgtgcctcgcgcgcacacgctccgcgttcactcagccaatccggtgctactcgcgcgcccaggagcgatccgcggtcctactcaggctgggccggctccttcccgctcccaatactcagcacccgagctctcactcctcccctcactctccacgagttccacgcctaggggtgtagctccgcccttgtccccgagtccgcccccgcaacctccagagcgtgtgctatcctttcctctcagtcctgccatctagctgccttgggtctcgcgctccgcagagcgttccgacactctccggcctcgttctgccgcctccgcgcgctctccccgtgcggccaccgcgccccccaagcttgcctccttcttgccggacttggggccgcgcgccctgactccttcccctcccgcggacccgcgcactcccggcgcggcctctcccccacgcaggccaccgtgcactctgtggcctccccctccttccccgctctcctcgcgcttctctggctccctagctgtcgcgctctcctcggcgagcgcgctcccggcccgcgcgctccgggctccggtttctcccggctcctgtcagtgcggtgactgcgctgggaaacatggcgaccgagggaatgatccttactaaccacgaccatcaaatccgtgtcggagtccttacagtgagtgatagttgcttcaggaatcttgcagaagaccgcagtgggataaatctcaaagatctcgtacaagatccttctttgttgggtgggactatatcagcatacaagatagtaccagatgaaatagaagaaatcaagaaattcccaacattcccattttgtgggctccagaaaggggccacaaaagaagtaatagaacgggaagcaccagggatggccctggcaatgctgatgggatcacttaatgttacacctctgggcatgctctctaggcctgtatgtggaatcagagggaaaacgctcataattaacctgccaggtagcaagaaaggatctcaggaatgctttcaattcatactgccagctctacctcatgccattgaccttttacgtgatgccattgtaaaagtaaaggaggtgcatgatgaacttgaagatttgccttccccacctccccctctttcccctcctcctactaccagcccccataaacagacagaagacaaaggagttcaatgtgaggaagaggaagaagagaagaaagacagtggtgttgcttcaacagaagatagttcctcatcacatataactgcagcagccattgctgccaagaagcatccattctacaccagtcctgctgttgtcatggcacacggtgaacagcccatccctggtctcatcaattattcccatcattcaacagatgaacggattccagactccatcatttctcgtggtgttcaggtgctcccacgagacacagcctccctcagcactactccttcagaatcgcctcgtgctcaggctacatctcgcctctctacagcttcctgcccaacaccaaaagtccagtccaggtgcagcagcaaggagaacattctcagagccagtcacagtgctgtcgatatcaccaaggtggctagaagacatcgcatgtctccttttcctctgacatctatggacaaagcctttatcacagtcctggagatgactccggtgcttgggacagaaatcatcaattaccgaggtactattatatttgaccattgccctttcttttcttcatttttttccaaataagattcatgtaacattaatgcacagttttcctgaaaaagaaagattattaaccattattacagttatcatcattctttttttttcttatttctactcaataagaaaaaggctaagggttcagccttaacagtatacagngtaaaatccatgaaactgccttttcatt

SEQ ID NO: 415777 - DNA, 418 bp, Homo sapiens
  misc_feature (72)..(72): n is a, c, g, or t
ctcccggctttagctccttgcctctcttgcgcgcataacgcgaagaagaacaaaaaaaaactaaggttaccnagcggactatctcaagcaggtgctggacattgatcttcatgctcagatccattttggcagggtttttatgaaaccaggcttgccaacaacatttgcaactttggatattgatggtgtaagaaaaataatctttgcactacctgggaatcctgtatcggctgtggtcacctgcaatctctttgttgtgcctgcactgaggaaaatgcagggcatcttggatcctcggccaaccatcatcaaagcaagggtaatgctttctaatgaccagaaaccaaaatggaagcctggtaacagttagggatatgatttcctaactgtccaaaataaacatctagagttttctatt

SEQ ID NO: 415778 - DNA, 500 bp, Homo sapiens
agagttgctttttctttatgccattgatatttggctatgttagaatattatttaattctcagttatcatagtgaattaaaaatttatatgtatcagataatcaccatcagatttatctgccatttgcaatgaatttctgactacaatattaggagaatcgaaaaggaaccctttcctgtgtagttcattaaaaatctacataagaaaacactgtgtataagcattggtgtgcatagtggattatctttttatcttgttgcaatttcttttccctataagccttcaccacttttaaatatcagtctttttttaaattattattatactttaagttttagggtacatgtgcacaatgtgcaggttagttacatatgtatacatgtgacatgctggtgcattgcacccactaactcgtcatctagcttaggtatatctcccaatgctatcccgagctggttttttgaaaggatcaacaaaattgatagaccgctagcaagact

SEQ ID NO: 415779 - DNA, 459 bp, Homo sapiens
tgttcttcagaatagatgccacagtcattgcctttaccaatgcttgctgctttcaggaagtgggagtcagtgttaaatgctgctgttggtaaatcatactgttggactctgatgtggccattctgtgtgtcagtgcagaaaatgtcatccttgctaggcacagtggcactcgcctgtaatccctgctcctcaggaggctcaggcaggaggattgcatgaggccaagtgtttgagaccagcctgggcaacatagcaacaccctgcctctaaaaaaattaacaaaaagaaaatgtaaaaaaaaaatgaaaataaaatgtcatcctttcatatcaaagcattcagaagagcatcattttagaacaaacatttcccttatttccttggtcacttatggttggaggtgaaaatcttctcattttcagtacacaataagaaacacttccaaagcatctggtaaag

SEQ ID NO: 415780 - DNA, 321 bp, Homo sapiens
gagtagaaaagaccaaagcaggaaaagaaccagagcaaagaaaaaaaagttacatggaaaccaacatttgcggttttggagtttaacggtgtaagaaaaataatctttgcactacctgggaatcctgtatcggctgtggtcacctgcaatctctttgttgtgcctgcactgaggaaaatgcagggcatcttggatcctcggccaaccatcatcaaagcaagggtaatgctttctaatgaccagaaaccaaaatggaagcctggtaacagttagggatatgatttcctaactgtccaaaataaacatctagagttttctatt

SEQ ID NO: 415781 - DNA, 4297 bp, Homo sapiens
agcagcgctcatggcgaagaggcttaaggccacaaaaccgtgggacagcaggaggaagagaagccaggtatctccactccagctgccctgcctcagactcctcagtttcgcacgtgaggatcgtcttgcaggcactgactggagatggaatcctaaagcataggtgaagcggaaatcctccttcagggagagcccactgaggaagccagcggctagcacgaggcaggacaggatacctccctcttcgcccacggcggcctctctgtcatagtagccaccgttctgccactcatgcagctttctaagacacctctcggttccccagcgctttcagtggggcggccggccactcccgagggttgcaagaggaggcccggggtgctgagccagcctcgctgcccccgcgtagaaagccggcccgccggcgagagccagcctaaggcgcggacaaccaacgaggtgtcaggctcggcaggggattgcttctgtctggggcccggccgaggttgcgttcgtgcctcgcgcgcacacgctccgcgttcactcagccaatccggtgctactcgcgcgcccaggagcgatccgcggtcctactcaggctgggccggctccttcccgctcccaatactcagcacccgagctctcactcctcccctcactctccacgagttccacgcctaggggtgtagctccgcccttgtccccgagtccgcccccgcaacctccagagcgtgtgctatcctttcctctcagtcctgccatctagctgccttgggtctcgcgctccgcagagcgttccgacactctccggcctcgttctgccgcctccgcgcgctctccccgtgcggccaccgcgccccccaagcttgcctccttcttgccggacttggggccgcgcgccctgactccttcccctcccgcggacccgcgcactcccggcgcggcctctcccccacgcaggccaccgtgcactctgtggcctccccctccttccccgctctcctcgcgcttctctggctccctagctgtcgcgctctcctcggcgagcgcgctcccggcccgcgcgctccgggctccggtttctcccggctcctgtcagtgcggtgactgcgctgggaaacatggcgaccgagggaatgatccttactaaccacgaccatcaaatccgtgtcggagtccttacagtgagtgatagttgcttcaggaatcttgcagaagaccgcagtgggataaatctcaaagatctcgtacaagatccttctttgttgggtgggactatatcagcatacaagatagtaccagatgaaatagaagaaatcaaggaaaccctgatagattggtgtgatgaaaaggaacttaatttgatattaacaactggaggaacaggatttgcaccacgagatgtcactccagaggccacaaaagaagtaatagaacgggaagcaccagggatggccctggcaatgctgatgggatcacttaatgttacacctctgggcatgctctctaggcctgtatgtggaatcagagggaaaacgctcataattaacctgccaggtagcaagaaaggatctcaggaatgctttcaattcatactgccagctctacctcatgccattgaccttttacgtgatgccattgtaaaagtaaaggaggtgcatgatgaacttgaagatttgccttccccacctccccctctttcccctcctcctactaccagcccccataaacagacagaagacaaaggagttcaatgtgaggaagaggaagaagagaagaaagacagtggtgttgcttcaacagaagatagttcctcatcacatataactgcagcagccattgctgccaagaagcatccattctacaccagtcctgctgttgtcatggcacacggtgaacagcccatccctggtctcatcaattattcccatcattcaacagatgaacggattccagactccatcatttctcgtggtgttcaggtgctcccacgagacacagcctccctcagcactactccttcagaatcgcctcgtgctcaggctacatctcgcctctctacagcttcctgcccaacaccaaaagtccagtccaggtgcagcagcaaggagaacattctcagagccagtcacagtgctgtcgatatcaccaaggtggctagaagacatcgcatgtctccttttcctctgacatctatggacaaagcctttatcacagtcctggagatgactccggtgcttgggacagaaatcatcaattaccgagatggaatggggcgagtccttgctcaagatgtatatgcaaaagacaatttaccccccttcccagcatcagtaaaagatggctatgctgtccgagctgctgatggcccaggagatcgtttcatcattggggaatcccaagctggtgaacagccaactcagacagtaatgccaggacaagtcatgcgggttacaacaggtgctccaataccctgcggtgctgatgcagtagtacaagtggaagataccgaacttatcagggaatcagatgatggcactgaagaacttgaagtgcgaattctggtgcaagctcggccaggccaagatatcagacccatcggccatgacattaaaagaggggaatgtgttttggccaaaggaacccacatgggcccctcagagattggtcttctggcaactgtaggtgtcacagaggttgaagttaataagtttccagtggttgcagtcatgtcaacagggaatgagctgctaaatcctgaagatgacctcttaccagggaagattcgagacagcaatcgttcaactcttctagcaacaattcaggaacatggttaccccacgatcaacttgggtattgtaggagacaacccagatgacttactcaatgccttgaatgagggtatcagtcgtgctgatgtcatcatcacatcagggggtgtatccatgggggaaaaggactatctcaagcaggtgctggacattgatcttcatgctcagatccattttggcagggtttttatgaaaccaggcttgccaacaacatttgcaactttggatattgatggtgtaagaaaaataatctttgcactacctgggaatcctgtatcggctgtggtcacctgcaatctctttgttgtgcctgcactgaggaaaatgcagggcatcttggatcctcggccaaccatcatcaaagcaaggttatcatgtgatgtaaaacttgatcctcgtccagaataccatcggtgtatactaacttggcatcaccaagaaccactaccttgggcacagagtacaggtaatcaaatgagcagccgtctgatgagcatgcgcagtgccaatggattgttgatgctacctccaaagacagaacagtacgtggagctccacaaaggcgaggtggtggatgtcatggtcattggacggctatgatggtcaccagcaggagaaagctttgatgcatgtccacatatcattgactgtatcctgtaatatgcaacggcacagctagttttcccgatttggataaaagttgatctgtatagtcaacatcttgaactatatttcaaatgaatttaaatatcttttaaagaaaaaaacacctaaaaataaatcttaacagaaaattctgttctgattatatcaaggcaaatttttcctttcttgcaaattgctttgtgtgttcaatgctaggtctgatagcgatagcttttagtagacagcggtaggtgcctgcagaacttgtgtttttctcatctttaaaatacaactacttatgctcttaaatcaaggctgtctgcttatttatactagcgtaggcaacacttggatttcccttcttagtatgcttcataactgctttacagagagcttttgcttgttctttctcatgtatctcgtgtttatgtgcacagtgccaaaagaagactgactgggtggaggctctgccttgcctcaagaaccatcccctgcagagcatccagggaggtttctcgccccaatagcctcacggcacagtactcttgggcagtaactggacaccttttatttgaagaaacaaactgaagaaaaaatgcttccttaagtgctgacagcctttttaaccaatacatttaaaattgtacagaacaaaaaaataaaatcaaagactgatcttgtacagatattagtgttaccagcattcatgtggaaatcaagagcaaagacaaaataatgttaaacaattctgtaccataacattttctgtaatgatactgaaacttaatgaataaaaaaattccttgatcattatttaaaaa

SEQ ID NO: 415782 - DNA, 2532 bp, Homo sapiens
acagccaattccagactccatcatttctcgttatgtcaggtgctcccacgagacacagcctcactcagcactactccttcagaatctgctcgtgctcaggctacatctcggcctctctacagcttcctgcgcaaaacaaaagtccagtccaggtgcagcagcaaggagaacattctcagagccaattccagactccatcatttctcgtggtgttcaggtgctcccacgagacacagcctccctcagcactactccttcagaatcgcctcgtgctcaggctacatctcgcctctctacagcttcctgcccaacaccaaaagtccagtccaggtgcagcagcaaggagaacattctcagagccagtcacagtgctgtcgatatcaccaaggtggctagaagacatcgcatgtctccttttcctctgacatctatggacaaagcctttatcacagtcctggagatgactccggtgcttgggacagaaatcatcaattaccgagatggaatggggcgagtccttgctcaagatgtatatgcaaaagacaatttaccccccttcccagcatcagtaaaagatggctatgctgtccgagctgctgatggcccaggagatcgtttcatcattggggaatcccaagctggtgaacagccaactcagacagtaatgccaggacaagtcatgcgggttacaacaggtgctccaataccctgcggtgctgatgcagtagtacaagtggaagataccgaacttatcagggaatcagatgatggcactgaagaacttgaagtgcgaattctggtgcaagctcggccaggccaagatatcagacccatcggccatgacattaaaagaggggaatgtgttttggccaaaggaacccacatgggcccctcagagattggtcttctggcaactgtaggtgtcacagaggttgaagttaataagtttccagtggttgcagtcatgtcaacagggaatgagctgctaaatcctgaagatgacctcttaccagggaagattcgagacagcaatcgttcaactcttctagcaacaattcaggaacatggttaccccacgatcaacttgggtattgtaggagacaacccagatgacttactcaatgccttgaatgagggtatcagtcgtgctgatgtcatcatcacatcagggggtgtatccatgggggaaaaggactatctcaagcaggtgctggacattgatcttcatgctcagatccattttggcagggtttttatgaaaccaggcttgccaacaacatttgcaactttggatattgatggtgtaagaaaaataatctttgcactacctgggaatcctgtatcggctgtggtcacctgcaatctctttgttgtgcctgcactgaggaaaatgcagggcatcttggatcctcggccaaccatcatcaaagcaaggttatcatgtgatgtaaaacttgatcctcgtccagaataccatcggtgtatactaacttggcatcaccaagaaccactaccttgggcacagagtacaggtaatcaaatgagcagccgtctgatgagcatgcgcagtgccaatggattgttgatgctacctccaaagacagaacagtacgtggagctccacaaaggcgaggtggtggatgtcatggtcattggacggctatgatggtcaccagcaggagaaagctttgatgcatgtccacatatcattgactgtatcctgtaatatgcaacggcacagctagttttcccgatttggataaaagttgatctgtatagtcaacatcttgaactatatttcaaatgaatttaaatatcttttaaagaaaaaaacacctaaaaataaatcttaacagaaaattctgttctgattatatcaaggcaaatttttcctttcttgcaaattgctttgtgtgttcaatgctaggtctgatagcgatagcttttagtagacagcggtaggtgcctgcagaacttgtgtttttctcatctttaaaatacaactacttatgctcttaaatcaaggctgtctgcttatttatactagcgtaggcaacacttggatttcccttcttagtatgcttcataactgctttacagagagcttttgcttgttctttctcatgtatctcgtgtttatgtgcacagtgccaaaagaagactgactgggtggaggctctgccttgcctcaagaaccatcccctgcagagcatccagggaggtttctcgccccaatagcctcacggcacagtactcttgggcagtaactggacaccttttatttgaagaaacaaactgaagaaaaaatgcttccttaagtgctgacagcctttttaaccaatacatttaaaattgtacagaacaaaaaaataaaatcaaagactgatcttgtacagatattagtgttaccagcattcatgtggaaatcaagagcaaagacaaaataatgttaaacaattctgtaccataacattttctgtaatgatactgaaacttaatgaataaaaaaattccttgatcattatttaaaaa

SEQ ID NO: 415783 - DNA, 3180 bp, Homo sapiens
tgaataggctgatgaggaggcggaggaagaggaaaaggagttggttttgctgtctcaggagtggcagaggcagagaagagttgtcagggaggtagaagaggcaggcacactcaagtgtaacatttatggaaaaaagtctgcatgcatgttgggtgggactatatcagcatacaagatagtaccagatgaaatagaagaaatcaaggaaaccctgatagattggtgtgatgaaaaggaacttaatttgatattaacaactggaggaacaggatttgcaccacgagatgtcactccagaggccacaaaagaagtaatagaacgggaagcaccagggatggccctggcaatgctgatgggatcacttaatgttacacctctgggcatgctctctaggcctgtatgtggaatcagagggaaaacgctcataattaacctgccaggtagcaagaaaggatctcaggaatgctttcaattcatactgccagctctacctcatgccattgaccttttacgtgatgccattgtaaaagtaaaggaggtgcatgatgaacttgaagatttgccttccccacctccccctctttcccctcctcctactaccagcccccataaacagacagaagacaaaggagttcaatgtgaggaagaggaagaagagaagaaagacagtggtgttgcttcaacagaagatagttcctcatcacatataactgcagcagccattgctgccaagaagcatccattctacaccagtcctgctgttgtcatggcacacggtgaacagcccatccctggtctcatcaattattcccatcattcaacagatgaacggattccagactccatcatttctcgtggtgttcaggtgctcccacgagacacagcctccctcagcactactccttcagaatcgcctcgtgctcaggctacatctcgcctctctacagcttcctgcccaacaccaaaagtccagtccaggtgcagcagcaaggagaacattctcagagccagtcacagtgctgtcgatatcaccaaggtggctagaagacatcgcatgtctccttttcctctgacatctatggacaaagcctttatcacagtcctggagatgactccggtgcttgggacagaaatcatcaattaccgagatggaatggggcgagtccttgctcaagatgtatatgcaaaagacaatttaccccccttcccagcatcagtaaaagatggctatgctgtccgagctgctgatggcccaggagatcgtttcatcattggggaatcccaagctggtgaacagccaactcagacagtaatgccaggacaagtcatgcgggttacaacaggtgctccaataccctgcggtgctgatgcagtagtacaagtggaagataccgaacttatcagggaatcagatgatggcactgaagaacttgaagtgcgaattctggtgcaagctcggccaggccaagatatcagacccatcggccatgacattaaaagaggggaatgtgttttggccaaaggaacccacatgggcccctcagagattggtcttctggcaactgtaggtgtcacagaggttgaagttaataagtttccagtggttgcagtcatgtcaacagggaatgagctgctaaatcctgaagatgacctcttaccagggaagattcgagacagcaatcgttcaactcttctagcaacaattcaggaacatggttaccccacgatcaacttgggtattgtaggagacaacccagatgacttactcaatgccttgaatgagggtatcagtcgtgctgatgtcatcatcacatcagggggtgtatccatgggggaaaaggactatctcaagcaggtgctggacattgatcttcatgctcagatccattttggcagggtttttatgaaaccaggcttgccaacaacatttgcaactttggatattgatggtgtaagaaaaataatctttgcactacctgggaatcctgtatcggctgtggtcacctgcaatctctttgttgtgcctgcactgaggaaaatgcagggcatcttggatcctcggccaaccatcatcaaagcaaggttatcatgtgatgtaaaacttgatcctcgtccagaataccatcggtgtatactaacttggcatcaccaagaaccactaccttgggcacagagtacaggtaatcaaatgagcagccgtctgatgagcatgcgcagtgccaatggattgttgatgctacctccaaagacagaacagtacgtggagctccacaaaggcgaggtggtggatgtcatggtcattggacggctatgatggtcaccagcaggagaaagctttgatgcatgtccacatatcattgactgtatcctgtaatatgcaacggcacagctagttttcccgatttggataaaagttgatctgtatagtcaacatcttgaactatatttcaaatgaatttaaatatcttttaaagaaaaaaacacctaaaaataaatcttaacagaaaattctgttctgattatatcaaggcaaatttttcctttcttgcaaattgctttgtgtgttcaatgctaggtctgatagcgatagcttttagtagacagcggtaggtgcctgcagaacttgtgtttttctcatctttaaaatacaactacttatgctcttaaatcaaggctgtctgcttatttatactagcgtaggcaacacttggatttcccttcttagtatgcttcataactgctttacagagagcttttgcttgttctttctcatgtatctcgtgtttatgtgcacagtgccaaaagaagactgactgggtggaggctctgccttgcctcaagaaccatcccctgcagagcatccagggaggtttctcgccccaatagcctcacggcacagtactcttgggcagtaactggacaccttttatttgaagaaacaaactgaagaaaaaatgcttccttaagtgctgacagcctttttaaccaatacatttaaaattgtacagaacaaaaaaataaaatcaaagactgatcttgtacagatattagtgttaccagcattcatgtggaaatcaagagcaaagacaaaataatgttaaacaattctgtaccataacattttctgtaatgatactgaaacttaatgaataaaaaaattccttgatcattatttaaaaa

SEQ ID NO: 415784 - DNA, 3757 bp, Homo sapiens
agcagcgctcatggcgaagaggcttaaggccacaaaaccgtgggacagcaggaggaagagaagccaggtatctccactccagctgccctgcctcagactcctcagtttcgcacgtgaggatcgtcttgcaggcactgactggagatggaatcctaaagcataggtgaagcggaaatcctccttcagggagagcccactgaggaagccagcggctagcacgaggcaggacaggatacctccctcttcgcccacggcggcctctctgtcatagtagccaccgttctgccactcatgcagctttctaagacacctctcggttccccagcgctttcagtggggcggccggccactcccgagggttgcaagaggaggcccggggtgctgagccagcctcgctgcccccgcgtagaaagccggcccgccggcgagagccagcctaaggcgcggacaaccaacgaggtgtcaggctcggcaggggattgcttctgtctggggcccggccgaggttgcgttcgtgcctcgcgcgcacacgctccgcgttcactcagccaatccggtgctactcgcgcgcccaggagcgatccgcggtcctactcaggctgggccggctccttcccgctcccaatactcagcacccgagctctcactcctcccctcactctccacgagttccacgcctaggggtgtagctccgcccttgtccccgagtccgcccccgcaacctccagagcgtgtgctatcctttcctctcagtcctgccatctagctgccttgggtctcgcgctccgcagagcgttccgacactctccggcctcgttctgccgcctccgcgcgctctccccgtgcggccaccgcgccccccaagcttgcctccttcttgccggacttggggccgcgcgccctgactccttcccctcccgcggacccgcgcactcccggcgcggcctctcccccacgcaggccaccgtgcactctgtggcctccccctccttccccgctctcctcgcgcttctctggctccctagctgtcgcgctctcctcggcgagcgcgctcccggcccgcgcgctccgggctccggtttctcccggctcctgtcagtgcggtgactgcgctgggaaacatggcgaccgagggaatgatccttactaaccacgaccatcaaatccgtgtcggagtccttacagtgagtgatagttgcttcaggaatcttgcagaagaccgcagtgggataaatctcaaagatctcgtacaagatccttctttgttgggtgggactatatcagcatacaagatagtaccagatgaaatagaagaaatcaaggaaaccctgatagattggtgtgatgaaaaggaacttaatttgatattaacaactggaggaacaggatttgcaccacgagatgtcactccagaggccacaaaagaagtaatagaacgggaagcaccagggatggccctggcaatgctgatgggatcacttaatgttacacctctgggcatgctctctaggcctgtatgtggaatcagagggaaaacgctcataattaacctgccaggtagcaagaaaggatctcaggaatgctttcaattcatactgccagctctacctcatgccattgaccttttacgtgatgccattgtaaaagtaaaggaggtgcatgatgaacttgaagatttgccttccccacctccccctctttcccctcctcctactaccagcccccataaacagacagaagacaaaggagttcaatgtgaggaagaggaagaagagaagaaagacagtggtgttgcttcaacagaagatagttcctcatcacatataactgcagcagccattgctgccaagaagcatccattctacaccagtcctgctgttgtcatggcacacggtgaacagcccatccctggtctcatcaattattcccatcattcaacagatgaacggattccagactccatcatttctcgtggtgttcaggtgctcccacgagacacagcctccctcagcactactccttcagaatcgcctcgtgctcaggctacatctcgcctctctacagcttcctgcccaacaccaaaagtccagtccaggtgcagcagcaaggagaacattctcagagccagtcacagtgctgtcgatatcaccaaggtggctagaagacatcgcatgtctccttttcctctgacatctatggacaaagcctttatcacagtcctggagatgactccggtgcttgggacagaaatcatcaattaccgagatggaatggggcgagtccttgctcaagatgtatatgcaaaagacaatttaccccccttcccagcatcagtaaaagatggctatgctgtccgagctgctgatggcccaggagatcgtttcatcattggggaatcccaagctggtgaacagccaactcagacagtaatgccaggacaagtcatgcgggttacaacaggtgctccaataccctgcggtgctgatgcagtagtacaagtggaagataccgaacttatcagggaatcagatgatggcactgaagaacttgaagtgcgaattctggtgcaagctcggccaggccaagatatcagacccatcggccatgacattaaaagaggggaatgtgttttggccaaaggaacccacatgggcccctcagagattggtcttctggcaactgtaggtgtcacagaggttgaagttaataagtttccagtggttgcagtcatgtcaacagggaatgagctgctaaatcctgaagatgacctcttaccagggaagattcgagacagcaatcgttcaactcttctagcaacaattcaggaacatggttaccccacgatcaacttgggtattgtaggagacaacccagatgacttactcaatgccttgaatgagggtatcagtcgtgctgatgtcatcatcacatcagggggtgtatccatgggggaaaaggactatctcaagcaggtgctggacattgatcttcatgctcagatccattttggcagggtttttatgaaaccaggcttgccaacaacatttgcaactttggatattgatggtgtaagaaaaataatctttgcactacctgggaatcctgtatcggctgtggtcacctgcaatctctttgttgtgcctgcactgaggaaaatgcagggcatcttggatcctcggccaaccatcatcaaagcaaggttatcatgtgatgtaaaacttgatcctcgtccagaataccatcggtgtatactaacttggcatcaccaagaaccactaccttgggcacagagtacaggtaatcaaatgagcagccgtctgatgagcatgcgcagtgccaatggattgttgatgctacctccaaagacagaacatgccaaaagaagactgactgggtggaggctctgccttgcctcaagaaccatcccctgcagagcatccagggaggtttctcgccccaatagcctcacggcacagtactcttgggcagtaactggacaccttttatttgaagaaacaaactgaagaaaaaatgcttccttaagtgctgacagcctttttaaccaatacatttaaaattgtacagaacaaaaaaataaaatcaaagactgatcttgtacagatattagtgttaccagcattcatgtggaaatcaagagcaaagacaaaataatgttaaacaattctgtaccataacattttctgtaatgatactgaaacttaatgaataaaaaaattccttgatcattatttaaaaa

SEQ ID NO: 415785 - DNA, 3299 bp, Homo sapiens
agcagcgctcatggcgaagaggcttaaggccacaaaaccgtgggacagcaggaggaagagaagccaggtatctccactccagctgccctgcctcagactcctcagtttcgcacgtgaggatcgtcttgcaggcactgactggagatggaatcctaaagcataggtgaagcggaaatcctccttcagggagagcccactgaggaagccagcggctagcacgaggcaggacaggatacctccctcttcgcccacggcggcctctctgtcatagtagccaccgttctgccactcatgcagctttctaagacacctctcggttccccagcgctttcagtggggcggccggccactcccgagggttgcaagaggaggcccggggtgctgagccagcctcgctgcccccgcgtagaaagccggcccgccggcgagagccagcctaaggcgcggacaaccaacgaggtgtcaggctcggcaggggattgcttctgtctggggcccggccgaggttgcgttcgtgcctcgcgcgcacacgctccgcgttcactcagccaatccggtgctactcgcgcgcccaggagcgatccgcggtcctactcaggctgggccggctccttcccgctcccaatactcagcacccgagctctcactcctcccctcactctccacgagttccacgcctaggggtgtagctccgcccttgtccccgagtccgcccccgcaacctccagagcgtgtgctatcctttcctctcagtcctgccatctagctgccttgggtctcgcgctccgcagagcgttccgacactctccggcctcgttctgccgcctccgcgcgctctccccgtgcggccaccgcgccccccaagcttgcctccttcttgccggacttggggccgcgcgccctgactccttcccctcccgcggacccgcgcactcccggcgcggcctctcccccacgcaggccaccgtgcactctgtggcctccccctccttccccgctctcctcgcgcttctctggctccctagctgtcgcgctctcctcggcgagcgcgctcccggcccgcgcgctccgggctccggtttctcccggctcctgtcagtgcggtgactgcgctgggaaacatggcgaccgagggaatgatccttactaaccacgaccatcaaatccgtgtcggagtccttacagtgagtgatagttgcttcaggaatcttgcagaagaccgcagtgggataaatctcaaagatctcgtacaagatccttctttgttgggtgggactatatcagcatacaagatagtaccagatgaaatagaagaaatcaaggaaaccctgatagattggtgtgatgaaaaggaacttaatttgatattaacaactggaggaacaggatttgcaccacgagatgtcactccagaggccacaaaagaagtaatagaacgggaagcaccagggatggccctggcaatgctgatgggatcacttaatgttacacctctgggcatgctctctaggcctgtatgtggaatcagagggaaaacgctcataattaacctgccaggtagcaagaaaggatctcaggaatgctttcaattcatactgccagctctacctcatgccattgaccttttacgtgatgccattgtaaaagtaaaggaggtgcatgatgaacttgaagatttgccttccccacctccccctctttcccctcctcctactaccagcccccataaacagacagaagacaaaggagttcaatgtgaggaagaggaagaagagaagaaagacagtggtgttgcttcaacagaagatagttcctcatcacatataactgcagcagccattgctgccaagaagcatccattctacaccagtcctgctgttgtcatggcacacggtgaacagcccatccctggtctcatcaattattcccatcattcaacagatgaacggattccagactccatcatttctcgtggtgttcaggtgctcccacgagacacagcctccctcagcactactccttcagaatcgcctcgtgctcaggctacatctcgcctctctacagcttcctgcccaacaccaaaagtccagtccaggtgcagcagcaaggagaacattctcagagccagtcacagtgctgtcgatatcaccaaggtggctagaagacatcgcatgtctccttttcctctgacatctatggacaaagcctttatcacagtcctggagatgactccggtgcttgggacagaaatcatcaattaccgagatggaatggggcgagtccttgctcaagatgtatatgcaaaagacaatttaccccccttcccagcatcagtaaaagatggctatgctgtccgagctgctgatggcccaggagatcgtttcatcattggggaatcccaagctggtgaacagccaactcagacagtaatgccaggacaagtcatgcgggttacaacaggtgctccaataccctgcggtgctgatgcagtagtacaagtggaagataccgaacttatcagggaatcagatgatggcactgaagaacttgaagtgcgaattctggtgcaagctcggccaggccaagatatcagacccatcggccatgacattaaaagaggggaatgtgttttggccaaaggaacccacatgggcccctcagagattggtcttctggcaactgtaggtgtcacagaggttgaagttaataagtttccagtggttgcagtcatgtcaacagggaatgagctgctaaatcctgaagatgacctcttaccagggaagattcgagacagcaatcgttcaactcttctagcaacaattcaggaacatggttaccccacgatcaacttgggtattgtaggagacaacccagatgacttactcaatgccttgaatgagggtatcagtcgtgctgatgtcatcatcacatcagggggtgtatccatgggggaaaaggactatctcaagcaggtgctggacattgatcttcatgctcagatccattttggcagggtttttatgaaaccaggcttgccaacaacatttgcaactttggatattgatggtgtaagaaaaataatctttgcactacctgggaatcctgtatcggctgtggtcacctgcaatctctttgttgtgcctgcactgaggaaaatgcagggcatcttggatcctcggccaaccatcatcaaagcaagggtaatgctttctaatgaccagaaaccaaaatggaagcctggtaacagttagggatatgatttcctaactgtccaaaataaacatctagagttttctatt

SEQ ID NO: 415786 - DNA, 3502 bp, Homo sapiens
agcagcgctcatggcgaagaggcttaaggccacaaaaccgtgggacagcaggaggaagagaagccaggtatctccactccagctgccctgcctcagactcctcagtttcgcacgtgaggatcgtcttgcaggcactgactggagatggaatcctaaagcataggtgaagcggaaatcctccttcagggagagcccactgaggaagccagcggctagcacgaggcaggacaggatacctccctcttcgcccacggcggcctctctgtcatagtagccaccgttctgccactcatgcagctttctaagacacctctcggttccccagcgctttcagtggggcggccggccactcccgagggttgcaagaggaggcccggggtgctgagccagcctcgctgcccccgcgtagaaagccggcccgccggcgagagccagcctaaggcgcggacaaccaacgaggtgtcaggctcggcaggggattgcttctgtctggggcccggccgaggttgcgttcgtgcctcgcgcgcacacgctccgcgttcactcagccaatccggtgctactcgcgcgcccaggagcgatccgcggtcctactcaggctgggccggctccttcccgctcccaatactcagcacccgagctctcactcctcccctcactctccacgagttccacgcctaggggtgtagctccgcccttgtccccgagtccgcccccgcaacctccagagcgtgtgctatcctttcctctcagtcctgccatctagctgccttgggtctcgcgctccgcagagcgttccgacactctccggcctcgttctgccgcctccgcgcgctctccccgtgcggccaccgcgccccccaagcttgcctccttcttgccggacttggggccgcgcgccctgactccttcccctcccgcggacccgcgcactcccggcgcggcctctcccccacgcaggccaccgtgcactctgtggcctccccctccttccccgctctcctcgcgcttctctggctccctagctgtcgcgctctcctcggcgagcgcgctcccggcccgcgcgctccgggctccggtttctcccggctcctgtcagtgcggtgactgcgctgggaaacatggcgaccgagggaatgatccttactaaccacgaccatcaaatccgtgtcggagtccttacagtgagtgatagttgcttcaggaatcttgcagaagaccgcagtgggataaatctcaaagatctcgtacaagatccttctttgttgggtgggactatatcagcatacaagatagtaccagatgaaatagaagaaatcaaggaaaccctgatagattggtgtgatgaaaaggaacttaatttgatattaacaactggaggaacaggatttgcaccacgagatgtcactccagaggccacaaaagaagtaatagaacgggaagcaccagggatggccctggcaatgctgatgggatcacttaatgttacacctctgggcatgctctctaggcctgtatgtggaatcagagggaaaacgctcataattaacctgccaggtagcaagaaaggatctcaggaatgctttcaattcatactgccagctctacctcatgccattgaccttttacgtgatgccattgtaaaagtaaaggaggtgcatgatgaacttgaagatttgccttccccacctccccctctttcccctcctcctactaccagcccccataaacagacagaagacaaaggagttcaatgtgaggaagaggaagaagagaagaaagacagtggtgttgcttcaacagaagatagttcctcatcacatataactgcagcagccattgctgccaagaagcatccattctacaccagtcctgctgttgtcatggcacacggtgaacagcccatccctggtctcatcaattattcccatcattcaacagatgaacggattccagactccatcatttctcgtggtgttcaggtgctcccacgagacacagcctccctcagcactactccttcagaatcgcctcgtgctcaggctacatctcgcctctctacagcttcctgcccaacaccaaaagtccagtccaggtgcagcagcaaggagaacattctcagagccagtcacagtgctgtcgatatcaccaaggtggctagaagacatcgcatgtctccttttcctctgacatctatggacaaagcctttatcacagtcctggagatgactccggtgcttgggacagaaatcatcaattaccgagatggaatggggcgagtccttgctcaagatgtatatgcaaaagacaatttaccccccttcccagcatcagtaaaagatggctatgctgtccgagctgctgatggcccaggagatcgtttcatcattggggaatcccaagctggtgaacagccaactcagacagtaatgccaggacaagtcatgcgggttacaacaggtgctccaataccctgcggtgctgatgcagtagtacaagtggaagataccgaacttatcagggaatcagatgatggcactgaagaacttgaagtgcgaattctggtgcaagctcggccaggccaagatatcagacccatcggccatgacattaaaagaggggaatgtgttttggccaaaggaacccacatgggcccctcagagattggtcttctggcaactgtaggtgtcacagaggttgaagttaataagtttccagtggttgcagtcatgtcaacagggaatgagctgctaaatcctgaagatgacctcttaccagggaagattcgagacagcaatcgttcaactcttctagcaacaattcaggaacatggttaccccacgatcaacttgggtattgtaggagacaacccagatgacttactcaatgccttgaatgagggtatcagtcgtgctgatgtcatcatcacatcagggggtgtatccatgggggaaaaggactatctcaagcaggtgctggacattgatcttcatgctcagatccattttggcagggtttttatgaaaccaggcttgccaacaacatttgcaactttggatattgatggtgtaagaaaaataatctttgcactacctgggaatcctgtatcggctgtggtcacctgcaatctctttgttgtgcctgcactgaggaaaatgcagggcatcttggatcctcggccaaccatcatcaaagcaagggcacagtggcactcgcctgtaatccctgctcctcaggaggctcaggcaggaggattgcatgaggccaagtgtttgagaccagcctgggcaacatagcaacaccctgcctctaaaaaaattaacaaaaagaaaatgtaaaaaaaaaatgaaaataaaatgtcatcctttcatatcaaagcattcagaagagcatcattttagaacaaacatttcccttatttccttggtcacttatggttggaggtgaaaatcttctcattttcagtacacaataagaaacacttccaaagcatctggtaaag

SEQ ID NO: 415787 - DNA, 3225 bp, Homo sapiens
agcagcgctcatggcgaagaggcttaaggccacaaaaccgtgggacagcaggaggaagagaagccaggtatctccactccagctgccctgcctcagactcctcagtttcgcacgtgaggatcgtcttgcaggcactgactggagatggaatcctaaagcataggtgaagcggaaatcctccttcagggagagcccactgaggaagccagcggctagcacgaggcaggacaggatacctccctcttcgcccacggcggcctctctgtcatagtagccaccgttctgccactcatgcagctttctaagacacctctcggttccccagcgctttcagtggggcggccggccactcccgagggttgcaagaggaggcccggggtgctgagccagcctcgctgcccccgcgtagaaagccggcccgccggcgagagccagcctaaggcgcggacaaccaacgaggtgtcaggctcggcaggggattgcttctgtctggggcccggccgaggttgcgttcgtgcctcgcgcgcacacgctccgcgttcactcagccaatccggtgctactcgcgcgcccaggagcgatccgcggtcctactcaggctgggccggctccttcccgctcccaatactcagcacccgagctctcactcctcccctcactctccacgagttccacgcctaggggtgtagctccgcccttgtccccgagtccgcccccgcaacctccagagcgtgtgctatcctttcctctcagtcctgccatctagctgccttgggtctcgcgctccgcagagcgttccgacactctccggcctcgttctgccgcctccgcgcgctctccccgtgcggccaccgcgccccccaagcttgcctccttcttgccggacttggggccgcgcgccctgactccttcccctcccgcggacccgcgcactcccggcgcggcctctcccccacgcaggccaccgtgcactctgtggcctccccctccttccccgctctcctcgcgcttctctggctccctagctgtcgcgctctcctcggcgagcgcgctcccggcccgcgcgctccgggctccggtttctcccggctcctgtcagtgcggtgactgcgctgggaaacatggcgaccgagggaatgatccttactaaccacgaccatcaaatccgtgtcggagtccttacagtgagtgatagttgcttcaggaatcttgcagaagaccgcagtgggataaatctcaaagatctcgtacaagatccttctttgttgggtgggactatatcagcatacaagatagtaccagatgaaatagaagaaatcaaggaaaccctgatagattggtgtgatgaaaaggaacttaatttgatattaacaactggaggaacaggatttgcaccacgagatgtcactccagaggccacaaaagaagtaatagaacgggaagcaccagggatggccctggcaatgctgatgggatcacttaatgttacacctctgggcatgctctctaggcctgtatgtggaatcagagggaaaacgctcataattaacctgccaggtagcaagaaaggatctcaggaatgctttcaattcatactgccagctctacctcatgccattgaccttttacgtgatgccattgtaaaagtaaaggaggtgcatgatgaacttgaagatttgccttccccacctccccctctttcccctcctcctactaccagcccccataaacagacagaagacaaaggagttcaatgtgaggaagaggaagaagagaagaaagacagtggtgttgcttcaacagaagatagttcctcatcacatataactgcagcagccattgctgccaagaagcatccattctacaccagtcctgctgttgtcatggcacacggtgaacagcccatccctggtctcatcaattattcccatcattcaacagatgaacggattccagactccatcatttctcgtggtgttcaggtgctcccacgagacacagcctccctcagcactactccttcagaatcgcctcgtgctcaggctacatctcgcctctctacagcttcctgcccaacaccaaaagtccagtccaggtgcagcagcaaggagaacattctcagagccagtcacagtgctgtcgatatcaccaaggtggctagaagacatcgcatgtctccttttcctctgacatctatggacaaagcctttatcacagtcctggagatgactccggtgcttgggacagaaatcatcaattaccgagatggaatggggcgagtccttgctcaagatgtatatgcaaaagacaatttaccccccttcccagcatcagtaaaagatggctatgctgtccgagctgctgatggcccaggagatcgtttcatcattggggaatcccaagctggtgaacagccaactcagacagtaatgccaggacaagtcatgcgggttacaacaggtgctccaataccctgcggtgctgatgcagtagtacaagtggaagataccgaacttatcagggaatcagatgatggcactgaagaacttgaagtgcgaattctggtgcaagctcggccaggccaagatatcagacccatcggccatgacattaaaagaggggaatgtgttttggccaaaggaacccacatgggcccctcagagattggtcttctggcaactgtaggtgtcacagaggttgaagttaataagtttccagtggttgcagtcatgtcaacagggaatgagctgctaaatcctgaagatgacctcttaccagggaagattcgagacagcaatcgttcaactcttctagcaacaattcaggaacatggttaccccacgatcaacttgggtattgtaggagacaacccagatgacttactcaatgccttgaatgagggtatcagtcgtgctgatgtcatcatcacatcagggggtgtatccatgggggaaaagcttgccaacaacatttgcaactttggatattgatggtgtaagaaaaataatctttgcactacctgggaatcctgtatcggctgtggtcacctgcaatctctttgttgtgcctgcactgaggaaaatgcagggcatcttggatcctcggccaaccatcatcaaagcaagggtaatgctttctaatgaccagaaaccaaaatggaagcctggtaacagttagggatatgatttcctaactgtccaaaataaacatctagagttttctatt

SEQ ID NO: 415788 - DNA, 2562 bp, Homo sapiens
agcagcgctcatggcgaagaggcttaaggccacaaaaccgtgggacagcaggaggaagagaagccaggtatctccactccagctgccctgcctcagactcctcagtttcgcacgtgaggatcgtcttgcaggcactgactggagatggaatcctaaagcataggtgaagcggaaatcctccttcagggagagcccactgaggaagccagcggctagcacgaggcaggacaggatacctccctcttcgcccacggcggcctctctgtcatagtagccaccgttctgccactcatgcagctttctaagacacctctcggttccccagcgctttcagtggggcggccggccactcccgagggttgcaagaggaggcccggggtgctgagccagcctcgctgcccccgcgtagaaagccggcccgccggcgagagccagcctaaggcgcggacaaccaacgaggtgtcaggctcggcaggggattgcttctgtctggggcccggccgaggttgcgttcgtgcctcgcgcgcacacgctccgcgttcactcagccaatccggtgctactcgcgcgcccaggagcgatccgcggtcctactcaggctgggccggctccttcccgctcccaatactcagcacccgagctctcactcctcccctcactctccacgagttccacgcctaggggtgtagctccgcccttgtccccgagtccgcccccgcaacctccagagcgtgtgctatcctttcctctcagtcctgccatctagctgccttgggtctcgcgctccgcagagcgttccgacactctccggcctcgttctgccgcctccgcgcgctctccccgtgcggccaccgcgccccccaagcttgcctccttcttgccggacttggggccgcgcgccctgactccttcccctcccgcggacccgcgcactcccggcgcggcctctcccccacgcaggccaccgtgcactctgtggcctccccctccttccccgctctcctcgcgcttctctggctccctagctgtcgcgctctcctcggcgagcgcgctcccggcccgcgcgctccgggctccggtttctcccggctcctgtcagtgcggtgactgcgctgggaaacatggcgaccgagggaatgatccttactaaccacgaccatcaaatccgtgtcggagtccttacagtgagtgatagttgcttcaggaatcttgcagaagaccgcagtgggataaatctcaaagatctcgtacaagatccttctttgttgggtgggactatatcagcatacaagatagtaccagatgaaatagaagaaatcaaggaaaccctgatagattggtgtgatgaaaaggaacttaatttgatattaacaactggaggaacaggatttgcaccacgagatgtcactccagaggccacaaaagaagtaatagaacgggaagcaccagggatggccctggcaatgctgatgggatcacttaatgttacacctctgggcatgctctctaggcctgtatgtggaatcagagggaaaacgctcataattaacctgccaggtagcaagaaaggatctcaggaatgctttcaattcatactgccagctctacctcatgccattgaccttttacgtgatgccattgtaaaagtaaaggaggtgcatgatgaacttgaagatttgccttccccacctccccctctttcccctcctcctactaccagcccccataaacagacagaagacaaaggagttcaatgtgaggaagaggaagaagagaagaaagacagtggtgttgcttcaacagaagatagttcctcatcacatataactgcagcagccattgctgccaagaagcatccattctacaccagtcctgctgttgtcatggcacacggtgaacagcccatccctggtctcatcaattattcccatcattcaacagatgaacggattccagactccatcatttctcgtggtgttcaggtgctcccacgagacacagcctccctcagcactactccttcagaatcgcctcgtgctcaggctacatctcgcctctctacagcttcctgcccaacaccaaaagtccagtccaggtgcagcagcaaggagaacattctcagagccagtcacagtgctgtcgatatcaccaaggtggctagaagacatcgcatgtctccttttcctctgacatctatggacaaagcctttatcacagtcctggagatgactccggtgcttgggacagaaatcatcaattaccgagatggaatggggcgagtccttgctcaagatgtatatgcaaaagacaatttaccccccttcccagcatcagtaaaagatggctatgctgtccgagctgctgatggcccaggagatcgtttcatcattggggaatcccaagctggtgaacagccaactcagacagtaatgccaggacaagtcatgcgggttacaacaggtgctccaataccctgcggtgctgatgcagtagtacaagtggaagataccgaacttatcagggaatcagatgatgtacgtcatcaccaagtcttactgtgct

SEQ ID NO: 415789 - DNA, 768 bp, Homo sapiens
tgacagaatacggcagtaaaagtgacagtttcagcattattaaaatcatcaataagaggagcttagttatgggtaaaaaatctaacaatattttctctgtcaatagtcattcattatctacctcttttaaactaatacatggaaaatatatgcacaaaatggttgtttttcctccatggttgttggggtgaatactgggagttattggtagcattctgatggtaatggcagaaatctttcatacattttaaacactattgctggttttgagaatattttcttctcctaatttcaggttgggtgggactatatcagcatacaagatagtaccagatgaaatagaagaaatcaaggtatagtatggcatttttcacctctacaaacatttagcatcttggtgaggggtggggaagagttgctttttctttatgccattgatatttggctatgttagaatattatttaattctcagttatcatagtgaattaaaaatttatatgtatcagataatcaccatcagatttatctgccatttgcaatgaatttctgactacaatattaggagaatcgaaaaggaaccctttcctgtgtagttcattaaaaatctacataagaaaacactgtgtataagcattggtgtgcatagtggattatctttttatcttgttgcaatttcttttccctataagccttcaccacttttaaatatcagtctttttttaaattattattatactttaagttttagggtacatgtgcacaatgtg

SEQ ID NO: 415790 - DNA, 3141 bp, Homo sapiens
acgcacactagtcgcgcgcgcgcacgggcgcgcgggcgcgcgcgcgcacacacacacacacacacacacacacacacacacacacacgcccttggctacatcggacccagatgactgcctcctcacttcctccctcccgattccgccgcggcccccaaagactctcggggtggccccttgtccgcaccgcttggagggagtgtgctctgagttaagctggtctcttctggtcctggaaaaaaatgagtattgacaaggttgctggatctgcgtagaaaagaaagtgccacttaataaaaaatttagcccggcagtggtaccgtctgcagagcttgctgcccttggacgttagcaggaagccttcggggtgctgtaatcggcgggcagaggagagggaggccgcggaattaaaaggaacaaaagctagagcgccatgccaaacgtccccggcaagacccagttaggcaggagccgggagtgatgggaaaatgaactagaatacgatgagctgccccattacggcgggatggacggagtaggggttcccgcttccatgtacggagaccctcacgcgccgcggccgatccccccggttcaccacctgaaccacgggccgccgctccacgccacacagcactacggcgcgcacgccccgcaccccaatgtcatgccggccagtatgggatccgctgtcaacgacgccttgaagcgggacaaggacgcgatctatgggcacccgttgtttcctctgttagctctggtctttgagaagtgcgagctggcgacctgcactccccgggaacctggagtggctggcggagacgtctgctcctccgactccttcaacgaggacatcgcggtcttcgccaagcaggttcgcgccgaaaagccacttttttcctcaaatccagagctggacaatttgatgatacaagcaatacaagtactaaggtttcatcttttggagttagaaaaggtccacgaactgtgcgataacttctgccaccgatacattagctgtttgaaggggaaaatgcccatcgacctcgtcattgatgaaagagacggcagctccaagtcagatcatgaagaactttcaggctcctccacaaatctcgctgaccataacccttcttcttggcgagaccacgatgatgcaacctcaacccactcagcaggcaccccagggccctccagtgggggccatgcttcccagagcggagacaacagcagtgagcaaggggatggtttagacaacagtgtagcttcacctggtacaggtgacgatgatgatccggataaggacaaaaaacgccagaagaaaagaggcattttccccaaagtagcaacaaatatcatgagagcatggctcttccagcatctcacacatccgtacccttccgaagagcagaagaaacagttagcgcaagacacaggacttacaattctccaagtaaacaactggtttattaatgccagaagaagaatagtacagcccatgattgaccagtcaaatcgagcagtgagccaaggagcagcatatagtccagagggtcagcccatggggagctttgtgttggatggtcagcaacacatggggatccggcctgcaggacctatgagtggaatgggcatgaatatgggcatggatgggcaatggcactacatgtaaccttcatcatgtaaagcaatcgcaaagcaagggggaagtttgcagagcatgccaggggactacgtttctcagggtggtcctatgggaatgagtatggcacagccaagttacactcctccccagatgaccccacaccctactcaattaagacatggacccccaatgcattcatatttgccaagccatccccaccacccagccatgatgatgcacggaggaccccctacccaccctggaatgactatgtcagcacagagccccacaatgttaaattctgtagatcccaatgttggcggacaggttatggacattcatgcccaatagtataagggaactcaagggaaaaggaaacacacgcaaaaactattttaagactttctgaactttgaccagatgttgacacttaatatgaaattccagacagctgtgattattttttacttttgtcatttttcatcaagcaacagaggaccaatgcaacaagaacacaaatgtgaaatcatgggctgactgagacaattctgtccatgtaaagatcctctggaaaaagactccgagagttataactactgtagtataaatataggaactaagttaaacttgtacatttctgttgatcacgccgttatgttgcctcaaatagttttagaagagaaaaaaaaatatatccttgttttccacactatgtgtgttgttcccaaaagaatgactgttttggttcatcagtgaattcaccatccaggagagactgtggtatatattttaaacctgttgggccaatgagaaaagaaccacactggagatcatgatgaacttttggctgaacctcatcactcgaactccagcttcagaatgtgttttcatgcccggcctttgttcctccataaatgtgtcctttagtttcaaacagatctttatagttcgtgcttcataagccaattcttattattatttttgggggactcttcttcaaagagcttgccaatgaagatttaaagacagagcaggagcttcttccaggagttctgagccttggttgtggacaaaacaatcttaagttgggcagctttcctcaacacaaaaaaaagttattaatggtcattgaaccataactaggactttatcagaaactcaaagcttgggggataaaaaggagcaagagaatactgtaacaaacttcgtacagagttcggtctattaattgtttcatgttagatattctatgtgtttacctcaattgaaaaaaaaaagaatgtttttgctagtatcagatctgctgtggaattggtattgtatgtccatgaattcttcttttctcagcacgtgttcctcactagaagaaaatgctgttacctttaagctttgtcaaatttacattaaaatacttgtatgaggactgtgacgttatgttaaaaaaaaaaggtgttaagtcacaaaaagcggtaataaatatttcatttttgattttt

SEQ ID NO: 415791 - DNA, 2830 bp, Homo sapiens
aggaggaggaggaagatcaggaggaggaggaagaagaggaaaaaagagaaaaagaagaaatatcacagaaaaaaaaattcttcgttgtctagactgggctttttttcccccctaaaaaatagcatattggagaattgggagaagtctctttggtttggaaaaaaaaaaaaggaatcttcagcctagatcactttcttatccggactgggatattaaatatacgacacatccaggagtttattggagcgcagactgatggcgcaaaggtacgatgagctgccccattacggcgggatggacggagtaggggttcccgcttccatgtacggagaccctcacgcgccgcggccgatccccccggttcaccacctgaaccacgggccgccgctccacgccacacagcactacggcgcgcacgccccgcaccccaatgtcatgccggccagtatgggatccgctgtcaacgacgccttgaagcgggacaaggacgcgatctatgggcacccgttgtttcctctgttagctctggtctttgagaagtgcgagctggcgacctgcactccccgggaacctggagtggctggcggagacgtctgctcctccgactccttcaacgaggacatcgcggtcttcgccaagcaggttcgcgccgaaaagccacttttttcctcaaatccagagctggacaatttgatgatacaagcaatacaagtactaaggtttcatcttttggagttagaaaaggtccacgaactgtgcgataacttctgccaccgatacattagctgtttgaaggggaaaatgcccatcgacctcgtcattgatgaaagagacggcagctccaagtcagatcatgaagaactttcaggctcctccacaaatctcgctgaccataacccttcttcttggcgagaccacgatgatgcaacctcaacccactcagcaggcaccccagggccctccagtgggggccatgcttcccagagcggagacaacagcagtgagcaaggggatggtttagacaacagtgtagcttcacctggtacaggtgacgatgatgatccggataaggacaaaaaacgccagaagaaaagaggcattttccccaaagtagcaacaaatatcatgagagcatggctcttccagcatctcacattattaatgccagaagaagaatagtacagcccatgattgaccagtcaaatcgagcagtgagccaaggagcagcatatagtccagagggtcagcccatggggagctttgtgttggatggtcagcaacacatggggatccggcctgcaggacctatgagtggaatgggcatgaatatgggcatggatgggcaatggcactacatgtaaccttcatcatgtaaagcaatcgcaaagcaagggggaagtttgcagagcatgccaggggactacgtttctcagggtggtcctatgggaatgagtatggcacagccaagttacactcctccccagatgaccccacaccctactcaattaagacatggacccccaatgcattcatatttgccaagccatccccaccacccagccatgatgatgcacggaggaccccctacccaccctggaatgactatgtcagcacagagccccacaatgttaaattctgtagatcccaatgttggcggacaggttatggacattcatgcccaatagtataagggaactcaagggaaaaggaaacacacgcaaaaactattttaagactttctgaactttgaccagatgttgacacttaatatgaaattccagacagctgtgattattttttacttttgtcatttttcatcaagcaacagaggaccaatgcaacaagaacacaaatgtgaaatcatgggctgactgagacaattctgtccatgtaaagatcctctggaaaaagactccgagagttataactactgtagtataaatataggaactaagttaaacttgtacatttctgttgatcacgccgttatgttgcctcaaatagttttagaagagaaaaaaaaatatatccttgttttccacactatgtgtgttgttcccaaaagaatgactgttttggttcatcagtgaattcaccatccaggagagactgtggtatatattttaaacctgttgggccaatgagaaaagaaccacactggagatcatgatgaacttttggctgaacctcatcactcgaactccagcttcagaatgtgttttcatgcccggcctttgttcctccataaatgtgtcctttagtttcaaacagatctttatagttcgtgcttcataagccaattcttattattatttttgggggactcttcttcaaagagcttgccaatgaagatttaaagacagagcaggagcttcttccaggagttctgagccttggttgtggacaaaacaatcttaagttgggcagctttcctcaacacaaaaaaaagttattaatggtcattgaaccataactaggactttatcagaaactcaaagcttgggggataaaaaggagcaagagaatactgtaacaaacttcgtacagagttcggtctattaattgtttcatgttagatattctatgtgtttacctcaattgaaaaaaaaaagaatgtttttgctagtatcagatctgctgtggaattggtattgtatgtccatgaattcttcttttctcagcacgtgttcctcactagaagaaaatgctgttacctttaagctttgtcaaatttacattaaaatacttgtatgaggactgtgacgttatgttaaaaaaaaaaggtgttaagtcacaaaaagcggtaataaatatttcatttttgattttt

SEQ ID NO: 415792 - DNA, 2909 bp, Homo sapiens
aggaggaggaggaagatcaggaggaggaggaagaagaggaaaaaagagaaaaagaagaaatatcacagaaaaaaaaattcttcgttgtctagactgggctttttttcccccctaaaaaatagcatattggagaattgggagaagtctctttggtttggaaaaaaaaaaaaggaatcttcagcctagatcactttcttatccggactgggatattaaatatacgacacatccaggagtttattggagcgcagactgatggcgcaaaggtacgatgagctgccccattacggcgggatggacggagtaggggttcccgcttccatgtacggagaccctcacgcgccgcggccgatccccccggttcaccacctgaaccacgggccgccgctccacgccacacagcactacggcgcgcacgccccgcaccccaatgtcatgccggccagtatgggatccgctgtcaacgacgccttgaagcgggacaaggacgcgatctatgggcacccgttgtttcctctgttagctctggtctttgagaagtgcgagctggcgacctgcactccccgggaacctggagtggctggcggagacgtctgctcctccgactccttcaacgaggacatcgcggtcttcgccaagcaggttcgcgccgaaaagccacttttttcctcaaatccagagctggacaatttgatgatacaagcaatacaagtactaaggtttcatcttttggagttagaaaaggtccacgaactgtgcgataacttctgccaccgatacattagctgtttgaaggggaaaatgcccatcgacctcgtcattgatgaaagagacggcagctccaagtcagatcatgaagaactttcaggctcctccacaaatctcgctgaccataacccttcttcttggcgagaccacgatgatgcaacctcaacccactcagcaggcaccccagggccctccagtgggggccatgcttcccagagcggagacaacagcagtgagcaaggggatggtttagacaacagtgtagcttcacctggtacaggtgacgatgatgatccggataaggacaaaaaacgccagaagaaaagaggcattttccccaaagtagcaacaaatatcatgagagcatggctcttccagcatctcacacatccgtacccttccgaagagcagaagaaacagttagcgcaagacacaggacttacaattctccaagtaaacaactggtttattaatgccagaagaagaatagtacagcccatgattgaccagtcaaatcgagcagtgagccaaggagcagcatatagtccagagggtcagcccatggggagctttgtgttggatggtcagcaacacatggggatccggcctgcaggacctatgagtggaatgggcatgaatatgggcatggatgggcaatggcactacatgtaaccttcatcatgtaaagcaatcgcaaagcaagggggaagtttgcagagcatgccaggggactacgtttctcagggtggtcctatgggaatgagtatggcacagccaagttacactcctccccagatgaccccacaccctactcaattaagacatggacccccaatgcattcatatttgccaagccatccccaccacccagccatgatgatgcacggaggaccccctacccaccctggaatgactatgtcagcacagagccccacaatgttaaattctgtagatcccaatgttggcggacaggttatggacattcatgcccaatagtataagggaactcaagggaaaaggaaacacacgcaaaaactattttaagactttctgaactttgaccagatgttgacacttaatatgaaattccagacagctgtgattattttttacttttgtcatttttcatcaagcaacagaggaccaatgcaacaagaacacaaatgtgaaatcatgggctgactgagacaattctgtccatgtaaagatcctctggaaaaagactccgagagttataactactgtagtataaatataggaactaagttaaacttgtacatttctgttgatcacgccgttatgttgcctcaaatagttttagaagagaaaaaaaaatatatccttgttttccacactatgtgtgttgttcccaaaagaatgactgttttggttcatcagtgaattcaccatccaggagagactgtggtatatattttaaacctgttgggccaatgagaaaagaaccacactggagatcatgatgaacttttggctgaacctcatcactcgaactccagcttcagaatgtgttttcatgcccggcctttgttcctccataaatgtgtcctttagtttcaaacagatctttatagttcgtgcttcataagccaattcttattattatttttgggggactcttcttcaaagagcttgccaatgaagatttaaagacagagcaggagcttcttccaggagttctgagccttggttgtggacaaaacaatcttaagttgggcagctttcctcaacacaaaaaaaagttattaatggtcattgaaccataactaggactttatcagaaactcaaagcttgggggataaaaaggagcaagagaatactgtaacaaacttcgtacagagttcggtctattaattgtttcatgttagatattctatgtgtttacctcaattgaaaaaaaaaagaatgtttttgctagtatcagatctgctgtggaattggtattgtatgtccatgaattcttcttttctcagcacgtgttcctcactagaagaaaatgctgttacctttaagctttgtcaaatttacattaaaatacttgtatgaggactgtgacgttatgttaaaaaaaaaaggtgttaagtcacaaaaagcggtaataaatatttcatttttgattttt

SEQ ID NO: 415793 - DNA, 2930 bp, Homo sapiens
aggaggaggaggaagatcaggaggaggaggaagaagaggaaaaaagagaaaaagaagaaatatcacagaaaaaaaaattcttcgttgtctagactgggctttttttcccccctaaaaaatagcatattggagaattgggagaagtctctttggtttggaaaaaaaaaaaaggaatcttcagcctagatcactttcttatccggactgggatattaaatatacgacacatccaggagtttattggagcgcagactgatggcgcaaaggtacgatgagctgccccattacggcgggatggacggagtaggggttcccgcttccatgtacggagaccctcacgcgccgcggccgatccccccggttcaccacctgaaccacgggccgccgctccacgccacacagcactacggcgcgcacgccccgcaccccaatgtcatgccggccagtatgggatccgctgtcaacgacgccttgaagcgggacaaggacgcgatctatgggcacccgttgtttcctctgttagctctggtctttgagaagtgcgagctggcgacctgcactccccgggaacctggagtggctggcggagacgtctgctcctccgactccttcaacgaggacatcgcggtcttcgccaagcaggttcgcgccgaaaagccacttttttcctcaaatccagagctggacaatttgatgatacaagcaatacaagtactaaggtttcatcttttggagttagaaaaggtccacgaactgtgcgataacttctgccaccgatacattagctgtttgaaggggaaaatgcccatcgacctcgtcattgatgaaagagacggcagctccaagtcagatcatgaagaactttcaggctcctccacaaatctcgctgaccataacccttcttcttggcgagaccacgatgatgcaacctcaacccactcagcaggcaccccagggccctccagtgggggccatgcttcccagagcggagacaacagcagtgagcaaggggatggtttagacaacagtgtagcttcacctggtacaggtgacgatgatgatccggataaggacaaaaaacgccagaagaaaagaggcattttccccaaagtagcaacaaatatcatgagagcatggctcttccagcatctcacacatccgtacccttccgaagagcagaagaaacagttagcgcaagacacaggacttacaattctccaagtaaacaactggtttattaatgccagaagaagaatagtacagcccatgattgaccagtcaaatcgagcaggttttcttcttgatccttcagtgagccaaggagcagcatatagtccagagggtcagcccatggggagctttgtgttggatggtcagcaacacatggggatccggcctgcaggacctatgagtggaatgggcatgaatatgggcatggatgggcaatggcactacatgtaaccttcatcatgtaaagcaatcgcaaagcaagggggaagtttgcagagcatgccaggggactacgtttctcagggtggtcctatgggaatgagtatggcacagccaagttacactcctccccagatgaccccacaccctactcaattaagacatggacccccaatgcattcatatttgccaagccatccccaccacccagccatgatgatgcacggaggaccccctacccaccctggaatgactatgtcagcacagagccccacaatgttaaattctgtagatcccaatgttggcggacaggttatggacattcatgcccaatagtataagggaactcaagggaaaaggaaacacacgcaaaaactattttaagactttctgaactttgaccagatgttgacacttaatatgaaattccagacagctgtgattattttttacttttgtcatttttcatcaagcaacagaggaccaatgcaacaagaacacaaatgtgaaatcatgggctgactgagacaattctgtccatgtaaagatcctctggaaaaagactccgagagttataactactgtagtataaatataggaactaagttaaacttgtacatttctgttgatcacgccgttatgttgcctcaaatagttttagaagagaaaaaaaaatatatccttgttttccacactatgtgtgttgttcccaaaagaatgactgttttggttcatcagtgaattcaccatccaggagagactgtggtatatattttaaacctgttgggccaatgagaaaagaaccacactggagatcatgatgaacttttggctgaacctcatcactcgaactccagcttcagaatgtgttttcatgcccggcctttgttcctccataaatgtgtcctttagtttcaaacagatctttatagttcgtgcttcataagccaattcttattattatttttgggggactcttcttcaaagagcttgccaatgaagatttaaagacagagcaggagcttcttccaggagttctgagccttggttgtggacaaaacaatcttaagttgggcagctttcctcaacacaaaaaaaagttattaatggtcattgaaccataactaggactttatcagaaactcaaagcttgggggataaaaaggagcaagagaatactgtaacaaacttcgtacagagttcggtctattaattgtttcatgttagatattctatgtgtttacctcaattgaaaaaaaaaagaatgtttttgctagtatcagatctgctgtggaattggtattgtatgtccatgaattcttcttttctcagcacgtgttcctcactagaagaaaatgctgttacctttaagctttgtcaaatttacattaaaatacttgtatgaggactgtgacgttatgttaaaaaaaaaaggtgttaagtcacaaaaagcggtaataaatatttcatttttgattttt

SEQ ID NO: 415794 - DNA, 2834 bp, Homo sapiens
aggaggaggaggaagatcaggaggaggaggaagaagaggaaaaaagagaaaaagaagaaatatcacagaaaaaaaaattcttcgttgtctagactgggctttttttcccccctaaaaaatagcatattggagaattgggagaagtctctttggtttggaaaaaaaaaaaaggaatcttcagcctagatcactttcttatccggactgggatattaaatatacgacacatccaggagtttattggagcgcagactgatggcgcaaaggtacgatgagctgccccattacggcgggatggacggagtaggggttcccgcttccatgtacggagaccctcacgcgccgcggccgatccccccggttcaccacctgaaccacgggccgccgctccacgccacacagcactacggcgcgcacgccccgcaccccaatgtcatgccggccagtatgggatccgctgtcaacgacgccttgaagcgggacaaggacgcgatctatgggcacccgttgtttcctctgttagctctggtctttgagaagtgcgagctggcgacctgcactccccgggaacctggagtggctggcggagacgtctgctcctccgactccttcaacgaggacatcgcggtcttcgccaagcaggttcgcgccgaaaagccacttttttcctcaaatccagagctggacaatttgatgatacaagcaatacaagtactaaggtttcatcttttggagttagaaaaggtccacgaactgtgcgataacttctgccaccgatacattagctgtttgaaggggaaaatgcccatcgacctcgtcattgatgaaagagacggcagctccaagtcagatcatgaagaactttcaggctcctccacaaatctcgctgaccataacccttcttcttggcgagaccacgatgatgcaacctcaacccactcagcaggcaccccagggccctccagtgggggccatgcttcccagagcggagacaacagcagtgagcaaggggatggtttagacaacagtgtagcttcacctggtacaggtgacgatgatgatccggataaggacaaaaaacgccagaagaaaagaggcattttccccaaagtagcaacaaatatcatgagagcatggctcttccagcatctcacacatccgtacccttccgaagagcagaagaaacagttagcgcaagacacaggacttacaattctccaagtaaacaactggtttattaatgccagaagaagaatagtacagcccatgattgaccagtcaaatcgagcaggttttcttcttgatccttcagtgagccaaggagcagcatatagtccagagggtcagcccatggggagctttgtgttggatggtcagcaacacatggggatccggcctgcaggtttgcagagcatgccaggggactacgtttctcagggtggtcctatgggaatgagtatggcacagccaagttacactcctccccagatgaccccacaccctactcaattaagacatggacccccaatgcattcatatttgccaagccatccccaccacccagccatgatgatgcacggaggaccccctacccaccctggaatgactatgtcagcacagagccccacaatgttaaattctgtagatcccaatgttggcggacaggttatggacattcatgcccaatagtataagggaactcaagggaaaaggaaacacacgcaaaaactattttaagactttctgaactttgaccagatgttgacacttaatatgaaattccagacagctgtgattattttttacttttgtcatttttcatcaagcaacagaggaccaatgcaacaagaacacaaatgtgaaatcatgggctgactgagacaattctgtccatgtaaagatcctctggaaaaagactccgagagttataactactgtagtataaatataggaactaagttaaacttgtacatttctgttgatcacgccgttatgttgcctcaaatagttttagaagagaaaaaaaaatatatccttgttttccacactatgtgtgttgttcccaaaagaatgactgttttggttcatcagtgaattcaccatccaggagagactgtggtatatattttaaacctgttgggccaatgagaaaagaaccacactggagatcatgatgaacttttggctgaacctcatcactcgaactccagcttcagaatgtgttttcatgcccggcctttgttcctccataaatgtgtcctttagtttcaaacagatctttatagttcgtgcttcataagccaattcttattattatttttgggggactcttcttcaaagagcttgccaatgaagatttaaagacagagcaggagcttcttccaggagttctgagccttggttgtggacaaaacaatcttaagttgggcagctttcctcaacacaaaaaaaagttattaatggtcattgaaccataactaggactttatcagaaactcaaagcttgggggataaaaaggagcaagagaatactgtaacaaacttcgtacagagttcggtctattaattgtttcatgttagatattctatgtgtttacctcaattgaaaaaaaaaagaatgtttttgctagtatcagatctgctgtggaattggtattgtatgtccatgaattcttcttttctcagcacgtgttcctcactagaagaaaatgctgttacctttaagctttgtcaaatttacattaaaatacttgtatgaggactgtgacgttatgttaaaaaaaaaaggtgttaagtcacaaaaagcggtaataaatatttcatttttgattttt

SEQ ID NO: 415795 - DNA, 2813 bp, Homo sapiens
aggaggaggaggaagatcaggaggaggaggaagaagaggaaaaaagagaaaaagaagaaatatcacagaaaaaaaaattcttcgttgtctagactgggctttttttcccccctaaaaaatagcatattggagaattgggagaagtctctttggtttggaaaaaaaaaaaaggaatcttcagcctagatcactttcttatccggactgggatattaaatatacgacacatccaggagtttattggagcgcagactgatggcgcaaaggtacgatgagctgccccattacggcgggatggacggagtaggggttcccgcttccatgtacggagaccctcacgcgccgcggccgatccccccggttcaccacctgaaccacgggccgccgctccacgccacacagcactacggcgcgcacgccccgcaccccaatgtcatgccggccagtatgggatccgctgtcaacgacgccttgaagcgggacaaggacgcgatctatgggcacccgttgtttcctctgttagctctggtctttgagaagtgcgagctggcgacctgcactccccgggaacctggagtggctggcggagacgtctgctcctccgactccttcaacgaggacatcgcggtcttcgccaagcaggttcgcgccgaaaagccacttttttcctcaaatccagagctggacaatttgatgatacaagcaatacaagtactaaggtttcatcttttggagttagaaaaggtccacgaactgtgcgataacttctgccaccgatacattagctgtttgaaggggaaaatgcccatcgacctcgtcattgatgaaagagacggcagctccaagtcagatcatgaagaactttcaggctcctccacaaatctcgctgaccataacccttcttcttggcgagaccacgatgatgcaacctcaacccactcagcaggcaccccagggccctccagtgggggccatgcttcccagagcggagacaacagcagtgagcaaggggatggtttagacaacagtgtagcttcacctggtacaggtgacgatgatgatccggataaggacaaaaaacgccagaagaaaagaggcattttccccaaagtagcaacaaatatcatgagagcatggctcttccagcatctcacacatccgtacccttccgaagagcagaagaaacagttagcgcaagacacaggacttacaattctccaagtaaacaactggtttattaatgccagaagaagaatagtacagcccatgattgaccagtcaaatcgagcagtgagccaaggagcagcatatagtccagagggtcagcccatggggagctttgtgttggatggtcagcaacacatggggatccggcctgcaggtttgcagagcatgccaggggactacgtttctcagggtggtcctatgggaatgagtatggcacagccaagttacactcctccccagatgaccccacaccctactcaattaagacatggacccccaatgcattcatatttgccaagccatccccaccacccagccatgatgatgcacggaggaccccctacccaccctggaatgactatgtcagcacagagccccacaatgttaaattctgtagatcccaatgttggcggacaggttatggacattcatgcccaatagtataagggaactcaagggaaaaggaaacacacgcaaaaactattttaagactttctgaactttgaccagatgttgacacttaatatgaaattccagacagctgtgattattttttacttttgtcatttttcatcaagcaacagaggaccaatgcaacaagaacacaaatgtgaaatcatgggctgactgagacaattctgtccatgtaaagatcctctggaaaaagactccgagagttataactactgtagtataaatataggaactaagttaaacttgtacatttctgttgatcacgccgttatgttgcctcaaatagttttagaagagaaaaaaaaatatatccttgttttccacactatgtgtgttgttcccaaaagaatgactgttttggttcatcagtgaattcaccatccaggagagactgtggtatatattttaaacctgttgggccaatgagaaaagaaccacactggagatcatgatgaacttttggctgaacctcatcactcgaactccagcttcagaatgtgttttcatgcccggcctttgttcctccataaatgtgtcctttagtttcaaacagatctttatagttcgtgcttcataagccaattcttattattatttttgggggactcttcttcaaagagcttgccaatgaagatttaaagacagagcaggagcttcttccaggagttctgagccttggttgtggacaaaacaatcttaagttgggcagctttcctcaacacaaaaaaaagttattaatggtcattgaaccataactaggactttatcagaaactcaaagcttgggggataaaaaggagcaagagaatactgtaacaaacttcgtacagagttcggtctattaattgtttcatgttagatattctatgtgtttacctcaattgaaaaaaaaaagaatgtttttgctagtatcagatctgctgtggaattggtattgtatgtccatgaattcttcttttctcagcacgtgttcctcactagaagaaaatgctgttacctttaagctttgtcaaatttacattaaaatacttgtatgaggactgtgacgttatgttaaaaaaaaaaggtgttaagtcacaaaaagcggtaataaatatttcatttttgattttt

SEQ ID NO: 415796 - DNA, 2179 bp, Homo sapiens
gaccttcgttctaggtccacgaactgtgcgataacttctgccaccgatacattagctgtttgaaggggaaaatgcccatcgacctcgtcattgatgaaagagacggcagctccaagtcagatcatgaagaactttcaggctcctccacaaatctcgctgaccataacccttcttcttggcgagaccacgatgatgcaacctcaacccactcagcaggcaccccagggccctccagtgggggccatgcttcccagagcggagacaacagcagtgagcaaggggatggtttagacaacagtgtagcttcacctggtacaggtgacgatgatgatccggataaggacaaaaaacgccagaagaaaagaggcattttccccaaagtagcaacaaatatcatgagagcatggctcttccagcatctcacacatccgtacccttccgaagagcagaagaaacagttagcgcaagacacaggacttacaattctccaagtaaacaactggtttattaatgccagaagaagaatagtacagcccatgattgaccagtcaaatcgagcagtgagccaaggagcagcatatagtccagagggtcagcccatggggagctttgtgttggatggtcagcaacacatggggatccggcctgcaggacctatgagtggaatgggcatgaatatgggcatggatgggcaatggcactacatgtaaccttcatcatgtaaagcaatcgcaaagcaagggggaagtttgcagagcatgccaggggactacgtttctcagggtggtcctatgggaatgagtatggcacagccaagttacactcctccccagatgaccccacaccctactcaattaagacatggacccccaatgcattcatatttgccaagccatccccaccacccagccatgatgatgcacggaggaccccctacccaccctggaatgactatgtcagcacagagccccacaatgttaaattctgtagatcccaatgttggcggacaggttatggacattcatgcccaatagtataagggaactcaagggaaaaggaaacacacgcaaaaactattttaagactttctgaactttgaccagatgttgacacttaatatgaaattccagacagctgtgattattttttacttttgtcatttttcatcaagcaacagaggaccaatgcaacaagaacacaaatgtgaaatcatgggctgactgagacaattctgtccatgtaaagatcctctggaaaaagactccgagagttataactactgtagtataaatataggaactaagttaaacttgtacatttctgttgatcacgccgttatgttgcctcaaatagttttagaagagaaaaaaaaatatatccttgttttccacactatgtgtgttgttcccaaaagaatgactgttttggttcatcagtgaattcaccatccaggagagactgtggtatatattttaaacctgttgggccaatgagaaaagaaccacactggagatcatgatgaacttttggctgaacctcatcactcgaactccagcttcagaatgtgttttcatgcccggcctttgttcctccataaatgtgtcctttagtttcaaacagatctttatagttcgtgcttcataagccaattcttattattatttttgggggactcttcttcaaagagcttgccaatgaagatttaaagacagagcaggagcttcttccaggagttctgagccttggttgtggacaaaacaatcttaagttgggcagctttcctcaacacaaaaaaaagttattaatggtcattgaaccataactaggactttatcagaaactcaaagcttgggggataaaaaggagcaagagaatactgtaacaaacttcgtacagagttcggtctattaattgtttcatgttagatattctatgtgtttacctcaattgaaaaaaaaaagaatgtttttgctagtatcagatctgctgtggaattggtattgtatgtccatgaattcttcttttctcagcacgtgttcctcactagaagaaaatgctgttacctttaagctttgtcaaatttacattaaaatacttgtatgaggactgtgacgttatgttaaaaaaaaaaggtgttaagtcacaaaaagcggtaataaatatttcatttttgattttt

SEQ ID NO: 415797 - DNA, 2188 bp, Homo sapiens
ccacattggattccataattgacaaagagctactgcactgtgtcaagtgcacagttataattgaattaatgatatgggcaagtgtgagacacacaaaattaacatttgaagaggcctggtttaattttgtcttttacatatttgtgtctccaattatactttaatgaaagagaatatactcgcttaatggatttctttcaacaagcttagctgagctcatcattagctgcacttgttgttggcaccttgcgatgttttctctaatgtatttttatttctttctactaggggatggtttagacaacagtgtagcttcacctggtacaggtgacgatgatgatccggataaggacaaaaaacgccagaagaaaagaggcattttccccaaagtagcaacaaatatcatgagagcatggctcttccagcatctcacacatccgtacccttccgaagagcagaagaaacagttagcgcaagacacaggacttacaattctccaagtaaacaactggtttattaatgccagaagaagaatagtacagcccatgattgaccagtcaaatcgagcagtgagccaaggagcagcatatagtccagagggtcagcccatggggagctttgtgttggatggtcagcaacacatggggatccggcctgcaggacctatgagtggaatgggcatgaatatgggcatggatgggcaatggcactacatgtaaccttcatcatgtaaagcaatcgcaaagcaagggggaagtttgcagagcatgccaggggactacgtttctcagggtggtcctatgggaatgagtatggcacagccaagttacactcctccccagatgaccccacaccctactcaattaagacatggacccccaatgcattcatatttgccaagccatccccaccacccagccatgatgatgcacggaggaccccctacccaccctggaatgactatgtcagcacagagccccacaatgttaaattctgtagatcccaatgttggcggacaggttatggacattcatgcccaatagtataagggaactcaagggaaaaggaaacacacgcaaaaactattttaagactttctgaactttgaccagatgttgacacttaatatgaaattccagacagctgtgattattttttacttttgtcatttttcatcaagcaacagaggaccaatgcaacaagaacacaaatgtgaaatcatgggctgactgagacaattctgtccatgtaaagatcctctggaaaaagactccgagagttataactactgtagtataaatataggaactaagttaaacttgtacatttctgttgatcacgccgttatgttgcctcaaatagttttagaagagaaaaaaaaatatatccttgttttccacactatgtgtgttgttcccaaaagaatgactgttttggttcatcagtgaattcaccatccaggagagactgtggtatatattttaaacctgttgggccaatgagaaaagaaccacactggagatcatgatgaacttttggctgaacctcatcactcgaactccagcttcagaatgtgttttcatgcccggcctttgttcctccataaatgtgtcctttagtttcaaacagatctttatagttcgtgcttcataagccaattcttattattatttttgggggactcttcttcaaagagcttgccaatgaagatttaaagacagagcaggagcttcttccaggagttctgagccttggttgtggacaaaacaatcttaagttgggcagctttcctcaacacaaaaaaaagttattaatggtcattgaaccataactaggactttatcagaaactcaaagcttgggggataaaaaggagcaagagaatactgtaacaaacttcgtacagagttcggtctattaattgtttcatgttagatattctatgtgtttacctcaattgaaaaaaaaaagaatgtttttgctagtatcagatctgctgtggaattggtattgtatgtccatgaattcttcttttctcagcacgtgttcctcactagaagaaaatgctgttacctttaagctttgtcaaatttacattaaaatacttgtatgaggactgtgacgttatgttaaaaaaaaaaggtgttaagtcacaaaaagcggtaataaatatttcatttttgattttt

SEQ ID NO: 415798 - DNA, 1793 bp, Homo sapiens
acgcacactagtcgcgcgcgcgcacgggcgcgcgggcgcgcgcgcgcacacacacacacacacacacacacacacacacacacacacgcccttggctacatcggacccagatgactgcctcctcacttcctccctcccgattccgccgcggcccccaaagactctcggggtggccccttgtccgcaccgcttggagggagtgtgctctgagttaagctggtctcttctggtcctggaaaaaaatgagtattgacaaggttgctggatctgcgtagaaaagaaagtgccacttaataaaaaatttagcccggcagtggtaccgtctgcagagcttgctgcccttggacgttagcaggaagccttcggggtgctgtaatcggcgggcagaggagagggaggccgcggaattaaaaggaacaaaagctagagcgccatgccaaacgtccccggcaagacccagttaggcaggagccgggagtgatgggaaaatgaactagaatacgatgagctgccccattacggcgggatggacggagtaggggttcccgcttccatgtacggagaccctcacgcgccgcggccgatccccccggttcaccacctgaaccacgggccgccgctccacgccacacagcactacggcgcgcacgccccgcaccccaatgtcatgccggccagtatgggatccgctgtcaacgacgccttgaagcgggacaaggacgcgatctatgggcacccgttgtttcctctgttagctctggtctttgagaagtgcgagctggcgacctgcactccccgggaacctggagtggctggcggagacgtctgctcctccgactccttcaacgaggacatcgcggtcttcgccaagcaggttcgcgccgaaaagccacttttttcctcaaatccagagctggacaatttgatgatacaagcaatacaagtactaaggtttcatcttttggagttagaaaaggtccacgaactgtgcgataacttctgccaccgatacattagctgtttgaaggggaaaatgcccatcgacctcgtcattgatgaaagagacggcagctccaagtcagatcatgaagaactttcaggctcctccacaaatctcgctgaccataacccttcttcttggcgagaccacgatgatgcaacctcaacccactcagcaggcaccccagggccctccagtgggggccatgcttcccagagcggagacaacagcagtgagcaaggggatggtttagacaacagtgtagcttcacctggtacaggtgacgatgatgatccggataaggacaaaaaacgccagaagaaaagaggcattttccccaaagtagcaacaaatatcatgagagcatggctcttccagcatctcacagtaagtcaagatgaaagagaaaaaaaaaatagtttttgttgttttgctagcaagttatacggtctcatactgatttttttttaaactaaggtgcctattttcttattcttgaaatctgatgactaacagactagttaaagttttttttttcatcaactattaccatccaaagagcaccctctagaaagtagcaggtttttgttttaagaagctgggaatggactttatttaaaatgatctaagaccctaaacagcatatataagtaaatttgttatttatgctaaaagtatgagagcaacttcggatactgcaacagcaaccaagggaaatggctgtaaggagctcacaaatccataaacgttgctgattacactgttaacgaaagctgtctcctctaggaggcca

SEQ ID NO: 415799 - DNA, 1475 bp, Homo sapiens
acgcacactagtcgcgcgcgcgcacgggcgcgcgggcgcgcgcgcgcacacacacacacacacacacacacacacacacacacacacgcccttggctacatcggacccagatgactgcctcctcacttcctccctcccgattccgccgcggcccccaaagactctcggggtggccccttgtccgcaccgcttggagggagtgtgctctgagttaagctggtctcttctggtcctggaaaaaaatgagtattgacaaggttgctggatctgcgtagaaaagaaagtgccacttaataaaaaatttagcccggcagtggtaccgtctgcagagcttgctgcccttggacgttagcaggaagccttcggggtgctgtaatcggcgggcagaggagagggaggccgcggaattaaaaggaacaaaagctagagcgccatgccaaacgtccccggcaagacccagttaggcaggagccgggagtgatgggaaaatgaactagaatacgatgagctgccccattacggcgggatggacggagtaggggttcccgcttccatgtacggagaccctcacgcgccgcggccgatccccccggttcaccacctgaaccacgggccgccgctccacgccacacagcactacggcgcgcacgccccgcaccccaatgtcatgccggccagtatgggatccgctgtcaacgacgccttgaagcgggacaaggacgcgatctatgggcacccgttgtttcctctgttagctctggtctttgagaagtgcgagctggcgacctgcactccccgggaacctggagtggctggcggagacgtctgctcctccgactccttcaacgaggacatcgcggtcttcgccaagcaggttcgcgccgaaaagccacttttttcctcaaatccagagctggacaatttgatgatacaagcaatacaagtactaaggtttcatcttttggagttagaaaaggtccacgaactgtgcgataacttctgccaccgatacattagctgtttgaaggggaaaatgcccatcgacctcgtcattgatgaaagagacggcagctccaagtcagatcatgaagaactttcaggctcctccacaaatctcgctgaccataacccttcttcttggcgagaccacgatgatgcaacctcaacccactcagcaggcaccccagggccctccagtgggggccatgcttcccagagcggagacaacagcagtgagcaagaatttttcagatttatccccattttccagatgaagtggcttggccttggagagggtcagttacttgactgtcacgatagaaagaggaagcagaagaatgaagacaaagccatttaaaattttcttgttctttaccttttgcataaaaggtattcagttcacaaatgatgtaaaatttaattaaggcaagtgactgtcctgagaaagtcattaaaaccctcatgtcatttctcta

SEQ ID NO: 415800 - DNA, 526 bp, Homo sapiens
ctttcttaatgtaggtttctaatgcatttttacataaatttttgtttgattcccccagaatttttcagatttatccccattttccagatgaagtggcttggccttggagagggtcagttacttgactgtcacgatagaaagaggaagcagaagaatgaagacaaagccatttaaaattttcttgttctttaccttttgcataaaaggtattcagttcacaaatgatgtaaaatttaattaaggcaagtgactgtcctgagaaagtcattaaaaccctcatgtcatttctctaatcaaaaggctgccacgcttctattatttctttattacaaccctttatttttatttcttcaagttaaactggagcctgagccatcataagcctcttgctagtgattttttaaatcagtgatttacactttgaaaaaccaattttttttatttttccaatttatattggttagatccatagggtcactttgattagaaaagagagccattagaaattaaattggcaattctaaag

SEQ ID NO: 415801 - DNA, 2635 bp, Homo sapiens
taatgaaaactttacatgaatgcttatttaggttgttcaaagtaaaaagggctacaggtcacagatcgtcagtgcctgagaaagaacattgacttactctatatcaattgaggggaaagtgcagtaccgtcatcttcaagccttgtaagcataaaagagaataggctgcccatataagtcaaaggaaaatgagcccaggccttgctatgaagcagtgtgtgaatggacaatgttgaatgaatgtctggctcagtgatggagagccaggttcatctttgaaatctagggctcttcactcatgaagcagactcctattagaatgttactaggggcagaagcagtgggattggtaaaagagtgcaatgataacaccatgagagccttcacatacagaaccagacagaacttcaaaggttttgatgataacaatgatgatttcctgacaatggcagaatgtcaattcattatcaaacatgaacttgaaaatcttagagctaaagatgaaaaaatgatccctggttaccctcaggcaaagttgtatccaggaaaatcattgttgagaagattgctcacgtctggcatcgtgattcaggtgtttccactgcatgacagtgaagccctgaagaagcttgaggacacctggtacactcggtttgctttgaagtatcagcccatagacagtattcgtggctactttggggaaacaattgctctgtactttggatttttggagtatttcacttttgcattaatccccatggctgtcattgggttaccttactacttgtttgtgtgggaagactatgacaagtacgtgatctttgcctcgttcaacctcatctggtccacggtgattctggaactgtggaagcgtggctgtgccaacatgacctacaggtgggggacactgctcatgaagagaaagtttgaggagccccggccaggatttcatggtgtcttgggtatcaattccatcactgggaaggaggagcctctgtaccccagctacaagagacagttgcgcatttacctggtctccctgccattcgtgtgcctctgcctctatttctcactgtatgtcatgatgatttacttcgacatggaggtttgggccttgggtctacatgagaacagcgggtctgagtggaccagtgtcctgttgtatgtgcccagcatcatctatgccattgtgattgagatcatgaatcgtctctatcgatatgctgccgagtttttaacttcatgggagaatcacagattggaatctgcctatcagaaccatctaattctgaaagttttagtgttcaacttcctcaattgctttgcctcactcttctatattgcctttgtcttgaaagatatgaagcttttgcgccagagcttggccactctcctaattacctcccagatcctcaaccaaattatggaatcttttcttccttattggctccaaaggaagcatggtgtgcgggtgaagaggaaggtgcaggctttaaaggcagacattgatgctacattatatgaacaagtcatcctggaaaaagaaatgggaacttatttgggcacctttgatgattacttggagttattcctgcagtttggttatgtgagccttttctcctgtgtttacccattagcagctgcctttgctgtgttaaataacttcactgaagtaaattcagatgccttaaaaatgtgcagggtcttcaaacgtccattctcagaaccttcagccaatattggtgtgtggcagttggcttttgaaacgatgagtgttatatctgtggtcactaactgtgcgctgattggaatgtcaccacaagtgaatgcagtctttccagaatcaaaagcagacctcattttgattgtagtagcagtggagcacgcactcctggctttaaagtttatacttgcatttgccatacctgataagccacggcatatccagatgaaactagccagactggaatttgagtctttggaggcactcaagcagcagcaaatgaagctcgtgaccgagaacctgaaggaggaaccaatggaaagcgggaaggagaaggcaacctgagtgcccagcgtgcccagctgccctgttggcagaggcctgtgtctgtgccacacctgccacggtggcagggggggtacccggggcagcatcgtggctcctgaacccagacccaatgcttagccaaacgaagtggctcccatgtggcaagcacccttctcagtttcgcagtggcttggctcgggatccttggcagttcccccagccccaccctgtctgctccttcccagttccttcccgggccccacacgctgctccagctgccaactttgctgcagagccactgccgcccttgagcctctcaccatgagtgagccaccagctctccacgttcccctcatagcagtgtcactcccaaccccaccatggcccagggacccgtggacaggttggggatggggtgtgtgcccactgtgctcatcacaggagcctcagttgagagtgagcggggtacagtaaggcagtgcttcccacactggacctctttcctggttctcttttgcaatacattaacagaccctttatcaacataaacaatagtaactgagctattaaaggcaacctctctga

SEQ ID NO: 415802 - DNA, 2413 bp, Homo sapiens
ccgcatctaggccccgccgcgtccgccacgcccagcgctcggcggcgcccgccccactggcctggcccgccccccgcaccgagcactctttcgcccggcctccggttctcgccggctctcggacccgcctccgaagacgtggagcgctgcggcggctgatttgtcaaagatgaaagtgaccttatcagctttggatacttctgagagttctttcacacctttggtggtcatagaacttgctcaggatgtcaaagaagaaaccaaagaatggctgaaaaacagaattatagctaaaaaaaaagatggaggtgcccagttgttgtttagaccattgttaaataaatatgaacaagaaacactagaaaatcagaacttatatcttgttggtgcctccaagattagaatgttactaggggcagaagcagtgggattggtaaaagagtgcaatgataacaccatgagagccttcacatacagaaccagacagaacttcaaaggttttgatgataacaatgatgatttcctgacaatggcagaatgtcaattcattatcaaacatgaacttgaaaatcttagagctaaagatgaaaaaatgatccctggttaccctcaggcaaagttgtatccaggaaaatcattgttgagaagattgctcacgtctggcatcgtgattcaggtgtttccactgcatgacagtgaagccctgaagaagcttgaggacacctggtacactcggtttgctttgaagtatcagcccatagacagtattcgtggctactttggggaaacaattgctctgtactttggatttttggagtatttcacttttgcattaatccccatggctgtcattgggttaccttactacttgtttgtgtgggaagactatgacaagtacgtgatctttgcctcgttcaacctcatctggtccacggtgattctggaactgtggaagcgtggctgtgccaacatgacctacaggtgggggacactgctcatgaagagaaagtttgaggagccccggccaggatttcatggtgtcttgggtatcaattccatcactgggaaggaggagcctctgtaccccagctacaagagacagttgcgcatttacctggtctccctgccattcgtgtgcctctgcctctatttctcactgtatgtcatgatgatttacttcgacatggaggtttgggccttgggtctacatgagaacagcgggtctgagtggaccagtgtcctgttgtatgtgcccagcatcatctatgccattgtgattgagatcatgaatcgtctctatcgatatgctgccgagtttttaacttcatgggagaatcacagattggaatctgcctatcagaaccatctaattctgaaagttttagtgttcaacttcctcaattgctttgcctcactcttctatattgcctttgtcttgaaagatatgaagcttttgcgccagagcttggccactctcctaattacctcccagatcctcaaccaaattatggaatcttttcttccttattggctccaaaggaagcatggtgtgcgggtgaagaggaaggtgcaggctttaaaggcagacattgatgctacattatatgaacaagtcatcctggaaaaagaaatgggaacttatttgggcacctttgatgattacttggagttattcctgcagtttggttatgtgagccttttctcctgtgtttacccattagcagctgcctttgctgtgttaaataacttcactgaagtaaattcagatgccttaaaaatgtgcagggtcttcaaacgtccattctcagaaccttcagccaatattggtgtgtggcagttggcttttgaaacgatgagtgttatatctgtggtcactaactgtgcgctgattggaatgtcaccacaagtgaatgcagtctttccagaatcaaaagcagacctcattttgattgtagtagcagtggagcacgcactcctggctttaaagtttatacttgcatttgccatacctgataagccacggcatatccagatgaaactagccagactggaatttgagtctttggaggcactcaagcagcagcaaatgaagctcgtgaccgagaacctgaaggaggaaccaatggaaagcgggaaggagaaggcaacctgagtgcccagcgtgcccagctgccctgttggcagaggcctgtgtctgtgccacacctgccacggtggcagggggggtacccggggcagcatcgtggctcctgaacccagacccaatgcttagcctcagttgagagtgagcggggtacagtaaggcagtgcttcccacactggacctctttcctggttctcttttgcaatacattaacagaccctttatcaacataaacaatagtaactgagctattaaaggcaacctctctga

SEQ ID NO: 415803 - DNA, 1843 bp, Homo sapiens
ccgcatctaggccccgccgcgtccgccacgcccagcgctcggcggcgcccgccccactggcctggcccgccccccgcaccgagcactctttcgcccggcctccggttctcgccggctctcggacccgcctccgaagacgtggagcgctgcggcggctgatttgtcaaagatgaaagtgaccttatcagctttggatacttctgagagttctttcacacctttggtggtcatagaacttgctcaggatgtcaaagaagaaaccaaagaatggctgaaaaacagaattatagctaaaaaaaaagatggaggtgcccagttgttgtttagaccattgttaaataaatatgaacaagaaacactagaaaatcagaacttatatcttgttggtgcctccaagattagaatgttactaggggcagaagcagtgggattggtaaaagagtgcaatgataacaccatgagagccttcacatacagaaccagacagaacttcaaaggttttgatgataacaatgatgatttcctgacaatggcagaatgtcaattcattatcaaacatgaacttgaaaatcttagagctaaagatgaaaaaatgatccctggttaccctcaggcaaagttgtatccaggaaaatcattgttgagaagattgctcacgtctggcatcgtgattcaggtgtttccactgcatgacagtgaagccctgaagaagcttgaggacacctggtacactcggtttgctttgaagtatcagcccatagagaatcacagattggaatctgcctatcagaaccatctaattctgaaagttttagtgttcaacttcctcaattgctttgcctcactcttctatattgcctttgtcttgaaagatatgaagcttttgcgccagagcttggccactctcctaattacctcccagatcctcaaccaaattatggaatcttttcttccttattggctccaaaggaagcatggtgtgcgggtgaagaggaaggtgcaggctttaaaggcagacattgatgctacattatatgaacaagtcatcctggaaaaagaaatgggaacttatttgggcacctttgatgattacttggagttattcctgcagtttggttatgtgagccttttctcctgtgtttacccattagcagctgcctttgctgtgttaaataacttcactgaagtaaattcagatgccttaaaaatgtgcagggtcttcaaacgtccattctcagaaccttcagccaatattggtgtgtggcagttggcttttgaaacgatgagtgttatatctgtggtcactaactgtgcgctgattggaatgtcaccacaagtgaatgcagtctttccagaatcaaaagcagacctcattttgattgtagtagcagtggagcacgcactcctggctttaaagtttatacttgcatttgccatacctgataagccacggcatatccagatgaaactagccagactggaatttgagtctttggaggcactcaagcagcagcaaatgaagctcgtgaccgagaacctgaaggaggaaccaatggaaagcgggaaggagaaggcaacctgagtgcccagcgtgcccagctgccctgttggcagaggcctgtgtctgtgccacacctgccacggtggcagggggggtacccggggcagcatcgtggctcctgaacccagacccaatgcttagcctcagttgagagtgagcggggtacagtaaggcagtgcttcccacactggacctctttcctggttctcttttgcaatacattaacagaccctttatcaacataaacaatagtaactgagctattaaaggcaacctctctga

SEQ ID NO: 415804 - DNA, 1667 bp, Homo sapiens
ccgcatctaggccccgccgcgtccgccacgcccagcgctcggcggcgcccgccccactggcctggcccgccccccgcaccgagcactctttcgcccggcctccggttctcgccggctctcggacccgcctccgaagacgtggagcgctgcggcggctgatttgtcaaagatgaaagtgaccttatcagctttggatacttctgagagttctttcacacctttggtggtcatagaacttgctcaggatgtcaaagaagaaaccaaagaatggctgaaaaacagaattatagctaaaaaaaaagatggaggtgcccagttgttgtttagaccattgttaaataaatatgaacaagaaacactagaaaatcagaacttatatcttgttggtgcctccaagattagaatgttactaggggcagaagcagtgggattggtaaaagagtgcaatgataacaccatgagagccttcacatacagaaccagacagaacttcaaaggttttgatgataacaatgatgatttcctgacaatggcagaatgtcaattcattatcaaacatgaacttgaaaatcttagagctaaagatgaaaaaatgatccctggttaccctcaggcaaagttgtatccaggaaaatcattgtttcaacttcctcaattgctttgcctcactcttctatattgcctttgtcttgaaagatatgaagcttttgcgccagagcttggccactctcctaattacctcccagatcctcaaccaaattatggaatcttttcttccttattggctccaaaggaagcatggtgtgcgggtgaagaggaaggtgcaggctttaaaggcagacattgatgctacattatatgaacaagtcatcctggaaaaagaaatgggaacttatttgggcacctttgatgattacttggagttattcctgcagtttggttatgtgagccttttctcctgtgtttacccattagcagctgcctttgctgtgttaaataacttcactgaagtaaattcagatgccttaaaaatgtgcagggtcttcaaacgtccattctcagaaccttcagccaatattggtgtgtggcagttggcttttgaaacgatgagtgttatatctgtggtcactaactgtgcgctgattggaatgtcaccacaagtgaatgcagtctttccagaatcaaaagcagacctcattttgattgtagtagcagtggagcacgcactcctggctttaaagtttatacttgcatttgccatacctgataagccacggcatatccagatgaaactagccagactggaatttgagtctttggaggcactcaagcagcagcaaatgaagctcgtgaccgagaacctgaaggaggaaccaatggaaagcgggaaggagaaggcaacctgagtgcccagcgtgcccagctgccctgttggcagaggcctgtgtctgtgccacacctgccacggtggcagggggggtacccggggcagcatcgtggctcctgaacccagacccaatgcttagcctcagttgagagtgagcggggtacagtaaggcagtgcttcccacactggacctctttcctggttctcttttgcaatacattaacagaccctttatcaacataaacaatagtaactgagctattaaaggcaacctctctga

SEQ ID NO: 415805 - DNA, 1728 bp, Homo sapiens
  misc_feature (1688)..(1688): n is a, c, g, or t
  misc_feature (1714)..(1714): n is a, c, g, or t
ccgcatctaggccccgccgcgtccgccacgcccagcgctcggcggcgcccgccccactggcctggcccgccccccgcaccgagcactctttcgcccggcctccggttctcgccggctctcggacccgcctccgaagacgtggagcgctgcggcggctgatttgtcaaagatgaaagtgaccttatcagctttggatacttctgagagttctttcacacctttggtggtcatagaacttgctcaggatgtcaaagaagaaaccaaagaatggctgaaaaacagaattatagctaaaaaaaaagatggaggtgcccagttgttgtttagaccattgttaaataaatatgaacaagaaacactagaaaatcagaacttatatcttgttggtgcctccaagattagaatgttactaggggcagaagcagtgggattggtaaaagagtgcaatgataacaccatgagagccttcacatacagaaccagacagaacttcaaaggttttgatgataacaatgatgatttcctgacaatggcagaatgtcaattcattatcaaacatgaacttgaaaatcttagagctaaagatgaaaaaatgatccctggttaccctcaggcaaagttgtatccaggaaaatcattgttgagaagattgctcacgtctggcatcgtgattcaggtgtttccactgcatgacagtgaagccctgaagaagcttgaggacacctggtacactcggtttgctttgaagtatcagcccatagacagtattcgtggctactttggggaaacaattgctctgtactttggatttttggagtatttcacttttgcattaatccccatggctgtcattgggttaccttactacttgtttgtgtgggaagactatgacaagtacgtgatctttgcctcgttcaacctcatctggtccacggtgattctggaactgtggaagcgtggctgtgccaacatgacctacaggtgggggacactgctcatgaagagaaagtttgaggagccccggccaggatttcatggtgtcttgggtatcaattccatcactgggaaggaggagcctctgtaccccagctacaagagacagttgcgcatttacctggtctccctgccattcgtgtgcctctgcctctatttctcactgtatgtcatgatgatttacttcgacatggaggtttgggccttgggtctacatgagaacagcgggtctgagtggaccagtgtcctgttgtatgtgcccagcatcatctatgccattgtgattgagatcatgaatcgtctctatcgatatgctgccgagtttttaacttcatgggagaatcacagattggaatctgcctatcagaaccatctaattctgaaagttttagtgttcaacttcctcaattgctttgcctcactcttctatattgcctttgtcttgaaagatatgaagcttttgcgccagagcttggccactctcctaattacctcccagatcctcaaccaaattatggaatcttttcttccttattggctccaaaggaagcatggtgtgcgggtgaagaggaaggtgcaggctttaaaggcagacattgatgctacattatatgaacaagtcatcctgtgcagagaacatctgaaagactaaagaagactgtatgaagagcaaggcaccgaaaggagaccgcatntgatatgtcaggagagggtctacctnaatttgccagtcct

SEQ ID NO: 415806 - DNA, 1137 bp, Homo sapiens
ccgcatctaggccccgccgcgtccgccacgcccagcgctcggcggcgcccgccccactggcctggcccgccccccgcaccgagcactctttcgcccggcctccggttctcgccggctctcggacccgcctccgaagacgtggagcgctgcggcggctgatttgtcaaagatgaaagtgaccttatcagctttggatacttctgagagttctttcacacctttggtggtcatagaacttgctcaggatgtcaaagaagaaaccaaagaatggctgaaaaacagaattatagctaaaaaaaaagatggaggtgcccagttgttgtttagaccattgttaaataaatatgaacaagaaacactagaaaatcagaacttatatcttgttggtgcctccaagattagaatgttactaggggcagaagcagtgggattggtaaaagagtgcaatgataacaccatgagagccttcacatacagaaccagacagaacttcaaaggttttgatgataacaatgatgatttcctgacaatggcagaatgtcaattcattatcaaacatgaacttgaaaatcttagagctaaagatgaaaaaatgatccctggttaccctcaggcaaagttgtatccaggaaaatcattgttgagaagattgctcacgtctggcatcgtgattcaggtgtttccactgcatgacagtgaagccctgaagaagcttgaggacacctggtacactcggtttgctttgaagtatcagcccatagacagtattcgtggctactttggggaaacaattgctctgtactttggatttttggagtatttcacttttgcattaatccccatggctgtcattgggttaccttactacttgtttgtgtgggaagactatgacaagtacgtgatctttgcctcgttcaacctcatctggtccacggtgattctggaactgtggaagcgtggctgtgccaacatgacctacaggtgggggacactgctcatgaagagaaagtttgaggagccccggccaggatttcatggtgtcttggacctctttcctggttctcttttgcaatacattaacagaccctttatcaacataaacaatagtaactgagctattaaaggcaacctctctga

SEQ ID NO: 415807 - DNA, 327 bp, Homo sapiens
taattctgaaagttttagtggtaagtacagcgtttatgtacaaatccattttatgaaactggtatatactacataatatataggaatacaaatatgaagagttgcttctaatctaagatatcaatatattttgtgcaaataggcaaggattgattaataaatatgtgtacctctgtgttcagtagccttattacaaatgtgcatgtgatgtaagacttcaaaatataggagttagtattatagccaatttccagttatttaaaaactaggccaggtgtggtggttcatacctgtaatctcagcactttggaaggcctatgctggtgg

SEQ ID NO: 415808 - DNA, 422 bp, Homo sapiens
ggttgaagcctccttgtccacctgcttgccctgggactatgggtcagttgcttcccctcgctgaggctcagtttctttatctgggaaatgagggtaacaagtgtgcacccggtggggctggggtggggactgggtacggtcatctccataaagcatttagttcaaggcctggcctggaggcagcactcaacagctgcagggacggacttccaggactcaattttctcatctgtgccatgctctgtgcatgtcgttggggagacagttccatcttatcccgccagtgtgtctcctcagtctcttagaagccaccctaggcaggggcaggggcaggggccggggaggtgaggtctggcttcttattctgcctgggaggccagggctgtgcttgtggactttgtccctgagttgtgccaagtcct

SEQ ID NO: 415809 - DNA, 1015 bp, Homo sapiens
gccatccgtgccaagtgcatgttcttcaaggacaagaccatgctgtgtccaatgcataagatcaaggggccctgtgagcaagagctgagctcttttgctgtcttccggcgggtctacattgagcgggacgaggtgaagcaaatcgctagcatcattcagcggggagaacggctgcacatgttccgtgtggggggccttgtgttccacgccatcggacagctgctgcctcaccagatggctgactttcatagtgccactgccctctatcccgtgggctacgaggccacgcgcatctattggagcctccgcaccaacaatcgtcgctgctgctatcgctgttctattggtgagaacaacgggcggccggagtttgtaatcaaagtcatcgagcagggcctggaggacctggtcttcactgacgcctctccccaggccgtgtggaatcgcatcattgagcctgtggctgccatgagaaaagaggctgacatgctgcgactcttccctgagtatctgaagggcgaggagctctttgggctgacggtgcatgccgtgcttcgcatagctgaatcactgcccggggtggagagctgtcaaaactatttattccgctatgggcgccacccccttatggagctgccactcatgatcaaccccactggctgtgcccgatcagagcctaaaatcctcacacactacaaacggccccataccctgaacagcaccagcatgtctaaggcatatcagagcaccttcacaggcgagaccaacaccccctacagcaagcagtttgtgcactccaagtcatctcagtaccggcggctgcgcaccgaatggaagaacaacgtgtacctggctcgctcccgtatccagggcctggggctctatgcagccaaggacctagaaaagcacacaatggttatcgagtacattggcaccatcattcggaacgaggtggccaaccggcgggagaaaatctacgaagagcagaatcgaggcatctacatgttccgaataa

SEQ ID NO: 415810 - DNA, 746 bp, Homo sapiens
  misc_feature (204)..(204): n is a, c, g, or t
cccacgcgtccggttgtcacggatccggagggaaaggcggtgccagccctaagtggcaagcgggtgcaccaatgggggtgggaggcttagccccgcctcgggagctcgggttccggcgggttgcatcagctgggtggggcaccgcctggcagcccggactcccccgacatgtgatcggcttcccagggagggcgggaggccggncgttccccgagcctggggaagctggccgtcccggactgacctgctcggggagagccagcaaaggacacattcggcctggcccaagccctgacgatttcagtgttgttttctgcacgcgcaaaacacctggggaccgaggggatggcagtggcatcctatctttgacagctctgaacgagcttaaccttttctttcgacccctttgctgatgcaagtaagggtgatgacctgcttcctgctggcactgaggattatatccatataagaattcaacagagaaacggcaggaagacccttactactgtccaagggatcgctgatgattacgataaaaagaaactagtgaaggcgtttaagaaagtaggtcttcagtgagattttgggaaagtcatagtggatttgtccacaagggggtgccagctgtgttgtatgtattgttagcggaaggggtgataaatgcgttcatgctcttgctaggcctaattcgttttcctttgtgctgcagaagttgcctgcgacctatgagggatcctctagatcga

SEQ ID NO: 415811 - DNA, 898 bp, Homo sapiens
  misc_feature (688)..(688): n is a, c, g, or t
  misc_feature (706)..(706): n is a, c, g, or t
  misc_feature (716)..(717): n is a, c, g, or t
  misc_feature (721)..(721): n is a, c, g, or t
  misc_feature (731)..(731): n is a, c, g, or t
  misc_feature (775)..(775): n is a, c, g, or t
  misc_feature (791)..(791): n is a, c, g, or t
  misc_feature (795)..(795): n is a, c, g, or t
  misc_feature (805)..(805): n is a, c, g, or t
  misc_feature (810)..(810): n is a, c, g, or t
cactgagccgccgccgaggattcagcagcctcccccttgagccccctcgcttcccgacgttccgttcccccctgcccgccttctcccgccaccgccgccgccgccttccgcaggccgtttccaccgaggaaaaggaatcgtatcgtatgtccgctatccagaacctccactctttcgacccctttgctgatgcaagtaagggtgatgacctgcttcctgctggcactgaggattatatccatataagaattcaacagagaaacggcaggaagacccttactactgtccaagggatcgctgatgattacgataaaaagaaactagtgaaggcgtttaagaaaaagtttgcctgcaatggtactgtaattgagcatccggaatatggagaagtaattcagctacagggtgaccaacgcaagaacatatgccagttcctcgtagagattggactggctaaggacgatcagctgaaggttcatgggtttttaagtgcttgtggctcactgaagcttaagtgaggatttccttgcaatgagtagaatttcccttctctcccttgtcacaggtttaaaaacctcacagcttgtataatgtaaccatttggggtccgcttttaacttggactagtgtaactccttcatgcaataaactgaaaagagccatgctgtctagtcttgaagtccctcanttaaacagaggtcaagcnataggcgccnngcantgtcaagccngaaaccaagcataccgtcatgtttcaccaagcccagagccctangatacaaacaactatngccngaacctcctnagctntccctctgcagagttccctaccctaagagaatgttaccacctgaacagtcctcggtgaatctgagaggagaggatggggtaaggcaga

SEQ ID NO: 415812 - DNA, 844 bp, Homo sapiens
  misc_feature (601)..(601): n is a, c, g, or t
  misc_feature (634)..(634): n is a, c, g, or t
  misc_feature (652)..(652): n is a, c, g, or t
  misc_feature (662)..(663): n is a, c, g, or t
  misc_feature (667)..(667): n is a, c, g, or t
  misc_feature (677)..(677): n is a, c, g, or t
  misc_feature (721)..(721): n is a, c, g, or t
  misc_feature (737)..(737): n is a, c, g, or t
  misc_feature (741)..(741): n is a, c, g, or t
  misc_feature (751)..(751): n is a, c, g, or t
  misc_feature (756)..(756): n is a, c, g, or t
cactgagccgccgccgaggattcagcagcctcccccttgagccccctcgcttcccgacgttccgttcccccctgcccgccttctcccgccaccgccgccgccgccttccgcaggccgtttccaccgaggaaaaggaatcgtatcgtatgtccgctatccagaacctccactctttcgacccctttgctgatgcaagtaagggtgatgacctgcttcctgctggcactgaggattatatccatataagaattcaacagagaaacggcaggaagacccttactactgtccaagggatcgctgatgattacgataaaaagaaactagtgaaggcgtttaagaaaaagtttgcctgcaatggtactgtaattgagcatccggaatatggagaagtaattcagctacagggtgaccaacgcaagaacatatgccagttcctcgtagagattggactggctaaggacgatcagctgaaggttcatgggtttttaagtgcttgtggctcactgaagcttaagtgaggatttccttgcaatgagtagaatttcccttctctcccttgtcacaggtttatagtgtaactccttcatgcaataaactgaanagagccatgctgtctagtcttgaagtccctcanttaaacagaggtcaagcnataggcgccnngcantgtcaagccngaaaccaagcataccgtcatgtttcaccaagcccagagccctangatacaaacaactatngccngaacctcctnagctntccctctgcagagttccctaccctaagagaatgttaccacctgaacagtcctcggtgaatctgagaggagaggatggggtaaggcaga

SEQ ID NO: 415813 - DNA, 427 bp, Homo sapiens
cactgagccgccgccgaggattcagcagcctcccccttgagccccctcgcttcccgacgttccgttcccccctgcccgccttctcccgccaccgccgccgccgccttccgcaggccgtttccaccgaggaaaaggaatcgtatcgtatgtccgctatccagaacctccactctttcgacccctttgctgatgcaagtaagggtgatgacctgcttcctgctggcactgaggattatatccatataagaattcaacagagaaacggcaggaagacccttactactgtccaagggatcgctgatgattacgataaaaagaaactagtgaaggcgtttaagaaaaagtttgcctgcaatggtactgtaattgagcatccggaatatggagaagtattcagctacggtgatgagtatcttctggtccccag

SEQ ID NO: 415814 - DNA, 421 bp, Homo sapiens
cactgagccgccgccgaggattcagcagcctcccccttgagccccctcgcttcccgacgttccgttcccccctgcccgccttctcccgccaccgccgccgccgccttccgcaggccgtttccaccgaggaaaaggaatcgtatcgtatgtccgctatccagaacctccactctttcgacccctttgctgatgcaagtaagggtgatgacctgcttcctgctggcactgaggattatatccatataagaattcaacagagaaacggcaggaagacccttactactgtccaagggatcgctgatgattacgataaaaagaaactagtgaaggcgtttaagaaaaagtttgcctgcaatggtactgtaattgagcatccggaatatggagaagctgtgcgacggagactgtgcaggcggccgct

SEQ ID NO: 415815 - DNA, 846 bp, Homo sapiens
  misc_feature (636)..(636): n is a, c, g, or t
  misc_feature (654)..(654): n is a, c, g, or t
  misc_feature (664)..(665): n is a, c, g, or t
  misc_feature (669)..(669): n is a, c, g, or t
  misc_feature (679)..(679): n is a, c, g, or t
  misc_feature (723)..(723): n is a, c, g, or t
  misc_feature (739)..(739): n is a, c, g, or t
  misc_feature (743)..(743): n is a, c, g, or t
  misc_feature (753)..(753): n is a, c, g, or t
  misc_feature (758)..(758): n is a, c, g, or t
cactgagccgccgccgaggattcagcagcctcccccttgagccccctcgcttcccgacgttccgttcccccctgcccgccttctcccgccaccgccgccgccgccttccgcaggccgtttccaccgaggaaaaggaatcgtatcgtatgtccgctatccagaacctccactctttcgacccctttgctgatgcaagtaagggtgatgacctgcttcctgctggcactgaggattatatccatataagaattcaacagagaaacggcaggaagacccttactactgtccaagggatcgctgatgattacgataaaaagaaactagtgaaggcgtttaagtaattcagctacagggtgaccaacgcaagaacatatgccagttcctcgtagagattggactggctaaggacgatcagctgaaggttcatgggtttttaagtgcttgtggctcactgaagcttaagtgaggatttccttgcaatgagtagaatttcccttctctcccttgtcacaggtttaaaaacctcacagcttgtataatgtaaccatttggggtccgcttttaacttggactagtgtaactccttcatgcaataaactgaaaagagccatgctgtctagtcttgaagtccctcanttaaacagaggtcaagcnataggcgccnngcantgtcaagccngaaaccaagcataccgtcatgtttcaccaagcccagagccctangatacaaacaactatngccngaacctcctnagctntccctctgcagagttccctaccctaagagaatgttaccacctgaacagtcctcggtgaatctgagaggagaggatggggtaaggcaga

SEQ ID NO: 415816 - DNA, 832 bp, Homo sapiens
  misc_feature (622)..(622): n is a, c, g, or t
  misc_feature (640)..(640): n is a, c, g, or t
  misc_feature (650)..(651): n is a, c, g, or t
  misc_feature (655)..(655): n is a, c, g, or t
  misc_feature (665)..(665): n is a, c, g, or t
  misc_feature (709)..(709): n is a, c, g, or t
  misc_feature (725)..(725): n is a, c, g, or t
  misc_feature (729)..(729): n is a, c, g, or t
  misc_feature (739)..(739): n is a, c, g, or t
  misc_feature (744)..(744): n is a, c, g, or t
cgcgtctgcgggagccactctgcgacctcactgcttccaaactcgtactcgccccgggtggggccgagccctgtcctcgctggtccgctatccagaacctccactctttcgacccctttgctgatgcaagtaagggtgatgacctgcttcctgctggcactgaggattatatccatataagaattcaacagagaaacggcaggaagacccttactactgtccaagggatcgctgatgattacgataaaaagaaactagtgaaggcgtttaagaaaaagtttgcctgcaatggtactgtaattgagcatccggaatatggagaagtaattcagctacagggtgaccaacgcaagaacatatgccagttcctcgtagagattggactggctaaggacgatcagctgaaggttcatgggtttttaagtgcttgtggctcactgaagcttaagtgaggatttccttgcaatgagtagaatttcccttctctcccttgtcacaggtttaaaaacctcacagcttgtataatgtaaccatttggggtccgcttttaacttggactagtgtaactccttcatgcaataaactgaaaagagccatgctgtctagtcttgaagtccctcanttaaacagaggtcaagcnataggcgccnngcantgtcaagccngaaaccaagcataccgtcatgtttcaccaagcccagagccctangatacaaacaactatngccngaacctcctnagctntccctctgcagagttccctaccctaagagaatgttaccacctgaacagtcctcggtgaatctgagaggagaggatggggtaaggcaga

SEQ ID NO: 415817 - DNA, 1121 bp, Homo sapiens
  misc_feature (204)..(204): n is a, c, g, or t
  misc_feature (911)..(911): n is a, c, g, or t
  misc_feature (929)..(929): n is a, c, g, or t
  misc_feature (939)..(940): n is a, c, g, or t
  misc_feature (944)..(944): n is a, c, g, or t
  misc_feature (954)..(954): n is a, c, g, or t
  misc_feature (998)..(998): n is a, c, g, or t
  misc_feature (1014)..(1014): n is a, c, g, or t
  misc_feature (1018)..(1018): n is a, c, g, or t
  misc_feature (1028)..(1028): n is a, c, g, or t
  misc_feature (1033)..(1033): n is a, c, g, or t
cccacgcgtccggttgtcacggatccggagggaaaggcggtgccagccctaagtggcaagcgggtgcaccaatgggggtgggaggcttagccccgcctcgggagctcgggttccggcgggttgcatcagctgggtggggcaccgcctggcagcccggactcccccgacatgtgatcggcttcccagggagggcgggaggccggncgttccccgagcctggggaagctggccgtcccggactgacctgctcggggagagccagcaaaggacacattcggcctggcccaagccctgacgatttcagtgttgttttctgcacgcgcaaaacacctggggaccgaggggatggcagtggcatcctatctttgacagctctgaacgagcttaaccttttctttcgacccctttgctgatgcaagtaagggtgatgacctgcttcctgctggcactgaggattatatccatataagaattcaacagagaaacggcaggaagacccttactactgtccaagggatcgctgatgattacgataaaaagaaactagtgaaggcgtttaagaaaaagtttgcctgcaatggtactgtaattgagcatccggaatatggagaagtaattcagctacagggtgaccaacgcaagaacatatgccagttcctcgtagagattggactggctaaggacgatcagctgaaggttcatgggtttttaagtgcttgtggctcactgaagcttaagtgaggatttccttgcaatgagtagaatttcccttctctcccttgtcacaggtttaaaaacctcacagcttgtataatgtaaccatttggggtccgcttttaacttggactagtgtaactccttcatgcaataaactgaaaagagccatgctgtctagtcttgaagtccctcanttaaacagaggtcaagcnataggcgccnngcantgtcaagccngaaaccaagcataccgtcatgtttcaccaagcccagagccctangatacaaacaactatngccngaacctcctnagctntccctctgcagagttccctaccctaagagaatgttaccacctgaacagtcctcggtgaatctgagaggagaggatggggtaaggcaga

SEQ ID NO: 415818 - DNA, 310 bp, Homo sapiens
gttttgccatattggccagactggtctcaaactcctgacctcaggcgatctgcctgcctcagcctcacaaagtgctgggattataggcgtcagccacagtgcctggcccataggggggtcttatgtgggtgagggaggggggctcctgttgagcagtgagtggatgagtcagggcagctctttcctctagccatcagcaacctctgccagacctttgcacggaggcttgggggaaacccatcaaggccacagtcctggacaggacctgggagagtgggtaagagagggtgcaaggacaggtgcctgaggc

SEQ ID NO: 415819 - DNA, 2415 bp, Homo sapiens
aaaaaaaaaaaaaaaaaaaaaaaaaaaaaaaaaagaattgactcgcgccctcgtccgccgccataggccagtgccggggtttaagggccaggaaaggaagcattcagggaatttaggtgtagccagaagaaaatcaggtcctggctccccagaagcaagagagttcaaatgaaggaaggaggaggttcctggatgtggatgtcatcatttctgggaacactcttaaatggagactcagatttcttagccaaaatttagggaggatccagaagaaaccaaagacgaagcatcccagttcttgggtatttcctgaaacagaagaaaatgacaaaggcccaggaatcactgaccctggaggatgtggctgtggacttcacctgggaggagtggcagttcctgagccctgctcagaaggacctgtaccgggatgtgatgttggagaactacagcaaccttgtgtcagtggggtatcaagccggcaaacctgatgccctcaccaagttggaacaaggagaaccactatggacactagaagatgaaatccacagtccagcccacccagaaattgagaaagctgatgatcatctgcagcagcccttgcaaaaccaaaaaatactgaagaggacgggacaacgctatgaacacggaagaactttgaaatcatatttaggtttaaccaaccagagcagaagatacaacagaaaggagcctgctgagtttaatggagatggagcttttctccatgataatcatgaacaaatgcctacggaaattgaattccctgaaagtagaaaacccatcagcaccaagtcacaattccttaaacatcagcaaacacacaacatagagaaagcccatgaatgcactgactgtgggaaagctttcctcaagaagtctcagctcactgagcataagagaattcatacaggaaagaaaccccacgtgtgtagcttgtgtgggaaagccttctacaagaagtacaggctcactgaacacgagagagctcacagaggagagaaaccccacgggtgtagcttgtgtgggaaagccttctacaagaggtacaggctcactgaacacgagagagctcacaaaggagagaaaccatacgggtgcagtgaatgtgggaaagccttccccaggaaatctgagcttactgaacatcaaaggattcacacgggaattaagccccatcaatgcagcgaatgtgggagagctttctccagaaaatcactactcgttgtacatcagcgaactcatacaggagagaagcctcatacatgcagtgaatgtggaaaaggcttcattcagaagggcaatctcaacatacatcaacgaactcacactggagagaaaccttatggatgcattgactgtggcaaggccttcagccagaagtcttgccttgtagcacatcagagatatcatacaggaaagactccctttgtatgtcctgaatgtgggcaaccctgttcacagaagtcaggactcattagacatcagaaaattcactcaggagagaaaccctataaatgcagtgactgtgggaaagccttccttacaaagacaatgctcattgtacatcacagaactcacacgggagagagaccctatggctgtgatgagtgtgagaaagcttacttctatatgtcttgccttgttaaacataagagaatacactcaagggagaaacggggggattcagtgaaggtggaaaatccttccacagcaagtcacagcttaagtcctagtgaacatgtgcaggggaaaagccctgttaatatggtaactgtggcaatggtggcagggcagtgtgagtttgcccacatcctgcattcatgataaacagtttgctgtttgatcatatagcctccagcggaatgctgagtttgtcatgtcccatgggcctttggctccctgcactaatatgtatagtagggtttacaagatatgaaatatattttacttttttatatcttataaacctcactacccctcccacaatattgtttttcatttactatcttgatcatagagtttggctggggaggggggcagttttagaggcttccacttggtgttcctcagaatgatatctcttactccgggggccaaggtaggggttagcttttgttctctttgtagtttagattgtatctcttgccttgttcaagttcacaaatctttttgtgtatacacatatgtacatgaaaatgatgttcatgctttttattattttacccttcattatttcattttttatagttctcatagctatgtctttcagttcactaatcttttttccacagtgtttaatctgtcattaatcccatccaaagtatgttttctctcagaaattgtaatttttaacctctaataatttgacatgggtttttccctgttatatctttcata

SEQ ID NO: 415820 - DNA, 1861 bp, Homo sapiens
aaaaaaaaaaaaaaaaaaaaaaaaaaaaaaaaaagaattgactcgcgccctcgtccgccgccataggccagtgccggggtttaagggccaggaaaggaagcattcagggaatttaggtgtagccagaagaaaatcaggtcctggctccccagaagcaagagagttcaaatgaaggaaggaggaggttcctggatgtggatgtcatcatttctgggaacactcttaaatggagactcagatttcttagccaaaatttagggaggatccagaagaaaccaaagacgaagcatcccagttcttgggtatttcctgaaacagaagaaaatgacaaaggcccaggaatcactgaccctggaggatgtggctgtggacttcacctgggaggagtggcagttcctgagccctgctcagaaggacctgtaccgggatgtgatgttggagaactacagcaaccttgtgtcagtggggtatcaagccggcaaacctgatgccctcaccaagttggaacaaggagaaccactatggacactagaagatgaaatccacagtccagcccacccagaaattgagaaagctgatgatcatctgcagcagcccttgcaaaaccaaaaaatactgaagaggacgggacaacgctatgaacacggaagaactttgaaatcatatttaggtttaaccaaccagagcagaagatacaacagaaaggagcctgctgagtttaatggagatggagcttttctccatgataatcatgaacaaatgcctacggaaattgaattccctgaaagtagaaaacccatcagcaccaagtcacaattccttaaacatcagcaaacacacaacatagagaaagcccatgaatgcactgactgtgggaaagctttcctcaagaagtctcagctcactgagcataagagaattcatacaggaaagaaaccccacgtgtgtagcttgtgtgggaaagccttctacaagaagtacaggctcactgaacacgagagagctcacagaggagagaaaccccacgggtgtagcttgtgtgggaaagccttctacaagaggtacaggctcactgaacacgagagagctcacaaaggagagaaaccatacgggtgcagtgaatgtgggaaagccttccccaggaaatctgagcttactgaacatcaaaggattcacacgggaattaagccccatcaatgcagcgaatgtgggagagctttctccagaaaatcactactcgttgtacatcagcgaactcatacaggagagaagcctcatacatgcagtgaatgtggaaaaggcttcattcagaagggcaatctcaacatacatcaacgaactcacactggagagaaaccttatggatgcattgactgtggcaaggccttcagccagaagtcttgccttgtagcacatcagagatatcatacaggaaagactccctttgtatgtcctgaatgtgggcaaccctgttcacagaagtcaggactcattagacatcagaaaattcactcaggagagaaaccctataaatgcagtgactgtgggaaagccttccttacaaagacaatgctcattgtacatcacagaactcacacgggagagagaccctatggctgtgatgagtgtgagaaagcttacttctatatgtcttgccttgttaaacataagagaatacactcaagggagaaacggggggattcagtgaaggtggaaaatccttccacagcaagtcacagcttaagtcctagtgaacatgtgcaggggaaaagccctgttaatatggtaactgtggcaatggtggcagggcagtgtgagtttgcccacatcctgcattcatgataaacagtttgctgtttga

SEQ ID NO: 415821 - DNA, 452 bp, Homo sapiens
gtatgaatgctgctgtgtccaagactgtagctgtggcttctggggctgcaagcacccccatcagcatcagcacaggagcccccaccgtgcggcaggtccctgtcagcaccacggttgtgtccacgtcccaggctgtgagtaactagtggtaaagcttaggccttcttttttagaaaacttaatcaaggctcaactgcccattacccgagaaactccctaaaaactaggaaacttctttttaggagtggaaattagaggccctaaaagcacctcgtttaccccaaatagatttatttactgataggcttttgtctgtgtttcctttgaaacacaatttatgtgtcagactgtgtttcctttgaaacacaatttatcaaagtatgatacttgcatacattcttttcaaatggtaaagaacagtgcagacaaaataaaacctgactacgttccag

SEQ ID NO: 415822 - DNA, 445 bp, Homo sapiens
gaaagacctcatgctcttacacattacaagcggttgtgagaatcaaatgagatagggtgcatctcagaatctgaaaaatactgtgcacacggaaagtattatttggtctctaaggcccatcaacttggtcctaactcacttttatcagtttgtagaacttaatctttttaagttctccgtatttttttatgctttcattttttaatgtgctaccctctctacctgggatgtgctttttctacagggcaagctctgcatttcccctcctctcctttttctcatcgtggtttgtacttgcctctcagcacccatcacactggatgtaactacaggcatgtctctcctgtttgactgtaaactccttgctggacacatatctcaggagtccttacagccatttcaatgctgttgcaaagtggatatttaataaatatttgttgaagga

SEQ ID NO: 415823 - DNA, 1455 bp, Homo sapiens
gtatgaatgctgctgtgtccaagactgtagctgtggcttctggggctgcaagcacccccatcagcatcagcacaggagcccccaccgtgcggcaggtccctgtcagcaccacggttgtgtccacgtcccaggctgggaagttgcctacacggatcacagttcccctctctgtgatcagccagccaatgaagggcaagagcgtggtcacagcccccatcatcaaaggcaaccttggagccaacctcagtgggttgggccgcaacatcatcctcacaactatgccagcaggcactaagctcattgctggcaataagcctgttagtttcctcactgctcagcagttgcagcagcttcagcagcaaggtcaggccacacaggtgcgcatccagactgtccctgcatcccatctccaacagggaacagcttctggctcctccaaagcagtctccactgttgttgtgactacagctccgtctcctaaacaggcacctgagcaacaatgattatgagagaggatggcttccgtgaaagaccatgcctggtctgtcctggctgagaagggaccagggaggttgcatcattgttttaagcttgcctgttcaaggcagccaggcgaggggtgatggcaacggtggcctggattcgtggcctggattctgctgccacgtgccatagtggagcaccctgagaaaggttcactccagggttccaaggtctgctctctaccaatctaggagaatattctgttgaaattgcaggaattaccagttacgtccaacaagccagagttctgagagtaagacccccagggaaggcttaccagttgcagagtgcacacagcgaataggctggttctccatgaggattgtattttttggcttctggtcttctccatgactagtggtctggataggagttttgtgtccagaaaattttatgtaatttatttttttaaagaacctgttgtacatctttctcaaatacaaacttgggctttagctgccccctccactaaaccgatgacttacttttttgactagaatgagaaaatggcaagaatcttagtaaggtggtagccagcttggtaactgcatagtaatcgagaggctgtaagatgggaattcatcgtaggcagcgaggtagagtgggtcccctgaaatgggattcgcttggcactgcctcttaaagataggggtgttgggatcttgattgtggccgccccccccagctttacctgcccactttgtccttcttggcaagcctgttcacatggacgtccagagccagtggacagagaggaggggacggacagcagaggtgctgcttttgcagcagaaactttgttgcagttcagagtataccttctgctctgctccagagcaagagttgcaaaccaggcccttggggctggccatttgtttttgtaaataaagttttattggaacacagcccaga

SEQ ID NO: 415824 - DNA, 1249 bp, Homo sapiens
tcccctgggctgcaggaattcggcacgagagccaacctcagtgggttgggccgcaacatcatcctcacaactatgccagcaggcactaagctcattgctggcaataagcctgttagtttcctcactgctcagcagttgcagcagcttcagcagcaaggtcaggccacacaggtgcgcatccagactgtccctgcatcccatctccaacagggaacagcttctggctcctccaaagcagtctccactgttgttgtgactacagctccgtctcctaaacaggcacctgagcaacaatgattatgagagaggatggcttccgtgaaagaccatgcctggtctgtcctggctgagaagggaccagggaggttgcatcattgttttaagcttgcctgttcaaggcagccaggcgaggggtgatggcaacggtggcctggattcgtggcctggattctgctgccacgtgccatagtggagcaccctgagaaaggttcactccagggttccaaggtctgctctctaccaatctaggagaatattctgttgaaattgcaggaattaccagttacgtccaacaagccagagttctgagagtaagacccccagggaaggcttaccagttgcagagtgcacacagcgaataggctggttctccatgaggattgtattttttggcttctggtcttctccatgactagtggtctggataggagttttgtgtccagaaaattttatgtaatttatttttttaaagaacctgttgtacatctttctcaaatacaaacttgggctttagctgccccctccactaaaccgatgacttacttttttgactagaatgagaaaatggcaagaatcttagtaaggtggtagccagcttggtaactgcatagtaatcgagaggctgtaagatgggaattcatcgtaggcagcgaggtagagtgggtcccctgaaatgggattcgcttggcactgcctcttaaagataggggtgttgggatcttgattgtggccgccccccccagctttacctgcccactttgtccttcttggcaagcctgttcacatggacgtccagagccagtggacagagaggaggggacggacagcagaggtgctgcttttgcagcagaaactttgttgcagttcagagtataccttctgctctgctccagagcaagagttgcaaaccaggcccttggggctggccatttgtttttgtaaataaagttttattggaacacagcccaga

SEQ ID NO: 415825 - DNA, 1033 bp, Homo sapiens
ataccagtttgacggagactctctcataatgttgttgtgactacagctccgtctcctaaacaggcacctgagcaacaatgattatgagagaggatggcttccgtgaaagaccatgcctggtctgtcctggctgagaagggaccagggaggttgcatcattgttttaagcttgcctgttcaaggcagccaggcgaggggtgatggcaacggtggcctggattcgtggcctggattctgctgccacgtgccatagtggagcaccctgagaaaggttcactccagggttccaaggtctgctctctaccaatctaggagaatattctgttgaaattgcaggaattaccagttacgtccaacaagccagagttctgagagtaagacccccagggaaggcttaccagttgcagagtgcacacagcgaataggctggttctccatgaggattgtattttttggcttctggtcttctccatgactagtggtctggataggagttttgtgtccagaaaattttatgtaatttatttttttaaagaacctgttgtacatctttctcaaatacaaacttgggctttagctgccccctccactaaaccgatgacttacttttttgactagaatgagaaaatggcaagaatcttagtaaggtggtagccagcttggtaactgcatagtaatcgagaggctgtaagatgggaattcatcgtaggcagcgaggtagagtgggtcccctgaaatgggattcgcttggcactgcctcttaaagataggggtgttgggatcttgattgtggccgccccccccagctttacctgcccactttgtccttcttggcaagcctgttcacatggacgtccagagccagtggacagagaggaggggacggacagcagaggtgctgcttttgcagcagaaactttgttgcagttcagagtataccttctgctctgctccagagcaagagttgcaaaccaggcccttggggctggccatttgtttttgtaaataaagttttattggaacacagcccaga

SEQ ID NO: 415826 - DNA, 821 bp, Homo sapiens
  misc_feature (22)..(22): n is a, c, g, or t
tctacaggatcccattactcanctgctgccacgtgccatagtggagcaccctgagaaaggttcactccagggttccaaggtctgctctctaccaatctaggagaatattctgttgaaattgcaggaattaccagttacgtccaacaagccagagttctgagagtaagacccccagggaaggcttaccagttgcagagtgcacacagcgaataggctggttctccatgaggattgtattttttggcttctggtcttctccatgactagtggtctggataggagttttgtgtccagaaaattttatgtaatttatttttttaaagaacctgttgtacatctttctcaaatacaaacttgggctttagctgccccctccactaaaccgatgacttacttttttgactagaatgagaaaatggcaagaatcttagtaaggtggtagccagcttggtaactgcatagtaatcgagaggctgtaagatgggaattcatcgtaggcagcgaggtagagtgggtcccctgaaatgggattcgcttggcactgcctcttaaagataggggtgttgggatcttgattgtggccgccccccccagctttacctgcccactttgtccttcttggcaagcctgttcacatggacgtccagagccagtggacagagaggaggggacggacagcagaggtgctgcttttgcagcagaaactttgttgcagttcagagtataccttctgctctgctccagagcaagagttgcaaaccaggcccttggggctggccatttgtttttgtaaataaagttttattggaacacagcccaga

SEQ ID NO: 415827 - DNA, 1597 bp, Homo sapiens
gtatgaatgctgctgtgtccaagactgtagctgtggcttctggggctgcaagcacccccatcagcatcagcacaggagcccccaccgtgcggcaggtccctgtcagcaccacggttgtgtccacgtcccaggctgggaagttgcctacacggatcacagttcccctctctgtgatcagccagccaatgaagggcaagagcgtggtcacagcccccatcatcaaaggcaaccttggagccaacctcagtgggttgggccgcaacatcatcctcacaactatgccagcaggcactaagctcattgctggcaataagcctgttagtttcctcactgctcagcagttgcagcagcttcagcagcaaggtcaggccacacaggtgcgcatccagactgtccctgcatcccatctccaacagggaacagcttctggctcctccaaagcagtctccactgttgttgtgactacagctccgtctcctaaacaggcacctgagcaacaatgattatgagagaggatggcttccgtgaaagaccatgcctggtctgtcctggctgagaagggaccagggaggttgcatcattgttttaagcttgcctgttcaaggcagccaggcgaggggtgatggcaacggtggcctggattcgtggcctggattctgctgccacgtgccatagtggagcaccctgagaaaggttcactccagggttccaaggtctgctctctaccaatctaggagaatattctgttgaaattgcaggaattaccagttacgtccaacaagccagagttctgagagtaagacccccagggaaggcttaccagttgcagagtgcacacagcgaataggctggttctccatgaggattgtattttttggcttctggtcttctccatgactagtggtctggataggagttttgtgtccagaaaattttatgtaatttatttttttaaagaacctgttgtacatctttctcaaatacaaacttgggctttagctgccccctccactaaaccgatgacttacttttttgactagaatgagaaaatggcaagaatcttagtaaggtggtagccagcttggtaactgcatagtaatcgagaggctgtaagatgggaattcatcgtaggcagcgaggtagagtgggtcccctgaaatgggattcgcttggcactgcctcttaaagataggggtgttgggatcttgattgtggccgccccccccagctttacctgcccactttgtccttcttggcaagcctgttcacatggacgtccagagccagtggacagagaggaggggacggacagcagaggtgctgcttttgcagcagaaactttgttgcagttcagagtataccttctgctctgctccagagcaagagttgcaaaccaggcccttggggctggccatttgtttttgtaaataaagttttattggaacacagcccagaccaatttgtgtttgtattatctgtggctgctttcagattcgaaggcagaattgagtagttgacatagagactggatggccctgaagcctaaagtatttcctatatggccttttaagtaaaagcgttttttgtttgtttgttt

SEQ ID NO: 415828 - DNA, 914 bp, Homo sapiens
gtatgaatgctgctgtgtccaagactgtagctgtggcttctggggctgcaagcacccccatcagcatcagcacaggagcccccaccgtgcggcaggtccctgtcagcaccacggttgtgtccacgtcccaggctgggaagttgcctacacggatcacagttcccctctctgtgatcagccagccaatgaagggcaagagcgtggtcacagcccccatcatcaaaggcaaccttggagccaacctcagtgggttgggccgcaacatcatcctcacaactatgccagcaggcactaagctcattgctggcaataagcctgttagtttcctcactgctcagcagttgcagcagcttcagcagcaaggtcaggccacacaggtgcgcatccagactgtccctgcatcccatctccaacagggaacagcttctggctcctccaaagcagtctccactgttgttgtgactacagctccgtctcctaaacaggcacctgagcaacaatgattatgagagaggatggcttccgtgaaagaccatgcctggtctgtcctggctgagaagggaccagggaggttgcatcattgttttaagcttgcctgttcaaggcagccaggcgaggggtgatggcaacggtggcctggattcgtggcctggattctgctgccacgtgccatagtggagcaccctgagaaaggttcactccagggttccaagggcaagctctgcatttcccctcctctcctttttctcatcgtggtttgtacttgcctctcagcacccatcacactggatgtaactacaggcatgtctctcctgtttgactgtaaactccttgctggacacatatctcaggagtccttacagccatttcaatgctgttgcaaagtggatatttaataaatatttgttgaagga

SEQ ID NO: 415829 - DNA, 854 bp, Homo sapiens
cactcatagaaactggaggcaaaatgcatgacagtaacaatgtggagaaagacattacaccatctgaattgcctgcaaacccaggttgtctgcattcaaaagagcattctattaaagctaccttaatttggcgcttatttttcttaatcatgtttctgacaatcatagtgtgtggaatggttgctgctttaagcgcaataagagctaactgccatcaagagccatcagtatgtcttcaagctgcatgcccagaaagctggattggttttcaaagaaagtgtttctatttttctgatgacaccaagaactggacatcaagtcagaggttttgtgactcacaagatgctgatcttgctcaggttgaaagcttccaggaactgaatttcctgttgagatataaaggcccatctgatcactggattgggctgagcagagaacaaggccaaccatggaaatggataaatggtactgaatggacaagacagtttcctatcctgggagcaggagagtgtgcctatttgaatgacaaaggtgccagtagtgccaggcactacacagagaggaagtggatttgttccaaatcagatatacatgtctagatgttacagcaaagccccaactaatctttagaagcatattggaactgataactccattttaaaatgagcaaagaatttatttcttataccaacaggtatatgaaaatatgctcaatatcactaataactgggaaaatacaaatcaaaatcatagtaaaatattacctgttttcatggtgctaatattacctgttctcccactgctaatgacatacccgagactgagtaatttataaataaaagagatttaattga

SEQ ID NO: 415830 - DNA, 527 bp, Homo sapiens
taaaatggttttttgtttgtttgtatttttgagagacagggtcttactctgttacccaggctggagtgcagtagtaccatcgtggctcactgcagccttgacttccctggctcaagtgagcctcccatctcagcctcctgagtagctgggactacaggtttcctatcctgggagcaggagagtgtgcctatttgaatgacaaaggtgccagtagtgccaggcactacacagagaggaagtggatttgttccaaatcagatatacatgtctagatgttacagcaaagccccaactaatctttagaagcatattggaactgataactccattttaaaatgagcaaagaatttatttcttataccaacaggtatatgaaaatatgctcaatatcactaataactgggaaaatacaaatcaaaatcatagtaaaatattacctgttttcatggtgctaatattacctgttctcccactgctaatgacatacccgagactgagtaatttataaataaaagagatttaattga

SEQ ID NO: 415831 - DNA, 833 bp, Homo sapiens
cactcatagaaactggaggcaaaatgcatgacagtaacaatgtggagaaagacattacaccatctgaattgcctgcaaacccaggttgtctgcattcaaaagagcattctattaaagctaccttaatttggcgcttatttttcttaatcatgtttctgacaatcatagtgtgtggaatggttgctgctttaagcgcaataagagctaactgccatcaagagccatcagtatgtcttcaagctgcatgcccagaaagctggattggttttcaaagaaagtgtttctatttttctgatgacaccaagaactggacatcaagtcagaggttttgtgactcacaagatgctgatcttgctcaggttgaaagcttccaggaactgaatttcctgttgagatataaaggcccatctgatcactggattgggctgagcagagaacaaggccaaccatggaaatggataaatggtactgaatggacaagacagtaagttctaaaaatctggcagtaatatttgtatttgaatttactttgcattaaatctgaagtgttctctagttacatgctttaaaaaattctcattttaaggttagtcatgaaagaagatggtgccaacttgtatgttgcaaaggtttcacaagttcctcgaatgaatccaagacctgtcatggtgaggtagactgactgtgaacttggctccaggcttatctatgtcattttcaaacactttcattttaagcaaaccatacaatatctttaagtcttgttccttaccttcaacaacaaaattaaattgcacttgtcctcctgatttcacggggttgatgtgaggaac

SEQ ID NO: 415832 - DNA, 395 bp, Homo sapiens
cactcatagaaactggaggcaaaatgcatgacagtaacaatgtggagaaagacattacaccatctgaattgcctgcaaacccagcaataagagctaactgccatcaagagccatcagtatgtcttcaagctgcatgcccagaaagctggattggttttcaaagaaagtgtttctatttttctgatgacaccaagaactggacatcaagtcagaggttttgtgactcacaagatgctgatcttgctcaggttgaaagcttccaggaactggtaagaaaatagttctggccagaatcaaagattcagccctacaaggatatgttttcctgtgaaattatctaagaggtaggtttagacatctgcttttacattgatttttttttttttttttttttt

SEQ ID NO: 415833 - DNA, 2771 bp, Homo sapiens
gatcttggtggtagtagcaaatattcaaacgagaactttgaaggctgatgggagaagaggcgcatcttgctcccatcagccagctaaggctttggatgtacttgaaagaatattatgcttacagatatgaaataggtttgattcaggactttgcagtattcctatagttgatttataacatctcctgctaagcaaagcccactgactaattagtcaccactacacaaggaaaaacagcattatttttagaggctgaattaatgttagttttctcattttctcatcttcattctctctgctgttgaagaaatgttcagtggccaactgattctgcttcttctcttgcaggtttcctatcctgggagcaggagagtgtgcctatttgaatgacaaaggtgccagtagtgccaggcactacacagagaggaagtggatttgttccaaatcagatatacatgtctagatgttacagcaaagccccaactaatctttagaagcatattggaactgataactccattttaaaatgagcaaagaatttatttcttataccaacaggtatatgaaaatatgctcaatatcactaataactgggaaaatacaaatcaaaatcatagtaaaatattacctgttttcatggtgctaatattacctgttctcccactgctaatgacatacccgagactgagtaatttataaataaaagagatttaattgactcatagttccacatggctggggaggtcttgcaatcatgacagaaggcaaatgggaagcaaagtcatgtcttatgtggtggcaggcagggggacttgtgcacaggaactcctatttatacaaccatcagatatcttgagacaagaacagtatggggctccctggtgtgattccgtcctgcgcggctgttctctggagcagcattcatttatcttcgtctgccttgtctcctacctaagtgtgtgtcgccacccgatggaagattcgatggacatggacatgagccccctgaggccccagaactatcttttcagttgtgaactaaaggccgacaaagatgatcactttaaggtggataatgatgaaaatgagaccagttatctttaagaacggtcagctcaggggctggtgcaaaggatgaactgcacattgttgaagcagaggccatgaatgacgaaggcagtccaattaaagtaacactggcaactttgaaaatgtctgtacagccaacggtttctcttgggggctttgaaataacaccaccagtggacttaaggttgaagtgtggttcagggccagtgcatattagtggacagcacttagtagctgtgaaggaaggtgcagagtcagaagatgaagaagaggaggatgtgaaactcttaagtatatctggaaagcagtctgcccctggaggtgggcagaaaaaagtaaaacttgctgctgctgctgatgatgatgatgatgaagatgatgatgatgatgatgacgaggaagctgaagaaaaagcgccagtgaagaaatctatacgagatactccagccaaaaatgcacaaaagtcaaatcagaatggaaaagactcaaaaccatcatcaacaccaagatcaaaaggacaagaatccttcaaaaaacaggaaaaatctcctaaaacaccaaaaggatctagttctgtagaagacattaaagcaaaaatgcaagcaagtatagaaaaacgtggttctcttcccaaagtggaaaccaagttcatcaattatgtgaagaatttcttctggatgactgaccaagaggctattcaagatctctggcagtggaggaagtctctttaagaaaatagtttaaacaatttgttaaaaattttccatcttatttcatttctgtaacagttgatatctggctgtcctttttatagtgcagagtgagaactttccctaccatgtttgataaatgttgtccaggttctattgccaagaatgtgttgtccaaaatgcctgtttagtttttaaagatggaactccaccctttgcttggttttaagtatgtatgggatgctatgataggacatagtagtagcagtggtcagacatggaaatggtggggagacaaaagtatacacgtgaaataaaactcagtattttaataaagtaaaaaaaaaaaaaaggtatggggaaaactgcccccataaagcaattgtctccacctggccctgccctttgcatgtggagattattacaattcaaggtgaaatttgggtggagacacaaccaaaccatattagatggctatatcaaaaagacaagaaataacaagcattggtgagagtgtggagaagacggaacccttgtacacagttggtgggaacacagtttggtgcagccattatagaaaacgtcatggaggttcctaaagaaattaaaaagagaactaccatatgagccagcaatcccttttccagatatacacccaaaggaaatgaaatcaccacctcataaagatatctgctttcctgtttattataacacatctttattcataatagccaagatacggaactaactgaagtgaccattaacagatgaatggataaagaaattgtcatatatataaaacacacacattatatacatacatacatatatatatatataaaaaatagaatattattcagccttgtaaaaagaaatcctgttatgttgggaacaagccccccaaaatctggccataaactcaccccaaaactggccataaacaaaatctctgcagcactgtgacatgttagt

SEQ ID NO: 415834 - DNA, 2907 bp, Homo sapiens
cactcatagaaactggaggcaaaatgcatgacagtaacaatgtggagaaagacattacaccatctgaattgcctgcaaacccaggttgtctgcattcaaaagagcattctattaaagctaccttaatttggcgcttatttttcttaatcatgtttctgacaatcatagtgtgtggaatggttgctgctttaagcgcaataagagctaactgccatcaagagccatcagtatgtcttcaagctgcatgcccagaaagctggattggttttcaaagaaagtgtttctatttttctgatgacaccaagaactggacatcaagtcagaggttttgtgactcacaagatgctgatcttgctcaggttgaaagcttccaggaactgaatttcctgttgagatataaaggcccatctgatcactggattgggctgagcagagaacaaggccaaccatggaaatggataaatggtactgaatggacaagacagtttcctatcctgggagcaggagagtgtgcctatttgaatgacaaaggtgccagtagtgccaggcactacacagagaggaagtggatttgttccaaatcagatatacatgtctagatgttacagcaaagccccaactaatctttagaagcatattggaactgataactccattttaaaatgagcaaagaatttatttcttataccaacaggtatatgaaaatatgctcaatatcactaataactgggaaaatacaaatcaaaatcatagtaaaatattacctgttttcatggtgctaatattacctgttctcccactgctaatgacatacccgagactgagtaatttataaataaaagagatttaattgactcatagttccacatggctggggaggtcttgcaatcatgacagaaggcaaatgggaagcaaagtcatgtcttatgtggtggcaggcagggggacttgtgcacaggaactcctatttatacaaccatcagatatcttgagacaagaacagtatggggctccctggtgtgattccgtcctgcgcggctgttctctggagcagcattcatttatcttcgtctgccttgtctcctacctaagtgtgtgtcgccacccgatggaagattcgatggacatggacatgagccccctgaggccccagaactatcttttcagttgtgaactaaaggccgacaaagatgatcactttaaggtggataatgatgaaaatgagaccagttatctttaagaacggtcagctcaggggctggtgcaaaggatgaactgcacattgttgaagcagaggccatgaatgacgaaggcagtccaattaaagtaacactggcaactttgaaaatgtctgtacagccaacggtttctcttgggggctttgaaataacaccaccagtggacttaaggttgaagtgtggttcagggccagtgcatattagtggacagcacttagtagctgtgaaggaaggtgcagagtcagaagatgaagaagaggaggatgtgaaactcttaagtatatctggaaagcagtctgcccctggaggtgggcagaaaaaagtaaaacttgctgctgctgctgatgatgatgatgatgaagatgatgatgatgatgatgacgaggaagctgaagaaaaagcgccagtgaagaaatctatacgagatactccagccaaaaatgcacaaaagtcaaatcagaatggaaaagactcaaaaccatcatcaacaccaagatcaaaaggacaagaatccttcaaaaaacaggaaaaatctcctaaaacaccaaaaggatctagttctgtagaagacattaaagcaaaaatgcaagcaagtatagaaaaacgtggttctcttcccaaagtggaaaccaagttcatcaattatgtgaagaatttcttctggatgactgaccaagaggctattcaagatctctggcagtggaggaagtctctttaagaaaatagtttaaacaatttgttaaaaattttccatcttatttcatttctgtaacagttgatatctggctgtcctttttatagtgcagagtgagaactttccctaccatgtttgataaatgttgtccaggttctattgccaagaatgtgttgtccaaaatgcctgtttagtttttaaagatggaactccaccctttgcttggttttaagtatgtatgggatgctatgataggacatagtagtagcagtggtcagacatggaaatggtggggagacaaaagtatacacgtgaaataaaactcagtattttaataaagtaaaaaaaaaaaaaaggtatggggaaaactgcccccataaagcaattgtctccacctggccctgccctttgcatgtggagattattacaattcaaggtgaaatttgggtggagacacaaccaaaccatattagatggctatatcaaaaagacaagaaataacaagcattggtgagagtgtggagaagacggaacccttgtacacagttggtgggaacacagtttggtgcagccattatagaaaacgtcatggaggttcctaaagaaattaaaaagagaactaccatatgagccagcaatcccttttccagatatacacccaaaggaaatgaaatcaccacctcataaagatatctgctttcctgtttattataacacatctttattcataatagccaagatacggaactaactgaagtgaccattaacagatgaatggataaagaaattgtcatatatataaaacacacacattatatacatacatacatatatatatatataaaaaatagaatattattcagccttgtaaaaagaaatcctgttatgttgggaacaagccccccaaaatctggccataaactcaccccaaaactggccataaacaaaatctctgcagcactgtgacatgttagt

SEQ ID NO: 415835 - DNA, 2803 bp, Homo sapiens
cactcatagaaactggaggcaaaatgcatgacagtaacaatgtggagaaagacattacaccatctgaattgcctgcaaacccaggttgtctgcattcaaaagagcattctattaaagctaccttaatttggcgcttatttttcttaatcatgtttctgacaatcatagtgtgtggaatggttgctgctttaagcgcaataagagctaactgccatcaagagccatcagtatgtcttcaagctgcatgcccagaaagctggattggttttcaaagaaagtgtttctatttttctgatgacaccaagaactggacatcaagtcagaggttttgtgactcacaagatgctgatcttgctcaggttgaaagcttccaggaactggtttcctatcctgggagcaggagagtgtgcctatttgaatgacaaaggtgccagtagtgccaggcactacacagagaggaagtggatttgttccaaatcagatatacatgtctagatgttacagcaaagccccaactaatctttagaagcatattggaactgataactccattttaaaatgagcaaagaatttatttcttataccaacaggtatatgaaaatatgctcaatatcactaataactgggaaaatacaaatcaaaatcatagtaaaatattacctgttttcatggtgctaatattacctgttctcccactgctaatgacatacccgagactgagtaatttataaataaaagagatttaattgactcatagttccacatggctggggaggtcttgcaatcatgacagaaggcaaatgggaagcaaagtcatgtcttatgtggtggcaggcagggggacttgtgcacaggaactcctatttatacaaccatcagatatcttgagacaagaacagtatggggctccctggtgtgattccgtcctgcgcggctgttctctggagcagcattcatttatcttcgtctgccttgtctcctacctaagtgtgtgtcgccacccgatggaagattcgatggacatggacatgagccccctgaggccccagaactatcttttcagttgtgaactaaaggccgacaaagatgatcactttaaggtggataatgatgaaaatgagaccagttatctttaagaacggtcagctcaggggctggtgcaaaggatgaactgcacattgttgaagcagaggccatgaatgacgaaggcagtccaattaaagtaacactggcaactttgaaaatgtctgtacagccaacggtttctcttgggggctttgaaataacaccaccagtggacttaaggttgaagtgtggttcagggccagtgcatattagtggacagcacttagtagctgtgaaggaaggtgcagagtcagaagatgaagaagaggaggatgtgaaactcttaagtatatctggaaagcagtctgcccctggaggtgggcagaaaaaagtaaaacttgctgctgctgctgatgatgatgatgatgaagatgatgatgatgatgatgacgaggaagctgaagaaaaagcgccagtgaagaaatctatacgagatactccagccaaaaatgcacaaaagtcaaatcagaatggaaaagactcaaaaccatcatcaacaccaagatcaaaaggacaagaatccttcaaaaaacaggaaaaatctcctaaaacaccaaaaggatctagttctgtagaagacattaaagcaaaaatgcaagcaagtatagaaaaacgtggttctcttcccaaagtggaaaccaagttcatcaattatgtgaagaatttcttctggatgactgaccaagaggctattcaagatctctggcagtggaggaagtctctttaagaaaatagtttaaacaatttgttaaaaattttccatcttatttcatttctgtaacagttgatatctggctgtcctttttatagtgcagagtgagaactttccctaccatgtttgataaatgttgtccaggttctattgccaagaatgtgttgtccaaaatgcctgtttagtttttaaagatggaactccaccctttgcttggttttaagtatgtatgggatgctatgataggacatagtagtagcagtggtcagacatggaaatggtggggagacaaaagtatacacgtgaaataaaactcagtattttaataaagtaaaaaaaaaaaaaaggtatggggaaaactgcccccataaagcaattgtctccacctggccctgccctttgcatgtggagattattacaattcaaggtgaaatttgggtggagacacaaccaaaccatattagatggctatatcaaaaagacaagaaataacaagcattggtgagagtgtggagaagacggaacccttgtacacagttggtgggaacacagtttggtgcagccattatagaaaacgtcatggaggttcctaaagaaattaaaaagagaactaccatatgagccagcaatcccttttccagatatacacccaaaggaaatgaaatcaccacctcataaagatatctgctttcctgtttattataacacatctttattcataatagccaagatacggaactaactgaagtgaccattaacagatgaatggataaagaaattgtcatatatataaaacacacacattatatacatacatacatatatatatatataaaaaatagaatattattcagccttgtaaaaagaaatcctgttatgttgggaacaagccccccaaaatctggccataaactcaccccaaaactggccataaacaaaatctctgcagcactgtgacatgttagt

SEQ ID NO: 415836 - DNA, 2989 bp, Homo sapiens
cactcatagaaactggaggcaaaatgcatgacagtaacaatgtggagaaagacattacaccatctgaattgcctgcaaacccaggttgtctgcattcaaaagagcattctattaaagctaccttaatttggcgcttatttttcttaatcatgtttctgacaatcatagtgtgtggaatggttgctgctttaagcgcaataagagctaactgccatcaagagccatcagtatgtcttcaagctgcatgcccagaaagctggattggttttcaaagaaagtgtttctatttttctgatgacaccaagaactggacatcaagtcagaggttttgtgactcacaagatgctgatcttgctcaggttgaaagcttccaggaactgaatttcctgttgagatataaaggcccatctgatcactggattgggctgagcagagaacaaggccaaccatggaaatggataaatggtactgaatggacaagacagttagtcatgaaagaagatggtgccaacttgtatgttgcaaaggtttcacaagttcctcgaatgaatccaagacctgtcatggtttcctatcctgggagcaggagagtgtgcctatttgaatgacaaaggtgccagtagtgccaggcactacacagagaggaagtggatttgttccaaatcagatatacatgtctagatgttacagcaaagccccaactaatctttagaagcatattggaactgataactccattttaaaatgagcaaagaatttatttcttataccaacaggtatatgaaaatatgctcaatatcactaataactgggaaaatacaaatcaaaatcatagtaaaatattacctgttttcatggtgctaatattacctgttctcccactgctaatgacatacccgagactgagtaatttataaataaaagagatttaattgactcatagttccacatggctggggaggtcttgcaatcatgacagaaggcaaatgggaagcaaagtcatgtcttatgtggtggcaggcagggggacttgtgcacaggaactcctatttatacaaccatcagatatcttgagacaagaacagtatggggctccctggtgtgattccgtcctgcgcggctgttctctggagcagcattcatttatcttcgtctgccttgtctcctacctaagtgtgtgtcgccacccgatggaagattcgatggacatggacatgagccccctgaggccccagaactatcttttcagttgtgaactaaaggccgacaaagatgatcactttaaggtggataatgatgaaaatgagaccagttatctttaagaacggtcagctcaggggctggtgcaaaggatgaactgcacattgttgaagcagaggccatgaatgacgaaggcagtccaattaaagtaacactggcaactttgaaaatgtctgtacagccaacggtttctcttgggggctttgaaataacaccaccagtggacttaaggttgaagtgtggttcagggccagtgcatattagtggacagcacttagtagctgtgaaggaaggtgcagagtcagaagatgaagaagaggaggatgtgaaactcttaagtatatctggaaagcagtctgcccctggaggtgggcagaaaaaagtaaaacttgctgctgctgctgatgatgatgatgatgaagatgatgatgatgatgatgacgaggaagctgaagaaaaagcgccagtgaagaaatctatacgagatactccagccaaaaatgcacaaaagtcaaatcagaatggaaaagactcaaaaccatcatcaacaccaagatcaaaaggacaagaatccttcaaaaaacaggaaaaatctcctaaaacaccaaaaggatctagttctgtagaagacattaaagcaaaaatgcaagcaagtatagaaaaacgtggttctcttcccaaagtggaaaccaagttcatcaattatgtgaagaatttcttctggatgactgaccaagaggctattcaagatctctggcagtggaggaagtctctttaagaaaatagtttaaacaatttgttaaaaattttccatcttatttcatttctgtaacagttgatatctggctgtcctttttatagtgcagagtgagaactttccctaccatgtttgataaatgttgtccaggttctattgccaagaatgtgttgtccaaaatgcctgtttagtttttaaagatggaactccaccctttgcttggttttaagtatgtatgggatgctatgataggacatagtagtagcagtggtcagacatggaaatggtggggagacaaaagtatacacgtgaaataaaactcagtattttaataaagtaaaaaaaaaaaaaaggtatggggaaaactgcccccataaagcaattgtctccacctggccctgccctttgcatgtggagattattacaattcaaggtgaaatttgggtggagacacaaccaaaccatattagatggctatatcaaaaagacaagaaataacaagcattggtgagagtgtggagaagacggaacccttgtacacagttggtgggaacacagtttggtgcagccattatagaaaacgtcatggaggttcctaaagaaattaaaaagagaactaccatatgagccagcaatcccttttccagatatacacccaaaggaaatgaaatcaccacctcataaagatatctgctttcctgtttattataacacatctttattcataatagccaagatacggaactaactgaagtgaccattaacagatgaatggataaagaaattgtcatatatataaaacacacacattatatacatacatacatatatatatatataaaaaatagaatattattcagccttgtaaaaagaaatcctgttatgttgggaacaagccccccaaaatctggccataaactcaccccaaaactggccataaacaaaatctctgcagcactgtgacatgttagt

SEQ ID NO: 415837 - DNA, 3068 bp, Homo sapiens
accgatgaatgggattagtgcccttacaaaaggggcccaccaaagctgccttgttccttctactatgtgaggacacatctagaagttaccatcaatgaaccagaaagtgggcccttaccaggcaccaaatctgccagcactctgatcttggacttccagcctcctgaactgttgtctgcattcaaaagagcattctattaaagctaccttaatttggcgcttatttttcttaatcatgtttctgacaatcatagtgtgtggaatggttgctgctttaagcgcaataagagctaactgccatcaagagccatcagtatgtcttcaagctgcatgcccagaaagctggattggttttcaaagaaagtgtttctatttttctgatgacaccaagaactggacatcaagtcagaggttttgtgactcacaagatgctgatcttgctcaggttgaaagcttccaggaactggtaagaaaatagttctggccagaatcaaagattcagccctacaaggatatgttttcctgtgaaattatctaagagaatttcctgttgagatataaaggcccatctgatcactggattgggctgagcagagaacaaggccaaccatggaaatggataaatggtactgaatggacaagacagtttcctatcctgggagcaggagagtgtgcctatttgaatgacaaaggtgccagtagtgccaggcactacacagagaggaagtggatttgttccaaatcagatatacatgtctagatgttacagcaaagccccaactaatctttagaagcatattggaactgataactccattttaaaatgagcaaagaatttatttcttataccaacaggtatatgaaaatatgctcaatatcactaataactgggaaaatacaaatcaaaatcatagtaaaatattacctgttttcatggtgctaatattacctgttctcccactgctaatgacatacccgagactgagtaatttataaataaaagagatttaattgactcatagttccacatggctggggaggtcttgcaatcatgacagaaggcaaatgggaagcaaagtcatgtcttatgtggtggcaggcagggggacttgtgcacaggaactcctatttatacaaccatcagatatcttgagacaagaacagtatggggctccctggtgtgattccgtcctgcgcggctgttctctggagcagcattcatttatcttcgtctgccttgtctcctacctaagtgtgtgtcgccacccgatggaagattcgatggacatggacatgagccccctgaggccccagaactatcttttcagttgtgaactaaaggccgacaaagatgatcactttaaggtggataatgatgaaaatgagaccagttatctttaagaacggtcagctcaggggctggtgcaaaggatgaactgcacattgttgaagcagaggccatgaatgacgaaggcagtccaattaaagtaacactggcaactttgaaaatgtctgtacagccaacggtttctcttgggggctttgaaataacaccaccagtggacttaaggttgaagtgtggttcagggccagtgcatattagtggacagcacttagtagctgtgaaggaaggtgcagagtcagaagatgaagaagaggaggatgtgaaactcttaagtatatctggaaagcagtctgcccctggaggtgggcagaaaaaagtaaaacttgctgctgctgctgatgatgatgatgatgaagatgatgatgatgatgatgacgaggaagctgaagaaaaagcgccagtgaagaaatctatacgagatactccagccaaaaatgcacaaaagtcaaatcagaatggaaaagactcaaaaccatcatcaacaccaagatcaaaaggacaagaatccttcaaaaaacaggaaaaatctcctaaaacaccaaaaggatctagttctgtagaagacattaaagcaaaaatgcaagcaagtatagaaaaacgtggttctcttcccaaagtggaaaccaagttcatcaattatgtgaagaatttcttctggatgactgaccaagaggctattcaagatctctggcagtggaggaagtctctttaagaaaatagtttaaacaatttgttaaaaattttccatcttatttcatttctgtaacagttgatatctggctgtcctttttatagtgcagagtgagaactttccctaccatgtttgataaatgttgtccaggttctattgccaagaatgtgttgtccaaaatgcctgtttagtttttaaagatggaactccaccctttgcttggttttaagtatgtatgggatgctatgataggacatagtagtagcagtggtcagacatggaaatggtggggagacaaaagtatacacgtgaaataaaactcagtattttaataaagtaaaaaaaaaaaaaaggtatggggaaaactgcccccataaagcaattgtctccacctggccctgccctttgcatgtggagattattacaattcaaggtgaaatttgggtggagacacaaccaaaccatattagatggctatatcaaaaagacaagaaataacaagcattggtgagagtgtggagaagacggaacccttgtacacagttggtgggaacacagtttggtgcagccattatagaaaacgtcatggaggttcctaaagaaattaaaaagagaactaccatatgagccagcaatcccttttccagatatacacccaaaggaaatgaaatcaccacctcataaagatatctgctttcctgtttattataacacatctttattcataatagccaagatacggaactaactgaagtgaccattaacagatgaatggataaagaaattgtcatatatataaaacacacacattatatacatacatacatatatatatatataaaaaatagaatattattcagccttgtaaaaagaaatcctgttatgttgggaacaagccccccaaaatctggccataaactcaccccaaaactggccataaacaaaatctctgcagcactgtgacatgttagt

SEQ ID NO: 415838 - DNA, 2717 bp, Homo sapiens
gatcttggtggtagtagcaaatattcaaacgagaactttgaaggctgatgggagaagaggcgcatcttgctcccatcagccagctaaggctttggatgtacttgaaagaatattatgcttacagatatgaaataggtttgattcaggactttgcagtattcctatagttgatttataacatctcctgctaagcaaagcccactgactaattagtcaccactacacaaggaaaaacagcattatttttagaggctgaattaatgttagttttctcattttctcatcttcattctctctgctgttgaagaaatgttcagtggccaactgattctgcttcttctcttgcaggtttcctatcctgggagcaggagagtgtgcctatttgaatgacaaaggtgccagtagtgccaggcactacacagagaggaagtggatttgttccaaatcagatatacatgtctagatgttacagcaaagccccaactaatctttagaagcatattggaactgataactccattttaaaatgagcaaagaatttatttcttataccaacaggtatatgaaaatatgctcaatatcactaataactgggaaaatacaaatcaaaatcatagtaaaatattacctgttttcatggtgctaatattacctgttctcccactgctaatgacatacccgagactgagtaatttataaataaaagagatttaattgactcatagttccacatggctggggaggtcttgcaatcatgacagaaggcaaatgggaagcaaagtcatgtcttatgtggtggcaggcagggggacttgtgcacaggaactcctatttatacaaccatcagatatcttgagacaagaacagtatggggctccctggtgtgattccgtcctgcgcggctgttctctggagcagcattcatttatcttcgtctgccttgtctcctacctaagtgtgtgtcgccacccgatggaagattcgatggacatggacatgagccccctgaggccccagaactatcttttcagttgtgaactaaaggccgacaaagatgatcactttaaggtggataatgatgaaaatgagaccagttatctttaagaacggtcagctcaggggctggtgcaaaggatgaactgcacattgttgaagcagaggccatgaatgacgaaggcagtccaattaaagtaacactggcaactttgaaaatgtctgtacagccaacggtttctcttgggggctttgaaataacaccaccagtggacttaaggttgaagtgtggttcagggccagtgcatattagtggacagcacttagtagctgtgaaggaaggtgcagagtcagaagatgaagaagaggaggatgtgaaactcttaagtatatctggaaagcagtctgcccctggaggtgggcagaaaaaagtaaaacttgctgctgctgctgatgatgatgatgatgaagatgatgatgatgatgatgacgaggaagctgaagaaaaagcgccagtgaagaaatctatacgagatactccagccaaaaatgcacaaaagtcaaatcagaatggaaaagactcaaaaccatcatcaacaccaagatcaaaaggacaagaatccttcaaaaaacaggaaaaatctcctaaaacaccaaaaggatctagttctgtagaagacattaaagcaaaaatgcaagcaagtatagaaaaacgtggttctcttcccaaagtggaaaccaagttcatcaattatgtgaagaatttcttctggatgactgaccaagaggctattcaagatctctggcagtggaggaagtctctttaagaaaatagtttaaacaatttgttaaaaattttccatcttatttcatttctgtaacagttgatatctggctgtcctttttatagtgcagagtgagaactttccctaccatgtttgataaatgttgtccaggttctattgccaagaatgtgttgtccaaaatgcctgtttagtttttaaagatggaactccaccctttgcttggttttaagtatgtatgggatgctatgataggacatagtagtagcagtggtcagacatggaaatggtggggagacaaaagtatacacgtgaaataaaactcagtattttaataaagtaaaaaaaaaaaaaaggtatggggaaaactgcccccataaagcaattgtctccacctggccctgccctttgcatgtggagattattacaattcaaggtgaaatttgggtggagacacaaccaaaccatattagatggctatatcaaaaagacaagaaataacaagcattggtgagagtgtggagaagacggaacccttgtacacagttggtgggaacacagtttggtgcagccattatagaaaacgtcatggaggttcctaaagaaattagaaatgaaatcaccacctcataaagatatctgctttcctgtttattataacacatctttattcataatagccaagatacggaactaactgaagtgaccattaacagatgaatggataaagaaattgtcatatatataaaacacacacattatatacatacatacatatatatatatataaaaaatagaatattattcagccttgtaaaaagaaatcctgttatgttgggaacaagccccccaaaatctggccataaactcaccccaaaactggccataaacaaaatctctgcagcactgtgacatgttagt

SEQ ID NO: 415839 - DNA, 3091 bp, Homo sapiens
cactcatagaaactggaggcaaaatgcatgacagtaacaatgtggagaaagacattacaccatctgaattgcctgcaaacccaggttgtctgcattcaaaagagcattctattaaagctaccttaatttggcgcttatttttcttaatcatgtttctgacaatcatagtgtgtggaatggttgctgctttaagcgcaataagagctaactgccatcaagagccatcagtatgtcttcaagctgcatgcccagaaagctggattggttttcaaagaaagtgtttctatttttctgatgacaccaagaactggacatcaagtcagaggttttgtgactcacaagatgctgatcttgctcaggttgaaagcttccaggaactgaatttcctgttgagatataaaggcccatctgatcactggattgggctgagcagagaacaaggccaaccatggaaatggataaatggtactgaatggacaagacagtaagttctaaaaatctggcagtaatatttgtatttgaatttactttgcattaaatctgaagtgttctctagttacatgctttaaaaaattctcattttaaggttagtcatgaaagaagatggtgccaacttgtatgttgcaaaggtttcacaagttcctcgaatgaatccaagacctgtcatggtttcctatcctgggagcaggagagtgtgcctatttgaatgacaaaggtgccagtagtgccaggcactacacagagaggaagtggatttgttccaaatcagatatacatgtctagatgttacagcaaagccccaactaatctttagaagcatattggaactgataactccattttaaaatgagcaaagaatttatttcttataccaacaggtatatgaaaatatgctcaatatcactaataactgggaaaatacaaatcaaaatcatagtaaaatattacctgttttcatggtgctaatattacctgttctcccactgctaatgacatacccgagactgagtaatttataaataaaagagatttaattgactcatagttccacatggctggggaggtcttgcaatcatgacagaaggcaaatgggaagcaaagtcatgtcttatgtggtggcaggcagggggacttgtgcacaggaactcctatttatacaaccatcagatatcttgagacaagaacagtatggggctccctggtgtgattccgtcctgcgcggctgttctctggagcagcattcatttatcttcgtctgccttgtctcctacctaagtgtgtgtcgccacccgatggaagattcgatggacatggacatgagccccctgaggccccagaactatcttttcagttgtgaactaaaggccgacaaagatgatcactttaaggtggataatgatgaaaatgagaccagttatctttaagaacggtcagctcaggggctggtgcaaaggatgaactgcacattgttgaagcagaggccatgaatgacgaaggcagtccaattaaagtaacactggcaactttgaaaatgtctgtacagccaacggtttctcttgggggctttgaaataacaccaccagtggacttaaggttgaagtgtggttcagggccagtgcatattagtggacagcacttagtagctgtgaaggaaggtgcagagtcagaagatgaagaagaggaggatgtgaaactcttaagtatatctggaaagcagtctgcccctggaggtgggcagaaaaaagtaaaacttgctgctgctgctgatgatgatgatgatgaagatgatgatgatgatgatgacgaggaagctgaagaaaaagcgccagtgaagaaatctatacgagatactccagccaaaaatgcacaaaagtcaaatcagaatggaaaagactcaaaaccatcatcaacaccaagatcaaaaggacaagaatccttcaaaaaacaggaaaaatctcctaaaacaccaaaaggatctagttctgtagaagacattaaagcaaaaatgcaagcaagtatagaaaaacgtggttctcttcccaaagtggaaaccaagttcatcaattatgtgaagaatttcttctggatgactgaccaagaggctattcaagatctctggcagtggaggaagtctctttaagaaaatagtttaaacaatttgttaaaaattttccatcttatttcatttctgtaacagttgatatctggctgtcctttttatagtgcagagtgagaactttccctaccatgtttgataaatgttgtccaggttctattgccaagaatgtgttgtccaaaatgcctgtttagtttttaaagatggaactccaccctttgcttggttttaagtatgtatgggatgctatgataggacatagtagtagcagtggtcagacatggaaatggtggggagacaaaagtatacacgtgaaataaaactcagtattttaataaagtaaaaaaaaaaaaaaggtatggggaaaactgcccccataaagcaattgtctccacctggccctgccctttgcatgtggagattattacaattcaaggtgaaatttgggtggagacacaaccaaaccatattagatggctatatcaaaaagacaagaaataacaagcattggtgagagtgtggagaagacggaacccttgtacacagttggtgggaacacagtttggtgcagccattatagaaaacgtcatggaggttcctaaagaaattaaaaagagaactaccatatgagccagcaatcccttttccagatatacacccaaaggaaatgaaatcaccacctcataaagatatctgctttcctgtttattataacacatctttattcataatagccaagatacggaactaactgaagtgaccattaacagatgaatggataaagaaattgtcatatatataaaacacacacattatatacatacatacatatatatatatataaaaaatagaatattattcagccttgtaaaaagaaatcctgttatgttgggaacaagccccccaaaatctggccataaactcaccccaaaactggccataaacaaaatctctgcagcactgtgacatgttagt

SEQ ID NO: 415840 - DNA, 2621 bp, Homo sapiens
tatgagtagttaagaatatagcatagcagcaacatttctgggagaggatgggttatgttagattaatgaatatcatctctgtgttttctgaaagaatttcctgttgagatataaaggcccatctgatcactggattgggctgagcagagaacaaggccaaccatggaaatggataaatggtactgaatggacaagacagtttcctatcctgggagcaggagagtgtgcctatttgaatgacaaaggtgccagtagtgccaggcactacacagagaggaagtggatttgttccaaatcagatatacatgtctagatgttacagcaaagccccaactaatctttagaagcatattggaactgataactccattttaaaatgagcaaagaatttatttcttataccaacaggtatatgaaaatatgctcaatatcactaataactgggaaaatacaaatcaaaatcatagtaaaatattacctgttttcatggtgctaatattacctgttctcccactgctaatgacatacccgagactgagtaatttataaataaaagagatttaattgactcatagttccacatggctggggaggtcttgcaatcatgacagaaggcaaatgggaagcaaagtcatgtcttatgtggtggcaggcagggggacttgtgcacaggaactcctatttatacaaccatcagatatcttgagacaagaacagtatggggctccctggtgtgattccgtcctgcgcggctgttctctggagcagcattcatttatcttcgtctgccttgtctcctacctaagtgtgtgtcgccacccgatggaagattcgatggacatggacatgagccccctgaggccccagaactatcttttcagttgtgaactaaaggccgacaaagatgatcactttaaggtggataatgatgaaaatgagaccagttatctttaagaacggtcagctcaggggctggtgcaaaggatgaactgcacattgttgaagcagaggccatgaatgacgaaggcagtccaattaaagtaacactggcaactttgaaaatgtctgtacagccaacggtttctcttgggggctttgaaataacaccaccagtggacttaaggttgaagtgtggttcagggccagtgcatattagtggacagcacttagtagctgtgaaggaaggtgcagagtcagaagatgaagaagaggaggatgtgaaactcttaagtatatctggaaagcagtctgcccctggaggtgggcagaaaaaagtaaaacttgctgctgctgctgatgatgatgatgatgaagatgatgatgatgatgatgacgaggaagctgaagaaaaagcgccagtgaagaaatctatacgagatactccagccaaaaatgcacaaaagtcaaatcagaatggaaaagactcaaaaccatcatcaacaccaagatcaaaaggacaagaatccttcaaaaaacaggaaaaatctcctaaaacaccaaaaggatctagttctgtagaagacattaaagcaaaaatgcaagcaagtatagaaaaacgtggttctcttcccaaagtggaaaccaagttcatcaattatgtgaagaatttcttctggatgactgaccaagaggctattcaagatctctggcagtggaggaagtctctttaagaaaatagtttaaacaatttgttaaaaattttccatcttatttcatttctgtaacagttgatatctggctgtcctttttatagtgcagagtgagaactttccctaccatgtttgataaatgttgtccaggttctattgccaagaatgtgttgtccaaaatgcctgtttagtttttaaagatggaactccaccctttgcttggttttaagtatgtatgggatgctatgataggacatagtagtagcagtggtcagacatggaaatggtggggagacaaaagtatacacgtgaaataaaactcagtattttaataaagtaaaaaaaaaaaaaaggtatggggaaaactgcccccataaagcaattgtctccacctggccctgccctttgcatgtggagattattacaattcaaggtgaaatttgggtggagacacaaccaaaccatattagatggctatatcaaaaagacaagaaataacaagcattggtgagagtgtggagaagacggaacccttgtacacagttggtgggaacacagtttggtgcagccattatagaaaacgtcatggaggttcctaaagaaattaaaaagagaactaccatatgagccagcaatcccttttccagatatacacccaaaggaaatgaaatcaccacctcataaagatatctgctttcctgtttattataacacatctttattcataatagccaagatacggaactaactgaagtgaccattaacagatgaatggataaagaaattgtcatatatataaaacacacacattatatacatacatacatatatatatatataaaaaatagaatattattcagccttgtaaaaagaaatcctgttatgttgggaacaagccccccaaaatctggccataaactcaccccaaaactggccataaacaaaatctctgcagcactgtgacatgttagt

SEQ ID NO: 415841 - DNA, 2580 bp, Homo sapiens
taaaatggttttttgtttgtttgtatttttgagagacagggtcttactctgttacccaggctggagtgcagtagtaccatcgtggctcactgcagccttgacttccctggctcaagtgagcctcccatctcagcctcctgagtagctgggactacaggtttcctatcctgggagcaggagagtgtgcctatttgaatgacaaaggtgccagtagtgccaggcactacacagagaggaagtggatttgttccaaatcagatatacatgtctagatgttacagcaaagccccaactaatctttagaagcatattggaactgataactccattttaaaatgagcaaagaatttatttcttataccaacaggtatatgaaaatatgctcaatatcactaataactgggaaaatacaaatcaaaatcatagtaaaatattacctgttttcatggtgctaatattacctgttctcccactgctaatgacatacccgagactgagtaatttataaataaaagagatttaattgactcatagttccacatggctggggaggtcttgcaatcatgacagaaggcaaatgggaagcaaagtcatgtcttatgtggtggcaggcagggggacttgtgcacaggaactcctatttatacaaccatcagatatcttgagacaagaacagtatggggctccctggtgtgattccgtcctgcgcggctgttctctggagcagcattcatttatcttcgtctgccttgtctcctacctaagtgtgtgtcgccacccgatggaagattcgatggacatggacatgagccccctgaggccccagaactatcttttcagttgtgaactaaaggccgacaaagatgatcactttaaggtggataatgatgaaaatgagaccagttatctttaagaacggtcagctcaggggctggtgcaaaggatgaactgcacattgttgaagcagaggccatgaatgacgaaggcagtccaattaaagtaacactggcaactttgaaaatgtctgtacagccaacggtttctcttgggggctttgaaataacaccaccagtggacttaaggttgaagtgtggttcagggccagtgcatattagtggacagcacttagtagctgtgaaggaaggtgcagagtcagaagatgaagaagaggaggatgtgaaactcttaagtatatctggaaagcagtctgcccctggaggtgggcagaaaaaagtaaaacttgctgctgctgctgatgatgatgatgatgaagatgatgatgatgatgatgacgaggaagctgaagaaaaagcgccagtgaagaaatctatacgagatactccagccaaaaatgcacaaaagtcaaatcagaatggaaaagactcaaaaccatcatcaacaccaagatcaaaaggacaagaatccttcaaaaaacaggaaaaatctcctaaaacaccaaaaggatctagttctgtagaagacattaaagcaaaaatgcaagcaagtatagaaaaacgtggttctcttcccaaagtggaaaccaagttcatcaattatgtgaagaatttcttctggatgactgaccaagaggctattcaagatctctggcagtggaggaagtctctttaagaaaatagtttaaacaatttgttaaaaattttccatcttatttcatttctgtaacagttgatatctggctgtcctttttatagtgcagagtgagaactttccctaccatgtttgataaatgttgtccaggttctattgccaagaatgtgttgtccaaaatgcctgtttagtttttaaagatggaactccaccctttgcttggttttaagtatgtatgggatgctatgataggacatagtagtagcagtggtcagacatggaaatggtggggagacaaaagtatacacgtgaaataaaactcagtattttaataaagtaaaaaaaaaaaaaaggtatggggaaaactgcccccataaagcaattgtctccacctggccctgccctttgcatgtggagattattacaattcaaggtgaaatttgggtggagacacaaccaaaccatattagatggctatatcaaaaagacaagaaataacaagcattggtgagagtgtggagaagacggaacccttgtacacagttggtgggaacacagtttggtgcagccattatagaaaacgtcatggaggttcctaaagaaattaaaaagagaactaccatatgagccagcaatcccttttccagatatacacccaaaggaaatgaaatcaccacctcataaagatatctgctttcctgtttattataacacatctttattcataatagccaagatacggaactaactgaagtgaccattaacagatgaatggataaagaaattgtcatatatataaaacacacacattatatacatacatacatatatatatatataaaaaatagaatattattcagccttgtaaaaagaaatcctgttatgttgggaacaagccccccaaaatctggccataaactcaccccaaaactggccataaacaaaatctctgcagcactgtgacatgttagt

SEQ ID NO: 415842 - DNA, 936 bp, Homo sapiens
cactcatagaaactggaggcaaaatgcatgacagtaacaatgtggagaaagacattacaccatctgaattgcctgcaaacccaggttgtctgcattcaaaagagcattctattaaagctaccttaatttggcgcttatttttcttaatcatgtttctgacaatcatagtgtgtggaatggttgctgctttaagcgcaataagagctaactgccatcaagagccatcagtatgtcttcaagctgcatgcccagaaagctggattggttttcaaagaaagtgtttctatttttctgatgacaccaagaactggacatcaagtcagaggttttgtgactcacaagatgctgatcttgctcaggttgaaagcttccaggaactgaatttcctgttgagatataaaggcccatctgatcactggattgggctgagcagagaacaaggccaaccatggaaatggataaatggtactgaatggacaagacagttagtcatgaaagaagatggtgccaacttgtatgttgcaaaggtttcacaagttcctcgaatgaatccaagacctgtcatggtttcctatcctgggagcaggagagtgtgcctatttgaatgacaaaggtgccagtagtgccaggcactacacagagaggaagtggatttgttccaaatcagatatacatgtctagatgttacagcaaagccccaactaatctttagaagcatattggaactgataactccattttaaaatgagcaaagaatttatttcttataccaacaggtatatgaaaatatgctcaatatcactaataactgggaaaatacaaatcaaaatcatagtaaaatattacctgttttcatggtgctaatattacctgttctcccactgctaatgacatacccgagactgagtaatttataaataaaagagatttaattga

SEQ ID NO: 415843 - DNA, 718 bp, Homo sapiens
gatcttggtggtagtagcaaatattcaaacgagaactttgaaggctgatgggagaagaggcgcatcttgctcccatcagccagctaaggctttggatgtacttgaaagaatattatgcttacagatatgaaataggtttgattcaggactttgcagtattcctatagttgatttataacatctcctgctaagcaaagcccactgactaattagtcaccactacacaaggaaaaacagcattatttttagaggctgaattaatgttagttttctcattttctcatcttcattctctctgctgttgaagaaatgttcagtggccaactgattctgcttcttctcttgcaggtttcctatcctgggagcaggagagtgtgcctatttgaatgacaaaggtgccagtagtgccaggcactacacagagaggaagtggatttgttccaaatcagatatacatgtctagatgttacagcaaagccccaactaatctttagaagcatattggaactgataactccattttaaaatgagcaaagaatttatttcttataccaacaggtatatgaaaatatgctcaatatcactaataactgggaaaatacaaatcaaaatcatagtaaaatattacctgttttcatggtgctaatattacctgttctcccactgctaatgacatacccgagactgagtaatttataaataaaagagatttaattga

SEQ ID NO: 415844 - DNA, 750 bp, Homo sapiens
cactcatagaaactggaggcaaaatgcatgacagtaacaatgtggagaaagacattacaccatctgaattgcctgcaaacccaggttgtctgcattcaaaagagcattctattaaagctaccttaatttggcgcttatttttcttaatcatgtttctgacaatcatagtgtgtggaatggttgctgctttaagcgcaataagagctaactgccatcaagagccatcagtatgtcttcaagctgcatgcccagaaagctggattggttttcaaagaaagtgtttctatttttctgatgacaccaagaactggacatcaagtcagaggttttgtgactcacaagatgctgatcttgctcaggttgaaagcttccaggaactggtttcctatcctgggagcaggagagtgtgcctatttgaatgacaaaggtgccagtagtgccaggcactacacagagaggaagtggatttgttccaaatcagatatacatgtctagatgttacagcaaagccccaactaatctttagaagcatattggaactgataactccattttaaaatgagcaaagaatttatttcttataccaacaggtatatgaaaatatgctcaatatcactaataactgggaaaatacaaatcaaaatcatagtaaaatattacctgttttcatggtgctaatattacctgttctcccactgctaatgacatacccgagactgagtaatttataaataaaagagatttaattga

SEQ ID NO: 415845 - DNA, 892 bp, Homo sapiens
accgatgaatgggattagtgcccttacaaaaggggcccaccaaagctgccttgttccttctactatgtgaggacacatctagaagttaccatcaatgaaccagaaagtgggcccttaccaggcaccaaatctgccagcactctgatcttggacttccagcctcctgaactgttgtctgcattcaaaagagcattctattaaagctaccttaatttggcgcttatttttcttaatcatgtttctgacaatcatagtgtgtggaatggttgctgctttaagcgcaataagagctaactgccatcaagagccatcagtatgtcttcaagctgcatgcccagaaagctggattggttttcaaagaaagtgtttctatttttctgatgacaccaagaactggacatcaagtcagaggttttgtgactcacaagatgctgatcttgctcaggttgaaagcttccaggaactggtaagaaaatagttctggccagaatcaaagattcagccctacaaggatatgttttcctgtgaaattatctaagagaatttcctgttgagatataaaggcccatctgatcactggattgggctgagcagagaacaaggccaaccatggaaatggataaatggtactgaatggacaagacagttagtcatgaaagaagatggtgccaacttgtatgttgcaaaggtttcacaagttcctcgaatgaatccaagacctgtcatggtgaggtagactgactgtgaacttggctccaggcttatctatgtcattttcaaacactttcattttaagcaaaccatacaatatctttaagtcttgttccttaccttcaacaacaaaattaaattgcacttgtcctcctgatttcacggggttgatgtgaggaac

SEQ ID NO: 415846 - DNA, 283 bp, Homo sapiens
ggtcatttgcatcctctagtgaaaagcgaaggaattaaataaaaataacattttgatgcttaatgtttctggcagtattatgtctgtatttaattgttaaaatgtttttcaataattttttccaggttgtctgcattcaaaagagcattctattaaagctaccttaatttggcgcttatttttcttaatcatgtttctgacaatcatagtgtgtggaatggttgctgctttaagcggtaagtgaactgtaatctttattcatctagagagaattatacttgta

SEQ ID NO: 415847 - DNA, 560 bp, Homo sapiens
  misc_feature (39)..(39): n is a, c, g, or t
  misc_feature (42)..(42): n is a, c, g, or t
  misc_feature (51)..(51): n is a, c, g, or t
  misc_feature (61)..(61): n is a, c, g, or t
  misc_feature (289)..(289): n is a, c, g, or t
  misc_feature (293)..(293): n is a, c, g, or t
  misc_feature (298)..(298): n is a, c, g, or t
  misc_feature (333)..(333): n is a, c, g, or t
  misc_feature (552)..(552): n is a, c, g, or t
gtctggccggagcccttgggtgaaattgttaggcgtggnagnagggcagtngaagttcttnccagactcggtgctgtacccgccaggctcacaggacacctgcatgcccaaggcactccaccgtatgtgatcaacctggatccagcagtacatgaagttccctttcctgccaatattgatattcgtgatactgtaaagtataaagaagtaatgaaacaatatggacttggacccaatggcggcatagtgacctcactcaatctctttgctaccagatttgatcaggtgntganttttnttgttaagtcttagatcatgtctaaatattttttntttgacacacctggacagattgaggtatttatctggtcagctttttggacaattattcatcttgatagctcttttgcatcctcttttccaacatttgtcatcttatgttatggactcatcgagtatgtaccaactctaagttgactcttcttagttccaactatgtctctttttgccttgtcagtcattctttattacaaatatcaagactgctctttncatttgtg

SEQ ID NO: 415848 - DNA, 308 bp, Homo sapiens
tggcgcttcgagtggcgcatcgggtggctcctgggggtgggctgagcagtctgttttagaaagccctccatgtgattctgatgcatagtagcctatgacataattccagaccaggtgaatctcaagatactaatcctcacatcatttgccttctcatatttccctcgtcttgaccatctggtgcctgttatgcagtttaacattctgcagcaataaaagtgttttattataaagtattaattttaatgttctatacttagtgggaaccactggtctcaaaatttgaagctattctttaagaggagaac

SEQ ID NO: 415849 - DNA, 2532 bp, Homo sapiens
ggggtgggtggggccaggaggaagatggcggcgtccgcagctgccgctgagctccaggcttctgggggtccgcggcacccagtgtgtctgttggtgttgggaatggcgggatccgggaaaaccacttttgtacagaggctcacaggacacctgcatgcccaaggcactccaccgtatgtgatcaacctggatccagcagtacatgaagttccctttcctgccaatattgatattcgtgatactgtaaagtataaagaagtaatgaaacaatatggacttggacccaatggcggcatagtgacctcactcaatctctttgctaccagatttgatcaggtgatgaaatttattgagaaggcccagaacatgtccaaatatgtgttgattgacacacctggacagattgaggtattcacctggtcagcttctgggacaattatcactgaagcccttgcatcctcatttccaacagttgtcatctatgtaatggacacatcgagaagtaccaacccagtgaccttcatgtccaacatgctctatgcctgcagcatcttatacaaaaccaagctgcctttcattgtggtcatgaataaaactgacatcattgaccacagctttgcagtggaatggatgcaggattttgaggctttccaagatgccttgaatcaagagactacatacgtcagtaacctgactcgttcaatgagcctggtgttagatgagttttacagctcactcagggtggtgggtgtctctgctgttctgggtactggattagatgaactctttgtgcaagttaccagtgctgccgaagaatatgaaagggagtatcgtcctgaatatgaacgtctgaaaaaatcactggccaacgcagagagccaacagcagagagaacaactggaacgccttcgaaaagatatgggttctgtagccttggatgcagggactgccaaagacagcttatctcctgtgctgcacccttctgatttgatcctgactcgaggaaccttggatgaagaggatgaggaagcagacagcgatactgatgacattgaccacagagttacagaggaaagccatgaagagccagcattccagaattttatgcaagaatcgatggcacaatactggaagagaaacaataaataggagactttagcacacttcacttgtttctagaagtccagaattttggacctccacgtgaaagaactgttcttacctctgaactgggggctcccataagggataattttcctcagagtagcaaagtttctcttattagagaaatcttgtgactcagatgaagtcagggatagaagacccttggacctggcaggttaatgctgattattccttggcctttcccttgtatttatgcaaggaaggatatactgagctgatactcttccaagcctacaacttcaagttttatcatttgaactcaagtacttttgctgctgaggaatggaatcaaaagaacgtagtctcctggtgaccacctcagatctctattattaggctagatgtatagcctctactcccccagcttcttgctcttgaccctgcactgtaagttgcccttctattagcagccaaggaaaagggaaacatgagcttatccagaacggtggcagagtctccttggcaatcaaccaacgttgctatgaaatatgcctcacactgtatagctcattataggacgtcaggtttgttgaaaaaagtgggcaagacatgattaatgaatcagaatcctgtttcattggtgacttggataaagactttttaattttaactttgttctaagactgcttgtcatgatttcaaattagaaaattatataattgcaaacagcttcacttctcctgttcaacagaggcttaaggccagatgtccaaacttgtctcaataaggaggtgatattttactaaagtttcccacgtgcacatactgactaaatacagagctaggcccagtttgtattgtactctgaacttaatgcaaagtctccttggtgattttcgcaaagtccgtggatttgggtcagaggcacatttcatacataacagcccttataaacgtttgccctgcctccacattttacagtatcttaaaacagtacatttctttcaaagaattttatctctatgagtcagtactccaacttagtggttctcacattgtggaccaggagcatcagcatcatctggggaattgttcaacttacctcttataacctatgaactcagaaaccctgggggtgggctgagcagtctgttttagaaagccctccatgtgattctgatgcatagtagcctatgacataattccagaccaggtgaatctcaagatactaatcctcacatcatttgccttctcatatttccctcgtcttgaccatctggtgcctgttatgcagtttaacattctgcagcaataaaagtgttttattataaagtattaattttaatgttctatacttagtgggaaccactggtctcaaaatttgaagctattctttaagaggagaac

SEQ ID NO: 415850 - DNA, 2379 bp, Homo sapiens
ggggtgggtggggccaggaggaagatggcggcgtccgcagctgccgctgagctccaggcttctgggggtccgcggcacccagtgtgtctgttggtgttgggaatggcgggatccgggaaaaccacttttgtacagaggctcacaggacacctgcatgcccaaggcactccaccgtatgtgatcaacctggatccagcagtacatgaagttccctttcctgccaatattgatattcgtgatactgtaaagtataaagaagtaatgaaacaatatggacttggacccaatggcggcatagtgacctcactcaatctctttgctaccagatttgatcaggtgatgaaatttattgagaaggcccagaacatgtccaaatatgtgttgattgacacacctggacagattgaggtattcacctggtcagcttctgggacaattatcactgaagcccttgcatcctcatttccaacagttgtcatctatgtaatggacacatcgagaagtaccaacccagtgaccttcatgtccaacatgctctatgcctgcagcatcttatacaaaaccaagctgcctttcattgtggtcatgaataaaactgacatcattgaccacagctttgcagtggaatggatgcaggattttgaggctttccaagatgccttgaatcaagagactacatacgtcagtaacctgactcgttcaatgagcctggtgttagatgagttttacagctcactcagggtggtgggtgtctctgctgttctgggtactggattagatgaactctttgtgcaagttaccagtgctgccgaagaatatgaaagggagtatcgtcctgaatatgaacgtctgaaaaaatcactggccaacgcagagagccaacagcagagagaacaactggaacgccttcgaaaagatatgggttctgtagccttggatgcagggactgccaaagacagcttatctcctgtgctgcacccttctgatttgatcctgactcgaggaaccttggatgaagaggatgaggaagcagacagcgatactgatgacattgaccacagagttacagaggaaagccatgaagagccagcattccagaattttatgcaagaatcgatggcacaatactggaagagaaacaataaataggagactttagcacacttcacttgtttctagaagtccagaattttggacctccacgtgaaagaactgttcttacctctgaactgggggctcccataagggataattttcctcagagtagcaaagtttctcttattagagaaatcttgtgactcagatgaagtcagggatagaagacccttggacctggcaggttaatgctgattattccttggcctttcccttgtatttatgcaaggaaggatatactgagctgatactcttccaagcctacaacttcaagttttatcatttgaactcaagtacttttgctgctgaggaatggaatcaaaagaacgtagtctcctggtgaccacctcagatctctattattaggctagatgtatagcctctactcccccagcttcttgctcttgaccctgcactgtaagttgcccttctattagcagccaaggaaaagggaaacatgagcttatccagaacggtggcagagtctccttggcaatcaaccaacgttgctatgaaatatgcctcacactgtatagctcattataggacgtcaggtttgttgaaaaaagtgggcaagacatgattaatgaatcagaatcctgtttcattggtgacttggataaagactttttaattttaactttgttctaagactgcttgtcatgatttcaaattagaaaattatataattgcaaacagcttcacttctcctgttcaacagaggcttaaggccagatgtccaaacttgtctcaataaggaggtgatattttactaaagtttcccacgtgcacatactgactaaatacagagctaggcccagtttgtattgtactctgaacttaatgcaaagtctccttggtgattttcgcaaagtccgtggatttgggtcagaggcacatttcatacataacagcccttataaacgtttgccctgcctccacattttacagtatcttaaaacagtacatttctttcaaagaattttatctctatgagtcagtactccaacttagtggttctcacattgtggaccaggagcatcagcatcatctggggaattgttcaacttacctcttataacctatgaactcagaaaccctgggggtgggctgagcagtctgttttagaaagccctccatgtgattctgatgcatagtagcctatgacataattccagaccaggtgagagtgatcttcgcacgatgggatcctctagaacacta

SEQ ID NO: 415851 - DNA, 2424 bp, Homo sapiens
ggggtgggtggggccaggaggaagatggcggcgtccgcagctgccgctgagctccaggcttctgggggtccgcggcacccagtgtgtctgttggtgttgggaatggcgggatccgggaaaaccacttttgtacagaggctcacaggacacctgcatgcccaaggcactccaccgtatgtgatcaacctggatccagcagtacatgaagttccctttcctgccaatattgatattcgtgatactgtaaagtataaagaagtaatgaaacaatatggacttggacccaatggcggcatagtgacctcactcaatctctttgctaccagatttgatcaggtgatgaaatttattgagaaggcccagaacatgtccaaatatgtgttgattgacacacctggacagattgaggtattcacctggtcagcttctgggacaattatcactgaagcccttgcatcctcatttccaacagttgtcatctatgtaatggacacatcgagaagtaccaacccagtgaccttcatgtccaacatgctctatgcctgcagcatcttatacaaaaccaagctgcctttcattgtggtcatgaataaaactgacatcattgaccacagctttgcagtggaatggatgcaggattttgaggctttccaagatgccttgaatcaagagactacatacgtcagtaacctgactcgttcaatgagcctggtgttagatgagttttacagctcactcagggtggtgggtgtctctgctgttctgggtactggattagatgaactctttgtgcaagttaccagtgctgccgaagaatatgaaagggagtatcgtcctgaatatgaacgtctgaaaaaatcactggccaacgcagagagccaacagcagagagaacaactggaacgccttcgaaaagatatgggttctgtagccttggatgcagggactgccaaagttacagaggaaagccatgaagagccagcattccagaattttatgcaagaatcgatggcacaatactggaagagaaacaataaataggagactttagcacacttcacttgtttctagaagtccagaattttggacctccacgtgaaagaactgttcttacctctgaactgggggctcccataagggataattttcctcagagtagcaaagtttctcttattagagaaatcttgtgactcagatgaagtcagggatagaagacccttggacctggcaggttaatgctgattattccttggcctttcccttgtatttatgcaaggaaggatatactgagctgatactcttccaagcctacaacttcaagttttatcatttgaactcaagtacttttgctgctgaggaatggaatcaaaagaacgtagtctcctggtgaccacctcagatctctattattaggctagatgtatagcctctactcccccagcttcttgctcttgaccctgcactgtaagttgcccttctattagcagccaaggaaaagggaaacatgagcttatccagaacggtggcagagtctccttggcaatcaaccaacgttgctatgaaatatgcctcacactgtatagctcattataggacgtcaggtttgttgaaaaaagtgggcaagacatgattaatgaatcagaatcctgtttcattggtgacttggataaagactttttaattttaactttgttctaagactgcttgtcatgatttcaaattagaaaattatataattgcaaacagcttcacttctcctgttcaacagaggcttaaggccagatgtccaaacttgtctcaataaggaggtgatattttactaaagtttcccacgtgcacatactgactaaatacagagctaggcccagtttgtattgtactctgaacttaatgcaaagtctccttggtgattttcgcaaagtccgtggatttgggtcagaggcacatttcatacataacagcccttataaacgtttgccctgcctccacattttacagtatcttaaaacagtacatttctttcaaagaattttatctctatgagtcagtactccaacttagtggttctcacattgtggaccaggagcatcagcatcatctggggaattgttcaacttacctcttataacctatgaactcagaaaccctgggggtgggctgagcagtctgttttagaaagccctccatgtgattctgatgcatagtagcctatgacataattccagaccaggtgaatctcaagatactaatcctcacatcatttgccttctcatatttccctcgtcttgaccatctggtgcctgttatgcagtttaacattctgcagcaataaaagtgttttattataaagtattaattttaatgttctatacttagtgggaaccactggtctcaaaatttgaagctattctttaagaggagaac

SEQ ID NO: 415852 - DNA, 2384 bp, Homo sapiens
ggggtgggtggggccaggaggaagatggcggcgtccgcagctgccgctgagctccaggcttctgggggtccgcggcacccagtgtgtctgttggtgttgggaatggcgggatccgggaaaaccacttttgtacagaggctcacaggacacctgcatgcccaaggcactccaccgtatgtgatcaacctggatccagcagtacatgaagttccctttcctgccaatattgatattcgtgatactgtaaagtataaagaagtaatgaaacaatatggacttggacccaatggcggcatagtgacctcactcaatctctttgctaccagatttgatcaggtgatgaaatttattgagaaggcccagaacatgtccaaatatgtgttgattgacacacctggacagattgaggtattcacctggtcagcttctgggacaattatcactgaagcccttgcatcctcatttccaacagttgtcatctatgtaatggacacatcgagaagtaccaacccagtgaccttcatgtccaacatgctctatgcctgcagcatcttatacaaaaccaagctgcctttcattgtggtcatgaataaaactgacatcattgaccacagctttgcagtggaatggatgcaggattttgaggctttccaagatgccttgaatcaagagactacatacgtcagtaacctgactcgttcaatgagcctggtgttagatgagttttacagctcactcagggtggtgggtgtctctgctgttctgggtactggattagatgaactctttgtgcaagttaccagtgctgccgaagaatatgaaaggccaacgcagagagccaacagcagagagaacaactggaacgccttcgaaaagatatgggttctgtagccttggatgcagggactgccaaagttacagaggaaagccatgaagagccagcattccagaattttatgcaagaatcgatggcacaatactggaagagaaacaataaataggagactttagcacacttcacttgtttctagaagtccagaattttggacctccacgtgaaagaactgttcttacctctgaactgggggctcccataagggataattttcctcagagtagcaaagtttctcttattagagaaatcttgtgactcagatgaagtcagggatagaagacccttggacctggcaggttaatgctgattattccttggcctttcccttgtatttatgcaaggaaggatatactgagctgatactcttccaagcctacaacttcaagttttatcatttgaactcaagtacttttgctgctgaggaatggaatcaaaagaacgtagtctcctggtgaccacctcagatctctattattaggctagatgtatagcctctactcccccagcttcttgctcttgaccctgcactgtaagttgcccttctattagcagccaaggaaaagggaaacatgagcttatccagaacggtggcagagtctccttggcaatcaaccaacgttgctatgaaatatgcctcacactgtatagctcattataggacgtcaggtttgttgaaaaaagtgggcaagacatgattaatgaatcagaatcctgtttcattggtgacttggataaagactttttaattttaactttgttctaagactgcttgtcatgatttcaaattagaaaattatataattgcaaacagcttcacttctcctgttcaacagaggcttaaggccagatgtccaaacttgtctcaataaggaggtgatattttactaaagtttcccacgtgcacatactgactaaatacagagctaggcccagtttgtattgtactctgaacttaatgcaaagtctccttggtgattttcgcaaagtccgtggatttgggtcagaggcacatttcatacataacagcccttataaacgtttgccctgcctccacattttacagtatcttaaaacagtacatttctttcaaagaattttatctctatgagtcagtactccaacttagtggttctcacattgtggaccaggagcatcagcatcatctggggaattgttcaacttacctcttataacctatgaactcagaaaccctgggggtgggctgagcagtctgttttagaaagccctccatgtgattctgatgcatagtagcctatgacataattccagaccaggtgaatctcaagatactaatcctcacatcatttgccttctcatatttccctcgtcttgaccatctggtgcctgttatgcagtttaacattctgcagcaataaaagtgttttattataaagtattaattttaatgttctatacttagtgggaaccactggtctcaaaatttgaagctattctttaagaggagaac

SEQ ID NO: 415853 - DNA, 1800 bp, Homo sapiens
ggggtgggtggggccaggaggaagatggcggcgtccgcagctgccgctgagctccaggcttctgggggtccgcggcacccagtgtgtctgttggtgttgggaatggcgggatccgggaaaaccacttttgtacagaggctcacaggacacctgcatgcccaaggcactccaccgtatgtgatcaacctggatccagcagtacatgaagttccctttcctgccaatattgatattcgtgatactgtaaagtataaagaagtaatgaaacaatatggacttggacccaatggcggcatagtgacctcactcaatctctttgctaccagatttgatcaggtgatgaaatttattgagaaggcccagaacatgtccaaatatgtgttgattgacacacctggacagattgaggtattcacctggtcagcttctgggacaattatcactgaagcccttgcatcctcatttccaacagttgtcatctatgtaatggacacatcgagaagtaccaacccagtgaccttcatgtccaacatgctctatgcctgcagcatcttatacaaaaccaagctgcctttcattgtggtcatgaataaaactgacatcattgaccacagctttgcagtggaatggatgcaggattttgaggctttccaagatgccttgaatcaagagactacatacgtcagtaacctgactcgttcaatgagcctggtgttagatgagttttacagctcactcagggtggtgggtgtctctgctgttctgggtactggattagatgaactctttgtgcaagttaccagtgctgccgaagaatatgaaagggagtatcgtcctgaatatgaacgtctgaaaaaatcactggccaacgcagagagccaacagcagagagaacaactggaacgccttcgaaaagatatgggttctgtagccttggatgcagggactgccaaagacagcttatctcctgtgctgcacccttctgatttgatcctgactcgaggaaccttggatgaagaggatgaggaagcagacagcgatactgatgacattgaccacagagttacagaggaaagccatgaagagccagcattccagaattttatgcaagaatcgatggcacaatactggaagagaaacaataaataggagactttagcacacttcacttgtttctagaagtccagaattttggacctccacgtgaaagaactgttcttacctctgaactgggggctcccataagggataattttcctcagagtagcaaagtttctcttattagagaaatcttgtgactcagatgaagtcagggatagaagacccttggacctggcaggttaatgctgattattccttggcctttcccttgtatttatgcaaggaaggatatactgagctgatactcttccaagcctacaacttcaagttttatcatttgaactcaagtacttttgctgctgaggaatggaatcaaaagaacgtagtctcctggtgaccacctcagatctctattattaggctagatgtatagcctctactcccccagcttcttgctcttgaccctgcactgtaagttgcccttctattagcagccaaggaaaagggaaacatgagcttatccagaacggtggcagagtctccttggcaatcaaccaacgttgctatgaaatatgcctcacactgtatagctcattataggacgtcaggtttgttgaaaaaagtgggcaagacatgattaatgaatcagaatcctgtttcattggtgactcgtggaaatgtccacgggatcctctagat

SEQ ID NO: 415854 - DNA, 1732 bp, Homo sapiens
gacagtgatgccgaagaatatgaaggagtatcgtcctgaatatgaacgtctgaaaaaatcactggccaacgcagagagccaacagcagagagaacaactggaacgccttcgaaaagatatgggttctgtagccttggatgcagggactgccaaagacagcttatctcctgtgctgcacccttctgatttgatcctgactcgaggaaccttggatgaagaggatgaggaagcagacagcgatactgatgacattgaccacagagttacagaggaaagccatgaagagccagcattccagaattttatgcaagaatcgatggcacaatactggaagagaaacaataaataggagactttagcacacttcacttgtttctagaagtccagaattttggacctccacgtgaaagaactgttcttacctctgaactgggggctcccataagggataattttcctcagagtagcaaagtttctcttattagagaaatcttgtgactcagatgaagtcagggatagaagacccttggacctggcaggttaatgctgattattccttggcctttcccttgtatttatgcaaggaaggatatactgagctgatactcttccaagcctacaacttcaagttttatcatttgaactcaagtacttttgctgctgaggaatggaatcaaaagaacgtagtctcctggtgaccacctcagatctctattattaggctagatgtatagcctctactcccccagcttcttgctcttgaccctgcactgtaagttgcccttctattagcagccaaggaaaagggaaacatgagcttatccagaacggtggcagagtctccttggcaatcaaccaacgttgctatgaaatatgcctcacactgtatagctcattataggacgtcaggtttgttgaaaaaagtgggcaagacatgattaatgaatcagaatcctgtttcattggtgacttggataaagactttttaattttaactttgttctaagactgcttgtcatgatttcaaattagaaaattatataattgcaaacagcttcacttctcctgttcaacagaggcttaaggccagatgtccaaacttgtctcaataaggaggtgatattttactaaagtttcccacgtgcacatactgactaaatacagagctaggcccagtttgtattgtactctgaacttaatgcaaagtctccttggtgattttcgcaaagtccgtggatttgggtcagaggcacatttcatacataacagcccttataaacgtttgccctgcctccacattttacagtatcttaaaacagtacatttctttcaaagaattttatctctatgagtcagtactccaacttagtggttctcacattgtggaccaggagcatcagcatcatctggggaattgttcaacttacctcttataacctatgaactcagaaaccctgggggtgggctgagcagtctgttttagaaagccctccatgtgattctgatgcatagtagcctatgacataattccagaccaggtgaatctcaagatactaatcctcacatcatttgccttctcatatttccctcgtcttgaccatctggtgcctgttatgcagtttaacattctgcagcaataaaagtgttttattataaagtattaattttaatgttctatacttagtgggaaccactggtctcaaaatttgaagctattctttaagaggagaac

SEQ ID NO: 415855 - DNA, 1740 bp, Homo sapiens
  misc_feature (1720)..(1721): n is a, c, g, or t
ggggtgggtggggccaggaggaagatggcggcgtccgcagctgccgctgagctccaggcttctgggggtccgcggcacccagtgtgtctgttggtgttgggaatggcgggatccgggaaaaccacttttgtacagaggctcacaggacacctgcatgcccaaggcactccaccgtatgtgatcaacctggatccagcagtacatgaagttccctttcctgccaatattgatattcgtgatactgtaaagtataaagaagtaatgaaacaatatggacttggacccaatggcggcatagtgacctcactcaatctctttgctaccagatttgatcaggtgatgaaatttattgagaaggcccagaacatgtccaaatatgtgttgattgacacacctggacagattgaggtattcacctggtcagcttctgggacaattatcactgaagcccttgcatcctcatttccaacagttgtcatctatgtaatggacacatcgagaagtaccaacccagtgaccttcatgtccaacatgctctatgcctgcagcatcttatacaaaaccaagctgcctttcattgtggtcatgaataaaactgacatcattgaccacagctttgcagtggaatggatgcaggattttgaggctttccaagatgccttgaatcaagagactacatacgtcagtaacctgactcgttcaatgagcctggtgttagatgagttttacagctcactcagggtggtgggtgtctctgctgttctgggtactggattagatgaactctttgtgcaagttaccagtgctgccgaagaatatgaaagggagtatcgtcctgaatatgaacgtctgaaaaaatcactggccaacgcagagagccaacagcagagagaacaactggaacgccttcgaaaagatatgggttctgtagccttggatgcagggactgccaaagacagcttatctcctgtgctgcacccttctgatttgatcctgactcgaggaaccttggatgaagaggatgaggaagcagacagcgatactgatgacattgaccacagagttacagaggaaagccatgaagagccagcattccagaattttatgcaagaatcgatggcacaatactggaagagaaacaataaataggagactttagcacacttcacttgtttctagaagtccagaattttggacctccacgtgaaagaactgttcttacctctgaactgggggctcccataagggataattttcctcagagtagcaaagtttctcttattagagaaatcttgtgactcagatgaagtcagggatagaagacccttggacctggcaggttaatgctgattattccttggcctttcccttgtatttatgcaaggaaggatatactgagctgatactcttccaagcctacaacttcaagttttatcatttgaactcaagtacttttgctgctgaggaatggaatcaaaagaacgtagtctcctggtgaccacctcagatctctattattaggctagatgtatagcctctactcccccagcttcttgctcttgaccctgcactgtaagttgcccttctattagcagccaaggaaaagggaaacatgagcttatccagaacggtggcagagtctccttggcaatcaaccaacgttgctatgaaatatgcctcacactgtatagctcattataggacacgaatgttcaggtannagctcggttgtatcatgta

SEQ ID NO: 415856 - DNA, 1731 bp, Homo sapiens
ggggtgggtggggccaggaggaagatggcggcgtccgcagctgccgctgagctccaggcttctgggggtccgcggcacccagtgtgtctgttggtgttgggaatggcgggatccgggaaaaccacttttgtacagaggctcacaggacacctgcatgcccaaggcactccaccgtatgtgatcaacctggatccagcagtacatgaagttccctttcctgccaatattgatattcgtgatactgtaaagtataaagaagtaatgaaacaatatggacttggacccaatggcggcatagtgacctcactcaatctctttgctaccagatttgatcaggtgatgaaatttattgagaaggcccagaacatgtccaaatatgtgttgattgacacacctggacagattgaggtattcacctggtcagcttctgggacaattatcactgaagcccttgcatcctcatttccaacagttgtcatctatgtaatggacacatcgagaagtaccaacccagtgaccttcatgtccaacatgctctatgcctgcagcatcttatacaaaaccaagctgcctttcattgtggtcatgaataaaactgacatcattgaccacagctttgcagtggaatggatgcaggattttgaggctttccaagatgccttgaatcaagagactacatacgtcagtaacctgactcgttcaatgagcctggtgttagatgagttttacagctcactcagggtggtgggtgtctctgctgttctgggtactggattagatgaactctttgtgcaagttaccagtgctgccgaagaatatgaaagggagtatcgtcctgaatatgaacgtctgaaaaaatcactggccaacgcagagagccaacagcagagagaacaactggaacgccttcgaaaagatatgggttctgtagccttggatgcagggactgccaaagacagcttatctcctgtgctgcacccttctgatttgatcctgactcgaggaaccttggatgaagaggatgaggaagcagacagcgatactgatgacattgaccacagagttacagaggaaagccatgaagagccagcattccagaattttatgcaagaatcgatggcacaatactggaagagaaacaataaataggagactttagcacacttcacttgtttctagaagtccagaattttggacctccacgtgaaagaactgttcttacctctgaactgggggctcccataagggataattttcctcagagtagcaaagtttctcttattagagaaatcttgtgactcagatgaagtcagggatagaagacccttggacctggcaggttaatgctgattattccttggcctttcccttgtatttatgcaaggaaggatatactgagctgatactcttccaagcctacaacttcaagttttatcatttgaactcaagtacttttgctgctgaggaatggaatcaaaagaacgtagtctcctggtgaccacctcagatctctattattaggctagatgtatagcctctactcccccagcttcttgctcttgaccctgcactgtaagttgcccttctattagcagccaaggaaaagggaaacatgagcttatccagaacggtggcagagtctccttggcaatcaaccgtcgtagcggatgtccatgggctgtcacacgtgtagagcagtaatagaggactgtcaggtttatgtctatcact

SEQ ID NO: 415857 - DNA, 1705 bp, Homo sapiens
cctacaagtgggaccttattttagctactatgagggaggtattctttctacttataaagaaactacattttgggcagcatgatagagcatgcttctaggagacatttcctttttgagggaagtgagtacttaagtttcttagaagtaatgtactgttttctgatggatgggtgacgggctctaatcagtttgtctaatgaaagagttgaaaaagaattgcccttttttccttgcagttacagaggaaagccatgaagagccagcattccagaattttatgcaagaatcgatggcacaatactggaagagaaacaataaataggagactttagcacacttcacttgtttctagaagtccagaattttggacctccacgtgaaagaactgttcttacctctgaactgggggctcccataagggataattttcctcagagtagcaaagtttctcttattagagaaatcttgtgactcagatgaagtcagggatagaagacccttggacctggcaggttaatgctgattattccttggcctttcccttgtatttatgcaaggaaggatatactgagctgatactcttccaagcctacaacttcaagttttatcatttgaactcaagtacttttgctgctgaggaatggaatcaaaagaacgtagtctcctggtgaccacctcagatctctattattaggctagatgtatagcctctactcccccagcttcttgctcttgaccctgcactgtaagttgcccttctattagcagccaaggaaaagggaaacatgagcttatccagaacggtggcagagtctccttggcaatcaaccaacgttgctatgaaatatgcctcacactgtatagctcattataggacgtcaggtttgttgaaaaaagtgggcaagacatgattaatgaatcagaatcctgtttcattggtgacttggataaagactttttaattttaactttgttctaagactgcttgtcatgatttcaaattagaaaattatataattgcaaacagcttcacttctcctgttcaacagaggcttaaggccagatgtccaaacttgtctcaataaggaggtgatattttactaaagtttcccacgtgcacatactgactaaatacagagctaggcccagtttgtattgtactctgaacttaatgcaaagtctccttggtgattttcgcaaagtccgtggatttgggtcagaggcacatttcatacataacagcccttataaacgtttgccctgcctccacattttacagtatcttaaaacagtacatttctttcaaagaattttatctctatgagtcagtactccaacttagtggttctcacattgtggaccaggagcatcagcatcatctggggaattgttcaacttacctcttataacctatgaactcagaaaccctgggggtgggctgagcagtctgttttagaaagccctccatgtgattctgatgcatagtagcctatgacataattccagaccaggtgaatctcaagatactaatcctcacatcatttgccttctcatatttccctcgtcttgaccatctggtgcctgttatgcagtttaacattctgcagcaataaaagtgttttattataaagtattaattttaatgttctatacttagtgggaaccactggtctcaaaatttgaagctattctttaagaggagaac

SEQ ID NO: 415858 - DNA, 1601 bp, Homo sapiens
ggggtgggtggggccaggaggaagatggcggcgtccgcagctgccgctgagctccaggcttctgggggtccgcggcacccagtgtgtctgttggtgttgggaatggcgggatccgggaaaaccacttttgtacagaggctcacaggacacctgcatgcccaaggcactccaccgtatgtgatcaacctggatccagcagtacatgaagttccctttcctgccaatattgatattcgtgatactgtaaagtataaagaagtaatgaaacaatatggacttggacccaatggcggcatagtgacctcactcaatctctttgctaccagatttgatcaggtgatgaaatttattgagaaggcccagaacatgtccaaatatgtgttgattgacacacctggacagattgaggtattcacctggtcagcttctgggacaattatcactgaagcccttgcatcctcatttccaacagttgtcatctatgtaatggacacatcgagaagtaccaacccagtgaccttcatgtccaacatgctctatgcctgcagcatcttatacaaaaccaagctgcctttcattgtggtcatgaataaaactgacatcattgaccacagctttgcagtggaatggatgcaggattttgaggctttccaagatgccttgaatcaagagactacatacgtcagtaacctgactcgttcaatgagcctggtgttagatgagttttacagctcactcagggtggtgggtgtctctgctgttctgggtactggattagatgaactctttgtgcaagttaccagtgctgccgaagaatatgaaagggagtatcgtcctgaatatgaacgtctgaaaaaatcactggccaacgcagagagccaacagcagagagaacaactggaacgccttcgaaaagatatgggttctgtagccttggatgcagggactgccaaagacagcttatctcctgtgctgcacccttctgatttgatcctgactcgaggaaccttggatgaagaggatgaggaagcagacagcgatactgatgacattgaccacagagttacagaggaaagccatgaagagccagcattccagaattttatgcaagaatcgatggcacaatactggaagagaaacaataaataggagactttagcacacttcacttgtttctagaagtccagaattttggacctccacgtgaaagaactgttcttacctctgaactgggggctcccataagggataattttcctcagagtagcaaagtttctcttattagagaaatcttgtgactcagatgaagtcagggatagaagacccttggacctggcaggttaatgctgattattccttggcctttcccttgtatttatgcaaggaaggatatactgagctgatactcttccaagcctacaacttcaagttttatcatttgaactcaagtacttttgctgctgaggaatggaatcaaaagaacgtagtctcctggtgaccacctcagatctctattattaggctagatgtatagcctctactcccccagcttcttgctcttgacctgtcctgcgaacctatgagagatcctgctagagtcg

SEQ ID NO: 415859 - DNA, 692 bp, Homo sapiens
ggggtgggtggggccaggaggaagatggcggcgtccgcagctgccgctgagctccaggcttctgggggtccgcggcacccagtgtgtctgttggtgttgggaatggcgggatccgggaaaaccacttttgtacagaggctcacaggacacctgcatgcccaaggcactccaccgtatgtgatcaacctggatccagcagtacatgaagttccctttcctgccaatattgatattcgtgatactgtaaagtataaagaagtaatgaaacaatatggacttggacccaatggcggcatagtgacctcactcaatctctttgctaccagatttgatcaggtgatgaaatttattgagaaggcccagaacatgtccaaatatgtgttgattgacacacctggacagattgaggtattcacctggtcagcttctgggacaattatcactgaagcccttgcatcctcatttccaacagttgtcatctatgtaatggacacatcgagaagtaccaacccagtgaccttcatgtccaacatgctctatgcctgcagcatctaatccagtacccagaacagcagagacacccaccaccctgagtgagctgtaaaactcatctaacaccaggctcattgaacgagtcaggttactggcgtatgtagtctcttgattcaaggcatcttggaaagcctcaaaat

SEQ ID NO: 415860 - DNA, 93 bp, Homo sapiens
agtatcgtcctgaatatgaacgtctgaaaaaatcactggtaagaagggaggctgtttgtatattttaaaagggccattaaaaaaacccagctc

SEQ ID NO: 415861 - DNA, 156 bp, Homo sapiens
ttggacccaatggcggcatagtgacctcactcaatctctttgctaccagatttgatcaggtatatctgtctttagtatattaatatggttgtgtaaaatctgtgactcttaaattccttagcttgatcacattggtaaagaagagcagctaacctg

SEQ ID NO: 415862 - DNA, 4528 bp, Homo sapiens
atgctctttgagggcttggatctggtgtcggcgctggccaccctcgccgcgtgcctggtgtccgtgacgctgctgctggccgtgtcgcagcagctgtggcagctgcgctgggccgccactcgcgacaagagctgcaagctgcccatccccaagggatccatgggcttcccgctcatcggagagaccggccactggctgctgcagggttctggcttccagtcgtcgcggagggagaagtatggcaacgtgttcaagacgcatttgttggggcggccgctgatacgcgtgaccggcgcggagaacgtgcgcaagatcctcatgggcgagcaccacctcgtgagcaccgagtggcctcgcagcacccgcatgttgctgggccccaacacggtgtccaattccattggcgacatccaccgcaacaagcgcaaggtcttctccaagatcttcagccacgaggccctggagagttacctgcccaagatccagctggtgatccaggacacactgcgcgcctggagcagccaccccgaggccatcaacgtgtaccaggaggcgcagaagctgaccttccgcatggccatccgggtgctgctgggcttcagcatccctgaggaggaccttgggcacctctttgaggtctaccagcagtttgtggacaatgtcttctccctgcctgtcgacctgcccttcagtggctaccggcggggcattcaggctcggcagatcctgcagaaggggctggagaaggccatccgggagaagctgcagtgcacacagggcaaggactacttggacgccctggacctcctcattgagagcagcaaggagcacgggaaggagatgaccatgcaggagctgaaggacgggaccctggagctgatctttgcggcctatgccaccacggccagcgccagcacctcactcatcatgcagctgctgaagcaccccactgtgctggagaagctgcgggatgagctgcgggctcatggcatcctgcacagtggcggctgcccctgcgagggcacactgcgcctggacacgctcagtgggctgcgctacctggactgcgtcatcaaggaggtcatgcgcctgttcacgcccatttccggcggctaccgcactgtgctgcagaccttcgagcttgatggtttccagatccccaaaggctggagtgtcatgtatagcatccgggacacccatgacacagcgcccgtgttcaaagacgtgaacgtgttcgaccccgatcgcttcagccaggcgcggagcgaggacaaggatggccgcttccattacctcccgttcggtggcggtgtccggacctgcctgggcaagcacctggccaagctgttcctgaaggtgctggcggtggagctggctagcaccagccgctttgagctggctacacggaccttcccccgcatcaccttggtccccgtcctgcaccccgtggatggcctcagcgtcaagttctttggcctggactccaaccagaacgagatcctgccggagacggaggccatgctgagcgccacagtctaacccaagacccacccgcctcagcccagcccaggcagcggggtggtggttgtgggaggtagaaacctgtgtgtgggagggggccggaacggggagggcgagtggcccccatacttgccctcccttgctccccctccctggcaaaccctacccaaagccagtgggccccattcctagggctgggctccccttctggctccagcttccctccagccactccccatttaccatcagctcagcccctgggaagggcgtggcaggggctctgcatgcccgtgacagtgttaggtgtcagcgcgtgctacagtgtttttgtgatgttctgaactgctcccttccctccgttcctttcggacccttttagctggggttgggggacgggaagagccgtgcccccttgggcgcactcttcagcgtctcctcctcctgcgcccccactgcgtctgcccaggaacagcatcctgggtagcagaacaggagtcaaccttggcggggcgggggctgcgtccaacctggagattgcccttccctatgccacggttcccaccctccctcaccagtttggacaatttgaaattacctattgctgctacttgttctgtcctctgaccttggggcaaaggagccccaggccctgtctccccagcatcctccctggtggccctgggcaggtgcactgacacccccaccttcccatcccctgctgaaccaggccctgttacacacagccgcctaaggcccgcggctcatgtgctgcccgcccccatatttattcactgatagagaatcttggggatgctggggtctggagtgaacatctcctccccttcatgccctagcctgtgttctagctgtcctggcgagacttctgtgagtgaagaggaaggggtctctggtcaaacccagcccccagggcctagggttgaaagccttccccggctccgggcattatttgggtttaatctcggagcctcactcctggactgaagtccggtgcctctgccttatccctggtggagatggaatgtggcccattgcctcctccctctcctgtcaaaaaccctgatcaggtagatttggaggcggccacgatttcctgtttggcccctgttcaccccagtgcactggccctgactccaggcgtgagtatggggaaggatacgggttcttctgacggggagcaagggcctccgtcttcccttccttaactctccccctttgccctccgccctgaaaaaggtgtccttgaagtcccttccacctctatgccactgtctgcttagcccagctcaggggtggggaagaggcgaaagcgtgggggaggtgagcgcagcggcagttctgcctcggagctgattgcagggccctgtgtggtctccggacagctgcgggaaggctgccgcagctgaagctgaagaggcggctacgtgcggtttgtcagggggattgggttgaaaactggccagtcgggatgactgggtgaaagaggagtagctcctgccactggcgttttgagtgttggcaatttgggatgcctcctggggaaggtttccgggcgtttggtgagtctctagatttttccttgctttctgtgtttattggtttttgatgttgtaaaagcaatgaatcccctttacaagaaaatcgaaaacacagaagaatgaaggacatgccagtccccgatcgctgctgtgagcacctcagtggctccctcagaccagatcccgtaggcagccccacagaccgaccctgaccccactcacagccaccctgaagatagactataggaacgggcccataccacacagactgctctccaatccctgagtctcagatgtttcatttatttcctacttttccactactaaaaaacagtgtggaatagacattattggcaaaattgctcatccctaatcctgaaaaacaggccagaatgggtaaagacttgtcaaagcttgcaacatagctacatggtgcacccggacctgtaccccctccccccaacacaaaaccagtgtctgggaggttcattttcctttaaactgatccagctggccctgaaccaattgtttttgactgagtatctaggagagcagtaagtggaacttcagacaagcccactgggtctggtccaggtgaggggcagggggcatggggctgggaggtctcaggggccttccctgggggtggccagcctggtagggggcagagaaggaaaagctgaggggggtccctgtgagggaggaaagaaggatcatttgccccgctgggtctcaaaggcagtgagaagagagctgaagaaagctctggctggctgacaggatccctgtgttgtaattggtccctcctttcagctctctagtgagatgcccgtgtctgtgcgtgtgcgtgtgtgtttcatacagctagcattagatgggtgatgtttcttacttatcatccctaactattgcaacttgaccttaaaaagacaaaaccccacaaaactcttcctgccacgggcttgcagattgaagcactttcgatgttgggcgctggcgtttgtgttctgggcaccaccgtgaccctgcccagatggctataatattattttatacacaaaccttttttttcataaatgttataattttgtgtctgtctttataaactattataagtactatttttgttataattcaaaatagatatttagtataaagtttttgctgttaaatatttgttatttagtaaaatatgaattttgctctattgtaaacatggttcaaaatattaatatgtttttatcacagtcgttttaatattgaaaaagcacttgtgtgttttgttttgatatgaaactggtaccgtgtgagtgtttttgctgtcgtggttttaatctgtatataatattccatgttgcatattaaaaacatgaatgttgtgcattttgtgattttggaaatactcaatgtggctcttctataggcttctagaataaaccgtggggacccgc

SEQ ID NO: 415863 - DNA, 2154 bp, Homo sapiens
agcgggagaggccgaggcgtagcctaagcgtgggattccgcgcgtgcgctcggctccgcctggtgcggccgcggccgggagggactggattatgtcggccccgtttgaggagcggagtggggtggtaccgtgcgggaccccgtggggccagtggtaccagaccttggaggaggtgttcattgaagttcaggtgccgccaggcacgcgcgcccaggatatccagtgcggcctccagagccggcatgtggcgctgtcggtgggcggccgcgagatcctcaagggcaaactctttgattctacaatagctgatgagggaacatggactttggaggacagaaaaatggttcgtattgttcttacaaagacaaagagagatgcagcaaattgttggacttctctactagaatctgaatatgcagcggatccttgggtgcaagaccaaatgcagagaaagcttacattagagagattccaaaaagaaaatcctggttttgacttcagtggagcagaaatctcaggaaactacactaaaggtggaccagatttctcaaaccttgagaaataactgctttttttcctgcattctgtggatcctagcagatattgccaacttaatcagataaacagattatgtaatggaagaaaaatgcggatgcctacagttaacagattgcaaaatgtatcttaaaatggttctaaaaattgcattcaaacataatttacataggaaatgtactgtgggaactattctatggatatatggtaaagttgttttggacttgtttttgctcagcatgaagttttatatgctgcattttactaattccatatttaaccatatttttaatacaaaagaacattagagtatagatcatgtgaaatgaagggtgcctttggggaaaattaactttttcttttgataagtatgatattcaataaaattttctaaataggaattgtgtacccctttgtctaagtataacaattcacacaaaattatagtgctgaaaacaattttaataaaggaaaaagtccataaatgtattttaagtaaattaagagttaatgtaaatttcttaattagaatattattacttgagggattactttatgtcaagaagtttaaaaatagttaaaaccctaacaatagaagtggattaacacaaaagagaagtgtgatcatggtaattaggtgagtcctttgtggcagaaagcaaagtaaggtcactaattgtatatcagtggcatcattttgattgtaagtgatttaggcatataggtaggaattgtctatagacattttattcaatatcctatttatgtcctttttattttttgccctttttaactcttgaaaaaattttaaatctcatgcatagaaaagttacagataatttttttctttctgaaccatttgtgatttagttgaagacatgattcctcattactgattactatctgcttcaaattatcttacatgactacaatgcaaccattagaatcaggaaatttacgttgacacattactaccctctaatcctcagatcttcacttcattcacattgaactgattgtcccaataatgtccatatagcaagaggatccagtcagaatcatgcctttcatttagatgtcagctgtctttagtttacttcattctggaacaaattctcatttgtttccttttacaacttagtacttttgacaattatgggctagttttgtagaacaccccttattttgagttctgtctgatacttcatgattagattgaggttattcatctttggcaggaatgtgatagaagtgcatcctgtcattgtttaataatttcagtttgtctcatttctgatggtgtttcttagatgactgattaaggtagtgtctgccagacttctccactgtagttatttttataattatttcttgagaagatagttgcaaaatactaccttgtttctgatcagactttaaatttatcgtatctctataaactcattattttctattttattcagcaggttaaaaaacctattatcattacattggtgctcaaaattattgtacatttggctggtagaagtccattctgggtggcctctgtgtccttctgacacattcccatcattattcaatgaatttgttactctctgg

SEQ ID NO: 415864 - DNA, 1142 bp, Homo sapiens
agcgggagaggccgaggcgtagcctaagcgtgggattccgcgcgtgcgctcggctccgcctggtgcggccgcggccgggagggactggattatgtcggccccgtttgaggagcggagtggggtggtaccgtgcgggaccccgtggggccagtggtaccagaccttggaggaggtgttcattgaagttcaggtgccgccaggcacgcgcgcccaggatatccagtgcggcctccagagccggcatgtggcgctgtcggtgggcggccgcgagatcctcaagggcaaactctttgattctacaatagctgatgagggaacatggactttggaggacagaaaaatggttcgtattgttcttacaaagacaaagagagatgcagcaaattgttggacttctctactagaatctgaatatgcagcggatccttgggtgcaagaccaaatgcagagaaagcttacattagagagattccaaaaagaaaatcctggttttgacttcagtggagcagaaatctcaggaaactacactaaaggtggaccagatttctcaaaccttgagaaataactgctttttttcctgcattctgtggatcctagcagatattgccaacttaatcagataaacagattatgtaatggaagaaaaatgcggatgcctacagttaacagattgcaaaatgtatcttaaaatggttctaaaaattgcattcaaacataatttacataggaaatgtactgtgggaactattctatggatatatggtaaagttgttttggacttgtttttgctcagcatgaagttttatatgctgcattttactaattccatatttaaccatatttttaatacaaaagaacattagagtatagatcatgtgaaatgaagggtgcctttggggaaaattaactttttcttttgataagtatgatattcaataaaattttctaaataggaattgtgtacccctttgtctaagtataacaattcacacaaaattatagtgctgaaaacaattttaataaaggaaaaagttaattttccccaaaggcacccttcatttcacatgatctatactctaatgttcttttgtattaaaaatatggttaaatatggaattagtaaaatgcagcgtcgacgcggg

SEQ ID NO: 415865 - DNA, 2689 bp, Homo sapiens
agcgggagaggccgaggcgtagcctaagcgtgggattccgcgcgtgcgctcggctccgcctggtgcggccgcggccgggagggactggattatgtcggccccgtttgaggagcggagtggggtggtaccgtgcgggaccccgtggggccagtggtaccagaccttggaggaggtgttcattgaagttcaggtgccgccaggcacgcgcgcccaggatatccagtgcggcctccagagccggcatgtggcgctgtcggtgggcggccgcgagatcctcaaggtagcggcagctcggggcttgtgttcagtttcctcttcccagacgcccccagccccgtttccctgaacgactgttgggtgtcccgacggctcctgtggctggcagaaagagaaagaggataacactgaccaggtttgggtctggtcagagcccccgcctcttcagggcaggtgctgagttgtggaaatttgaggagcctattttcgtgtttagttttcaaactaagactgctgcttctgcttctctgacgggcttcagctgggaacagattaactaggttgctaaaggaacaaatatttcttccgtgcactgaagacaggcaggaagacaacagataacgtacctgcagtggagaggttaagctcctgtacggaagcgtaattcataaatagataaatataggaaaggacaacaaagaaaatagggatagaataacgggcagagaatttagagatgatgtcaggtgattagttttctcatctaaaagcttgaaaatcctgcatgtttgtggagtggtcaagcaggtggtgaagagggcaaactctttgattctacaatagctgatgagggaacatggactttggaggacagaaaaatggttcgtattgttcttacaaagacaaagagagatgcagcaaattgttggacttctctactagaatctgaatatgcagcggatccttgggtgcaagaccaaatgcagagaaagcttacattagagagattccaaaaagaaaatcctggttttgacttcagtggagcagaaatctcaggaaactacactaaaggtggaccagatttctcaaaccttgagaaataactgctttttttcctgcattctgtggatcctagcagatattgccaacttaatcagataaacagattatgtaatggaagaaaaatgcggatgcctacagttaacagattgcaaaatgtatcttaaaatggttctaaaaattgcattcaaacataatttacataggaaatgtactgtgggaactattctatggatatatggtaaagttgttttggacttgtttttgctcagcatgaagttttatatgctgcattttactaattccatatttaaccatatttttaatacaaaagaacattagagtatagatcatgtgaaatgaagggtgcctttggggaaaattaactttttcttttgataagtatgatattcaataaaattttctaaataggaattgtgtacccctttgtctaagtataacaattcacacaaaattatagtgctgaaaacaattttaataaaggaaaaagtccataaatgtattttaagtaaattaagagttaatgtaaatttcttaattagaatattattacttgagggattactttatgtcaagaagtttaaaaatagttaaaaccctaacaatagaagtggattaacacaaaagagaagtgtgatcatggtaattaggtgagtcctttgtggcagaaagcaaagtaaggtcactaattgtatatcagtggcatcattttgattgtaagtgatttaggcatataggtaggaattgtctatagacattttattcaatatcctatttatgtcctttttattttttgccctttttaactcttgaaaaaattttaaatctcatgcatagaaaagttacagataatttttttctttctgaaccatttgtgatttagttgaagacatgattcctcattactgattactatctgcttcaaattatcttacatgactacaatgcaaccattagaatcaggaaatttacgttgacacattactaccctctaatcctcagatcttcacttcattcacattgaactgattgtcccaataatgtccatatagcaagaggatccagtcagaatcatgcctttcatttagatgtcagctgtctttagtttacttcattctggaacaaattctcatttgtttccttttacaacttagtacttttgacaattatgggctagttttgtagaacaccccttattttgagttctgtctgatacttcatgattagattgaggttattcatctttggcaggaatgtgatagaagtgcatcctgtcattgtttaataatttcagtttgtctcatttctgatggtgtttcttagatgactgattaaggtagtgtctgccagacttctccactgtagttatttttataattatttcttgagaagatagttgcaaaatactaccttgtttctgatcagactttaaatttatcgtatctctataaactcattattttctattttattcagcaggttaaaaaacctattatcattacattggtgctcaaaattattgtacatttggctggtagaagtccattctgggtggcctctgtgtccttctgacacattcccatcattattcaatgaatttgttactctctgg

SEQ ID NO: 415866 - DNA, 3021 bp, Homo sapiens
agcgggagaggccgaggcgtagcctaagcgtgggattccgcgcgtgcgctcggctccgcctggtgcggccgcggccgggagggactggattatgtcggccccgtttgaggagcggagtggggtggtaccgtgcgggaccccgtggggccagtggtaccagaccttggaggaggtgttcattgaagttcaggtgccgccaggcacgcgcgcccaggatatccagtgcggcctccagagccggcatgtggcgctgtcggtgggcggccgcgagatcctcaaggtagcggcagctcggggcttgtgttcagtttcctcttcccagacgcccccagccccgtttccctgaacgactgttgggtgtcccgacggctcctgtggctggcagaaagagaaagaggataacactgaccaggtttgggtctggtcagagcccccgcctcttcagggcaggtgctgagttgtggaaatttgaggagcctattttcgtgtttagttttcaaactaagactgctgcttctgcttctctgacgggcttcagctgggaacagattaactaggttgctaaaggaacaaatatttcttccgtgcactgaagacaggcaggaagacaacagataacgtacctgcagtggagaggttaagctcctgtacggaagcgtaattcataaatagataaatataggaaaggacaacaaagaaaatagggatagaataacgggcagagaatttagagatgatgtcaggtgattagttttctcatctaaaagcttgaaaatcctgcatgtttgtggagtggtcaagcaggtggtgaagaggtgtgtgcataaaataagtagtactccttttatttcttttcaccaatgctctttggatctggacccgctttttctttgttaagtgtataattaaactaacaggttgaaattagatttagttctcaggttagatgcccaagatgtttgatggcagtgtaatatggtgaagggagactacttgtttcctagttttgtaaacttgggcgagagattgttcagtgtctctatatcttccttatccacaagataaggtagttatagtacccttctcatgggattgttttgagcttaacatggtattcacgtgtatgaagagcttggagtattcactgggcaaactctttgattctacaatagctgatgagggaacatggactttggaggacagaaaaatggttcgtattgttcttacaaagacaaagagagatgcagcaaattgttggacttctctactagaatctgaatatgcagcggatccttgggtgcaagaccaaatgcagagaaagcttacattagagagattccaaaaagaaaatcctggttttgacttcagtggagcagaaatctcaggaaactacactaaaggtggaccagatttctcaaaccttgagaaataactgctttttttcctgcattctgtggatcctagcagatattgccaacttaatcagataaacagattatgtaatggaagaaaaatgcggatgcctacagttaacagattgcaaaatgtatcttaaaatggttctaaaaattgcattcaaacataatttacataggaaatgtactgtgggaactattctatggatatatggtaaagttgttttggacttgtttttgctcagcatgaagttttatatgctgcattttactaattccatatttaaccatatttttaatacaaaagaacattagagtatagatcatgtgaaatgaagggtgcctttggggaaaattaactttttcttttgataagtatgatattcaataaaattttctaaataggaattgtgtacccctttgtctaagtataacaattcacacaaaattatagtgctgaaaacaattttaataaaggaaaaagtccataaatgtattttaagtaaattaagagttaatgtaaatttcttaattagaatattattacttgagggattactttatgtcaagaagtttaaaaatagttaaaaccctaacaatagaagtggattaacacaaaagagaagtgtgatcatggtaattaggtgagtcctttgtggcagaaagcaaagtaaggtcactaattgtatatcagtggcatcattttgattgtaagtgatttaggcatataggtaggaattgtctatagacattttattcaatatcctatttatgtcctttttattttttgccctttttaactcttgaaaaaattttaaatctcatgcatagaaaagttacagataatttttttctttctgaaccatttgtgatttagttgaagacatgattcctcattactgattactatctgcttcaaattatcttacatgactacaatgcaaccattagaatcaggaaatttacgttgacacattactaccctctaatcctcagatcttcacttcattcacattgaactgattgtcccaataatgtccatatagcaagaggatccagtcagaatcatgcctttcatttagatgtcagctgtctttagtttacttcattctggaacaaattctcatttgtttccttttacaacttagtacttttgacaattatgggctagttttgtagaacaccccttattttgagttctgtctgatacttcatgattagattgaggttattcatctttggcaggaatgtgatagaagtgcatcctgtcattgtttaataatttcagtttgtctcatttctgatggtgtttcttagatgactgattaaggtagtgtctgccagacttctccactgtagttatttttataattatttcttgagaagatagttgcaaaatactaccttgtttctgatcagactttaaatttatcgtatctctataaactcattattttctattttattcagcaggttaaaaaacctattatcattacattggtgctcaaaattattgtacatttggctggtagaagtccattctgggtggcctctgtgtccttctgacacattcccatcattattcaatgaatttgttactctctgg

SEQ ID NO: 415867 - DNA, 954 bp, Homo sapiens
agcgggagaggccgaggcgtagcctaagcgtgggattccgcgcgtgcgctcggctccgcctggtgcggccgcggccgggagggactggattatgtcggccccgtttgaggagcggagtggggtggtaccgtgcgggaccccgtggggccagtggtaccagaccttggaggaggtgttcattgaagttcaggtgccgccaggcacgcgcgcccaggatatccagtgcggcctccagagccggcatgtggcgctgtcggtgggcggccgcgagatcctcaagggcaaactctttgattctacaatagctgatgagggaacatggactttggaggacagaaaaatggttcgtattgttcttacaaagacaaagagagatgcagcaaattgttggacttctctactagaatctgaatatgcagcggatccttgggtgcaagaccaaatgcagagaaagcttacattagagagattccaaaaagaaaatcctggttttgacttcagtggagcagaaatctcaggaaactacactaaaggtggaccagatttctcaaaccttgagaaataactgctttttttcctgcattctgtggatcctagcagatattgccaacttaatcagataaacagattatgtaatggaagaaaaatgcggatgcctacagttaacagattgcaaaatgtatcttaaaatggttctaaaaattgcattcaaacataatttacataggaaatgtactgtgggaactattctatggatatatggtaaagttgttttggacttgtttttgctcagcatgaagttttatatgctgcattttactaattccatatttaaccatatttttaatacaaaagaacattagagtatagatcatgtgaaatgaagggtgcctttggggaaaattaactttttcttttgataagtatgatattcaataaaattttctaaatagg

SEQ ID NO: 415868 - DNA, 2324 bp, Homo sapiens
agcgggagaggccgaggcgtagcctaagcgtgggattccgcgcgtgcgctcggctccgcctggtgcggccgcggccgggagggactggattatgtcggccccgtttgaggagcggagtggggtggtaccgtgcgggaccccgtggggccagtggtaccagaccttggaggaggtgttcattgaagttcaggtgccgccaggcacgcgcgcccaggatatccagtgcggcctccagagccggcatgtggcgctgtcggtgggcggccgcgagatcctcaaggtagcggcagctcggggcttgtgttcagtttcctcttcccagacgcccccagccccgtttccctgaacgactgttgggtgtcccgacggctcctgtggctggcagaaagagaaagaggataacactgaccaggtttgggtctggtcagagcccccgcctcttcagggcagggcaaactctttgattctacaatagctgatgagggaacatggactttggaggacagaaaaatggttcgtattgttcttacaaagacaaagagagatgcagcaaattgttggacttctctactagaatctgaatatgcagcggatccttgggtgcaagaccaaatgcagagaaagcttacattagagagattccaaaaagaaaatcctggttttgacttcagtggagcagaaatctcaggaaactacactaaaggtggaccagatttctcaaaccttgagaaataactgctttttttcctgcattctgtggatcctagcagatattgccaacttaatcagataaacagattatgtaatggaagaaaaatgcggatgcctacagttaacagattgcaaaatgtatcttaaaatggttctaaaaattgcattcaaacataatttacataggaaatgtactgtgggaactattctatggatatatggtaaagttgttttggacttgtttttgctcagcatgaagttttatatgctgcattttactaattccatatttaaccatatttttaatacaaaagaacattagagtatagatcatgtgaaatgaagggtgcctttggggaaaattaactttttcttttgataagtatgatattcaataaaattttctaaataggaattgtgtacccctttgtctaagtataacaattcacacaaaattatagtgctgaaaacaattttaataaaggaaaaagtccataaatgtattttaagtaaattaagagttaatgtaaatttcttaattagaatattattacttgagggattactttatgtcaagaagtttaaaaatagttaaaaccctaacaatagaagtggattaacacaaaagagaagtgtgatcatggtaattaggtgagtcctttgtggcagaaagcaaagtaaggtcactaattgtatatcagtggcatcattttgattgtaagtgatttaggcatataggtaggaattgtctatagacattttattcaatatcctatttatgtcctttttattttttgccctttttaactcttgaaaaaattttaaatctcatgcatagaaaagttacagataatttttttctttctgaaccatttgtgatttagttgaagacatgattcctcattactgattactatctgcttcaaattatcttacatgactacaatgcaaccattagaatcaggaaatttacgttgacacattactaccctctaatcctcagatcttcacttcattcacattgaactgattgtcccaataatgtccatatagcaagaggatccagtcagaatcatgcctttcatttagatgtcagctgtctttagtttacttcattctggaacaaattctcatttgtttccttttacaacttagtacttttgacaattatgggctagttttgtagaacaccccttattttgagttctgtctgatacttcatgattagattgaggttattcatctttggcaggaatgtgatagaagtgcatcctgtcattgtttaataatttcagtttgtctcatttctgatggtgtttcttagatgactgattaaggtagtgtctgccagacttctccactgtagttatttttataattatttcttgagaagatagttgcaaaatactaccttgtttctgatcagactttaaatttatcgtatctctataaactcattattttctattttattcagcaggttaaaaaacctattatcattacattggtgctcaaaattattgtacatttggctggtagaagtccattctgggtggcctctgtgtccttctgacacattcccatcattattcaatgaatttgttactctctgg

SEQ ID NO: 415869 - DNA, 1148 bp, Homo sapiens
agcgggagaggccgaggcgtagcctaagcgtgggattccgcgcgtgcgctcggctccgcctggtgcggccgcggccgggagggactggattatgtcggccccgtttgaggagcggagtggggtggtaccgtgcgggaccccgtggggccagtggtaccagaccttggaggaggtgttcattgaagttcaggtgccgccaggcacgcgcgcccaggatatccagtgcggcctccagagccggcatgtggcgctgtcggtgggcggccgcgagatcctcaagggcaaactctttgattctacaatagctgatgagggaacatggactttggaggacagaaaaatggttcgtattgttcttacaaagacaaagagagatgcagcaaattgttggacttctctactagaatctgaatatgcagcggatccttgggtgcaagaccaaatgcagagaaagcttacattagagagattccaaaaagaaaatcctggttttgacttcagtggagcagaaatctcaggaaactacactaaaggtggaccagatttctcaaaccttgagaaataactgctttttttcctgcattctgtggatcctagcagatattgccaacttaatcagataaacagattatgtaatggaagaaaaatgcggatgcctacagttaacagattgcaaaatgtatcttaaaatggttctaaaaattgcattcaaacataatttacataggaaatgtactgtgggaactattctatggatatatggtaaagttgttttggacttgtttttgctcagcatgaagttttatatgctgcattttactaattccatatttaaccatatttttaatacaaaagaacattagagtatagatcatgtgaaatgaagggtgcctttggggaaaattaactttttcttttgataagtatgatattcaataaaattttctaaataggggaaaaaaaaaaaaaaaaaaaaaaaaaaaaaagaaaaaaaaaaaacaaaaagaagaagccgaaacaaggaagaaaaaataataaatgggggagacccaccacttatgggaacccacgaggaggcccccctaacagggggtcgcccctccaacgacggggcccccccccgcgcgcccccgcggccgggccttgaa

SEQ ID NO: 415870 - DNA, 1713 bp, Homo sapiens
  misc_feature (42)..(42): n is a, c, g, or t
  misc_feature (173)..(173): n is a, c, g, or t
ttcccttcccacaaaaacccccttttggaaggaagaaaattnaaggcttgggctttgtgtattttttccccttgcccatttttgcttgggttgggaaattgcccctaaagcccaagaattaatttggcccaaagcttaaattcgagaattaaaaccaaggaatttaattggtnaaattgggaaaggaaaaaatgccggaatggcctaccagtttaaacccagattttggcccaaaaatgtatcttaaaatggttctaaaaattgcattcaaacataatttacataggaaatgtactgtgggaactattctatggatatatggtaaagttgttttggacttgtttttgctcagcatgaagttttatatgctgcattttactaattccatatttaaccatatttttaatacaaaagaacattagagtatagatcatgtgaaatgaagggtgcctttggggaaaattaactttttcttttgataagtatgatattcaataaaattttctaaataggaattgtgtacccctttgtctaagtataacaattcacacaaaattatagtgctgaaaacaattttaataaaggaaaaagtccataaatgtattttaagtaaattaagagttaatgtaaatttcttaattagaatattattacttgagggattactttatgtcaagaagtttaaaaatagttaaaaccctaacaatagaagtggattaacacaaaagagaagtgtgatcatggtaattaggtgagtcctttgtggcagaaagcaaagtaaggtcactaattgtatatcagtggcatcattttgattgtaagtgatttaggcatataggtaggaattgtctatagacattttattcaatatcctatttatgtcctttttattttttgccctttttaactcttgaaaaaattttaaatctcatgcatagaaaagttacagataatttttttctttctgaaccatttgtgatttagttgaagacatgattcctcattactgattactatctgcttcaaattatcttacatgactacaatgcaaccattagaatcaggaaatttacgttgacacattactaccctctaatcctcagatcttcacttcattcacattgaactgattgtcccaataatgtccatatagcaagaggatccagtcagaatcatgcctttcatttagatgtcagctgtctttagtttacttcattctggaacaaattctcatttgtttccttttacaacttagtacttttgacaattatgggctagttttgtagaacaccccttattttgagttctgtctgatacttcatgattagattgaggttattcatctttggcaggaatgtgatagaagtgcatcctgtcattgtttaataatttcagtttgtctcatttctgatggtgtttcttagatgactgattaaggtagtgtctgccagacttctccactgtagttatttttataattatttcttgagaagatagttgcaaaatactaccttgtttctgatcagactttaaatttatcgtatctctataaactcattattttctattttattcagcaggttaaaaaacctattatcattacattggtgctcaaaattattgtacatttggctggtagaagtccattctgggtggcctctgtgtccttctgacacattcccatcattattcaatgaatttgttactctctgg

SEQ ID NO: 415871 - DNA, 543 bp, Homo sapiens
cataaatagataaatataggaaaggacaacaaagaaaatagggatagaataacgggcagagaatttagagatgatgtcaggtgattagttttctcatctaaaagcttgaaaatcctgcatgtttgtggagtggtcaagcaggtggtgaagaggtgtgtgcataaaataagtagtactccttttatttcttttcaccaatgctctttggatctggacccgctttttctttgttaagtgtataattaaactaacaggttgaaattagatttagttctcaggttagatgcccaagatgtttgatggcagtgtaatatggtgaagggagactacttgtttcctagttttgtaaacttgggcgagagattgttcagtgtctctatatcttccttatccacaagataaggtagttatagtacccttctcatgggattgttttgagcttaacatggtattcacgtgtatgaagagcttggagtattcactggtatgtaataagttcatactatatgttagctattagctattatatatattacagtatat

SEQ ID NO: 415872 - DNA, 5997 bp, Homo sapiens
gtgtgggactgccgctctgcgcggcgagaggtggcctgggaatggccgggccgggggtgggccggagccgctgtggcggcggcggcggctgggggcggtgagcgcggcgtggggctgcccctccccggaggcggcgggggcggccggggccgcgccgcaccgcaccgcgcgggcggccatggagcgagcctagggcccgacaggaactgtggaaggtgcatcagtgaagaaatggaccaatgtgtataatcatggaatctccttgctaaccatcaccaccagctctccttaatacatgagcaagagtgggtcaggggagaaggaaaagaggtcaacatgaagctaaagcagcgagtcgtgctgttagcaattctccttgtcatttttatcttcaccaaagttttcctgattgacaacttagatacatcagctgccaaccgggaggaccagagggcctttcaccgaatgatgactggcttgcgggtggagctggcacccaagctggaccataccttgcagtctccctgggagattgcagcccagtgggtggttccccgggaagtgtaccctgaagagacaccagagctgggggcagtcatgcatgccatggccaccaagaaaatcattaaagctgatgtgggttataaagggacacagctgaaagccttactgatacttgaaggaggccagaaagttgttttcaaacctaagcggtatagccgagaccatgtggtggaaggggaaccgtatgctggttatgatagacacaatgcagaggtagcagcctttcacttggacaggattctgggtttccaccgagcccccttggtagttggcagatttgttaatcttcggacagagatcaaacctgtcgccacagagcagctgttgagcaccttcctaactgtaggaaacaatacttgtttttatgggaagtgctattactgccgagaaacagaaccagcttgtgctgatggagacataatggagggatctgtcacactttggcttccagatgtgtggcctctgcagaagcaccgtcacccatggggcaggacttaccgagaaggcaaattggccaggtgggagtatgatgagagctactgtgatgctgtgaagaaaacgtccccttatgactctggcccgcgcctcttggacatcattgacacagctgtctttgattacctgattggcaatgctgaccgccatcactatgagagctttcaagatgatgaaggcgctagtatgctcatccttcttgataatgccaaaagctttgggaacccctcgctggatgaaagaagcattcttgcccctctctatcagtgttgcatcattcgggtgtccacctggaacagactgaactacctaaagaatggtgtgctaaagtctgccttaaaatctgccatggcccatgaccccatctccccagtgctctctgatcctcatctggacgccgtggaccagcggctcctgagtgtcctggccaccgtgaagcagtgcaccgaccagtttgggatggacacagtactggtggaagacaggatgcctctctcacacttgtaattctcgacacaaaataagtgaaacttctttttacaaagatagagaaacagcacaatcaattccaaatggtatgagatggattggaagtggccagcagcaagttctggtgacaggacagggtggccttggatgtctttggtattttctgtagtagaaactaaagcaaagaccacaagtttcagagcatggagacattcctgctgaatcgccttctcacctcctcggcaattgctcattctagggttgggcatcatagttggtcagtcttaattcccatgccaaaggacaaacaggtgtgacatttggatagatgaatactgggattggctctggagcatgtgttttgagttgaaccttgcagtcctttctctacgcccgtggattttgtggaaacactttgcaatctctttgtctttttttttttaccagaactagttacattggaatgcttactgtcctacagagtggcagcaaataaaaccttgcattccatcaagccaaaatagcacactctgttagaggagatacatgtttaagatagaattggagggaaggacaaaaacagaaaaatgtttgggcttttaagccattgggtagtattgttttgatgatcttagaggagggaagaagagagagagacccaatggtagaaccagaatcagggagatgactgaactactgaaaaacaggttcccttgtatttaggatcttaaggtgtataaaaagcaaacatgactttgcacctaagtaaattctgcattctcatagttgtgtcccaattaaccaaaaagttgtctctagagaaaatactattacaatctaagcatgattctctgtggagactaattttttccccttttgccaaaagcagtccttcccaaattaacaaagcaaactgaaataataccttgaataacaggttgcctgtggtctctgtcatcctcgtttctcttctgaaatgaatttccacctctgcctttaaggcatttttgtcactgaagctgctgttcccaagagatcggcaacctttttgtccctttctcataagaaagggacactcctacaggtgagagtgtataccttactctctcagataagtggctggacttatcttgtgatttggggccatggaagattggaaacaaagattttaagccttcttctttttttcttttttcttttttttttgagaccaagtctcacctgttgcccaggctggagtgcagtggcacgatcttggctcactgcaacctccgtctcccaggttcaagcgattctcttgcctcagcctccagagtagctgggattacaggcgcccgccatcgtgcccagctaatttttatatttttagtggagacagggtttcgggtttcaccatgttggccaggttgatcttggactcctgaccccaggtgatccacctgcctcagccttccaaagtgctgggattacaggcatgagccaccgtggccggccaagattttaagccttctgagccttgaaattgaggaggttaaaaggaagagccttaagattttgatttatgtcaaatcctaattctatcattcagtcttgtttggagttctgaacccatgatgttgtattatgcttctttctcctcttagcactctcaaatttcaggtttgtaaaacacagtttttgttttgtgttctggcaaagtgatctcaacatgtaagtagttgcagtaaaacacaggggcaaaggaagacaggcctgatgtgcccactcatctatggactcagagctgtgtgctttgctcctgcatcttgttgaggtgctgttccagctttgcatttctgtcaagtagaggcgaatatataaacagtgtggttgaatacatttaatgccagccattggaaactagttttaggcaaccactctcaaaaacagctttagaatttatgcccagttttcttgcattgaaagataactgagtaataacctgtaactatttttaaatggcatgaaattaggaaacttttgtacattttatatacattttgagatgaacagaacaatgggctgagttataaaaagcgtgtattgaatttaagaagacagactagcacaaaacacagaattcgtgttaaccaaaggaggcattgatttcagttttaaggctactcagtgttgtgtgtccagggaaattcacagctcagtatgagaataccttggttagtgctcacccacaagcttccaggagccagctgggaggagacaataggaagagatgtcagctctgctctccctgtaaatgttagttgaactaagttatggatttgtggtctttcaaatacatgacgcctttagtatgccacactgaaatgaataagaagtcttctgaaactgggaacttcataacattgaaggcagaagattctgctaaggaaaaaagcaggcaggaaagaaaatgtctcatcctttcttgaaagcatttgcagaaaatatatcatttcattttattcccatctgttttcaaactcgtgatcttaaaaggcattctgatgataaatttagaattttcatctataaaatttagaactctaatccataaagttagaattgagctaatagagtggtatgacatggcactaaaaatataaatttttgttgtaagtcaggattggagtaagctggaaaagtatgtttaggcaaatcttggagaaaaccaaccataaacttacagctctaaaattcagaaagccctaaaatttcaaacactgtttgaaagaagaggtgggggccgggtgccgtggctcatgcctgtcatcccagcatttgggaggctgaggcaggcagatcacctgaggccaggagttcgagaccagcctggctggctagcatggtgagaccgtctctactaaaaatgcaaaaattaacagggcacggtggcatgcgcctgtagtcccagctactcgggaggctgaggcaggagaatcacttgaatccaggaggcgaaggttgcagtgagctgagattgtgctgctgcactccagcctgggagacagagcgagactctgtcttaaaaaaaaaaaaaggaggtgaatttttttttaagttttgtaacactgtcctactttatttattagaatctaaggctgttacaatcaagtcgttgcagggtttggatcagctgtaagttaggtatgcctaccaaacatccaaaggtagacgtggagacattttaatactacaaaactaggaaaatcagaactcatggccatttcctgccctcctccaacttgttaaaacatgtttattctaaagttcgaatggataaatttgagtataaaggttttgttataaaactgttctttagtgtaaggctgcattgtgggtttgggggaaatgtaaataattttctgtgtaaaacaaattcataggatctgatttgctcagagtattattcaagaatgtattaataaggcattgccccctgtttgcactcagggttaatatgtcaaatgaaatttaagaaggaaatggaagaattcaggtacattaattgcatattattttgggaaagatgagtcctatacgtggcaatttttcaatgtcatctgaagccagcattatcttccaaagaaatcgatcttttttttctaaaaaaaaaaaatgcttttgccttcccttcccttcccatccgccatatttcttcagcctttcttctcgatcacccgtgtattctttgaccagtaaatgaccacacctcaatgatggtaaaacagcatcatcagtaagctatcttatatgcctcatcctgtgagtttgagcttcaggaaacatgagtaaaagtatatgtaatgtatatagtcgtatatgtattctagcaagaaaaacatatttattttgacaaaggggaacactgactttctgaaggattcagaaagaaccttagtgaaaggttctcagtctctgagagtggaccctaattaacataaagaccattcatcagcgaataactactgagcaactctagtgtgccagcacaggccagacatactagtgagccaggcacatctggccttgggaaactcatcctacaggggaaggccagtttttttcccttcaattcctcaagtctgggtggtgacaaggtaggggctaggtactggactaccacaggtttttaggaactaaggtgtttctcataaacacaaaatgttgggtgaaactgggaacaactactcagaagctaatttatttgcttaaatggaaagtgtgggagccactaccctctcttttgatctgccaaggatttcctctcagagctgttgcacagacagagattgtacttggtaagataccaaacaagacagatatggatctaaatttctaatgtgttctatgggtttcaattctgaaaaaagaaaatgaataaagattttaataaatattgatatctgaact

SEQ ID NO: 415873 - DNA, 5583 bp, Homo sapiens
ctaccttttatctgtactaaaactacatcaaaagccctttagtggggcaaaaatgacagcttccatgttttattcttagaatgattggtgacgtagatagagaattctagtttccttctctacctcatcttcattccatctaccggcaattcatgctaatccacagttgtttgcagggttgacagagaaggtgactatagcagaatcaggcttgctaatgggtgtattctaccacttgtgctgtcacctgttactggtgtaatccacgtatacatctgtgcttcccattcactttgcaggtatagccgagaccatgtggtggaaggggaaccgtatgctggttatgatagacacaatgcagaggtagcagcctttcacttggacaggattctgggtttccaccgagcccccttggtagttggcagatttgttaatcttcggacagagatcaaacctgtcgccacagagcagctgttgagcaccttcctaactgtaggaaacaatacttgtttttatgggaagtgctattactgccgagaaacagaaccagcttgtgctgatggagacataatggagggatctgtcacactttggcttccagatgtgtggcctctgcagaagcaccgtcacccatggggcaggacttaccgagaaggcaaattggccaggtgggagtatgatgagagctactgtgatgctgtgaagaaaacgtccccttatgactctggcccgcgcctcttggacatcattgacacagctgtctttgattacctgattggcaatgctgaccgccatcactatgagagctttcaagatgatgaaggcgctagtatgctcatccttcttgataatgccaaaagctttgggaacccctcgctggatgaaagaagcattcttgcccctctctatcagtgttgcatcattcgggtgtccacctggaacagactgaactacctaaagaatggtgtgctaaagtctgccttaaaatctgccatggcccatgaccccatctccccagtgctctctgatcctcatctggacgccgtggaccagcggctcctgagtgtcctggccaccgtgaagcagtgcaccgaccagtttgggatggacacagtactggtggaagacaggatgcctctctcacacttgtaattctcgacacaaaataagtgaaacttctttttacaaagatagagaaacagcacaatcaattccaaatggtatgagatggattggaagtggccagcagcaagttctggtgacaggacagggtggccttggatgtctttggtattttctgtagtagaaactaaagcaaagaccacaagtttcagagcatggagacattcctgctgaatcgccttctcacctcctcggcaattgctcattctagggttgggcatcatagttggtcagtcttaattcccatgccaaaggacaaacaggtgtgacatttggatagatgaatactgggattggctctggagcatgtgttttgagttgaaccttgcagtcctttctctacgcccgtggattttgtggaaacactttgcaatctctttgtctttttttttttaccagaactagttacattggaatgcttactgtcctacagagtggcagcaaataaaaccttgcattccatcaagccaaaatagcacactctgttagaggagatacatgtttaagatagaattggagggaaggacaaaaacagaaaaatgtttgggcttttaagccattgggtagtattgttttgatgatcttagaggagggaagaagagagagagacccaatggtagaaccagaatcagggagatgactgaactactgaaaaacaggttcccttgtatttaggatcttaaggtgtataaaaagcaaacatgactttgcacctaagtaaattctgcattctcatagttgtgtcccaattaaccaaaaagttgtctctagagaaaatactattacaatctaagcatgattctctgtggagactaattttttccccttttgccaaaagcagtccttcccaaattaacaaagcaaactgaaataataccttgaataacaggttgcctgtggtctctgtcatcctcgtttctcttctgaaatgaatttccacctctgcctttaaggcatttttgtcactgaagctgctgttcccaagagatcggcaacctttttgtccctttctcataagaaagggacactcctacaggtgagagtgtataccttactctctcagataagtggctggacttatcttgtgatttggggccatggaagattggaaacaaagattttaagccttcttctttttttcttttttcttttttttttgagaccaagtctcacctgttgcccaggctggagtgcagtggcacgatcttggctcactgcaacctccgtctcccaggttcaagcgattctcttgcctcagcctccagagtagctgggattacaggcgcccgccatcgtgcccagctaatttttatatttttagtggagacagggtttcgggtttcaccatgttggccaggttgatcttggactcctgaccccaggtgatccacctgcctcagccttccaaagtgctgggattacaggcatgagccaccgtggccggccaagattttaagccttctgagccttgaaattgaggaggttaaaaggaagagccttaagattttgatttatgtcaaatcctaattctatcattcagtcttgtttggagttctgaacccatgatgttgtattatgcttctttctcctcttagcactctcaaatttcaggtttgtaaaacacagtttttgttttgtgttctggcaaagtgatctcaacatgtaagtagttgcagtaaaacacaggggcaaaggaagacaggcctgatgtgcccactcatctatggactcagagctgtgtgctttgctcctgcatcttgttgaggtgctgttccagctttgcatttctgtcaagtagaggcgaatatataaacagtgtggttgaatacatttaatgccagccattggaaactagttttaggcaaccactctcaaaaacagctttagaatttatgcccagttttcttgcattgaaagataactgagtaataacctgtaactatttttaaatggcatgaaattaggaaacttttgtacattttatatacattttgagatgaacagaacaatgggctgagttataaaaagcgtgtattgaatttaagaagacagactagcacaaaacacagaattcgtgttaaccaaaggaggcattgatttcagttttaaggctactcagtgttgtgtgtccagggaaattcacagctcagtatgagaataccttggttagtgctcacccacaagcttccaggagccagctgggaggagacaataggaagagatgtcagctctgctctccctgtaaatgttagttgaactaagttatggatttgtggtctttcaaatacatgacgcctttagtatgccacactgaaatgaataagaagtcttctgaaactgggaacttcataacattgaaggcagaagattctgctaaggaaaaaagcaggcaggaaagaaaatgtctcatcctttcttgaaagcatttgcagaaaatatatcatttcattttattcccatctgttttcaaactcgtgatcttaaaaggcattctgatgataaatttagaattttcatctataaaatttagaactctaatccataaagttagaattgagctaatagagtggtatgacatggcactaaaaatataaatttttgttgtaagtcaggattggagtaagctggaaaagtatgtttaggcaaatcttggagaaaaccaaccataaacttacagctctaaaattcagaaagccctaaaatttcaaacactgtttgaaagaagaggtgggggccgggtgccgtggctcatgcctgtcatcccagcatttgggaggctgaggcaggcagatcacctgaggccaggagttcgagaccagcctggctggctagcatggtgagaccgtctctactaaaaatgcaaaaattaacagggcacggtggcatgcgcctgtagtcccagctactcgggaggctgaggcaggagaatcacttgaatccaggaggcgaaggttgcagtgagctgagattgtgctgctgcactccagcctgggagacagagcgagactctgtcttaaaaaaaaaaaaaggaggtgaatttttttttaagttttgtaacactgtcctactttatttattagaatctaaggctgttacaatcaagtcgttgcagggtttggatcagctgtaagttaggtatgcctaccaaacatccaaaggtagacgtggagacattttaatactacaaaactaggaaaatcagaactcatggccatttcctgccctcctccaacttgttaaaacatgtttattctaaagttcgaatggataaatttgagtataaaggttttgttataaaactgttctttagtgtaaggctgcattgtgggtttgggggaaatgtaaataattttctgtgtaaaacaaattcataggatctgatttgctcagagtattattcaagaatgtattaataaggcattgccccctgtttgcactcagggttaatatgtcaaatgaaatttaagaaggaaatggaagaattcaggtacattaattgcatattattttgggaaagatgagtcctatacgtggcaatttttcaatgtcatctgaagccagcattatcttccaaagaaatcgatcttttttttctaaaaaaaaaaaatgcttttgccttcccttcccttcccatccgccatatttcttcagcctttcttctcgatcacccgtgtattctttgaccagtaaatgaccacacctcaatgatggtaaaacagcatcatcagtaagctatcttatatgcctcatcctgtgagtttgagcttcaggaaacatgagtaaaagtatatgtaatgtatatagtcgtatatgtattctagcaagaaaaacatatttattttgacaaaggggaacactgactttctgaaggattcagaaagaaccttagtgaaaggttctcagtctctgagagtggaccctaattaacataaagaccattcatcagcgaataactactgagcaactctagtgtgccagcacaggccagacatactagtgagccaggcacatctggccttgggaaactcatcctacaggggaaggccagtttttttcccttcaattcctcaagtctgggtggtgacaaggtaggggctaggtactggactaccacaggtttttaggaactaaggtgtttctcataaacacaaaatgttgggtgaaactgggaacaactactcagaagctaatttatttgcttaaatggaaagtgtgggagccactaccctctcttttgatctgccaaggatttcctctcagagctgttgcacagacagagattgtacttggtaagataccaaacaagacagatatggatctaaatttctaatgtgttctatgggtttcaattctgaaaaaagaaaatgaataaagattttaataaatattgatatctgaact

SEQ ID NO: 415874 - DNA, 4188 bp, Homo sapiens
gtgtgggactgccgctctgcgcggcgagaggtggcctgggaatggccgggccgggggtgggccggagccgctgtggcggcggcggcggctgggggcggtgagcgcggcgtggggctgcccctccccggaggcggcgggggcggccggggccgcgccgcaccgcaccgcgcgggcggccatggagcgagcctagggcccgacaggaactgtggaaggtgcatcagtgaagaaatggaccaatgtgtataatcatggaatctccttgctaaccatcaccaccagctctccttaatacatgagcaagagtgggtcaggggagaaggaaaagaggtcaacatgaagctaaagcagcgagtcgtgctgttagcaattctccttgtcatttttatcttcaccaaagttttcctgattgacaacttagatacatcagctgccaaccgggaggaccagagggcctttcaccgaatgatgactggcttgcgggtggagctggcacccaagctggaccataccttgcagtctccctgggagattgcagcccagtgggtggttccccgggaagtgtaccctgaagagacaccagagctgggggcagtcatgcatgccatggccaccaagaaaatcattaaagctgatgtgggttataaagggacacagctgaaagccttactgatacttgaaggaggccagaaagttgttttcaaacctaagcggtatagccgagaccatgtggtggaaggggaaccgtatgctggttatgatagacacaatgcagaggtagcagcctttcacttggacaggattctgggtttccaccgagcccccttggtagttggcagatttgttaatcttcggacagagatcaaacctgtcgccacagagcagctgttgagcaccttcctaactgtaggaaacaatacttgtttttatgggaagtgctattactgccgagaaacagaaccagcttgtgctgatggagacataatggagggatctgtcacactttggcttccagatgtgtggcctctgcagaagcaccgtcacccatggggcaggacttaccgagaaggcaaattggccaggtgggagtatgatgagagctactgtgatgctgtgaagaaaacgtccccttatgactctggcccgcgcctcttggacatcattgacacagctgtctttgattacctgattggcaatgctgaccgccatcactatgagagctttcaagatgatgaaggcgctagtatgctcatccttcttgataatgccaaaagctttgggaacccctcgctggatgaaagaagcattcttgcccctctctatcagtgttgcatcattcgggtgtccacctggaacagactgaactacctaaagaatggtgtgctaaagtctgccttaaaatctgccatggcccatgaccccatctccccagtgctctctgatcctcatctggacgccgtggaccagcggctcctgagtgtcctggccaccgtgaagcagtgcaccgaccagtttgggatggacacagtactggtggaagacaggatgcctctctcacacttgtaattctcgacacaaaataagtgaaacttctttttacaaagatagagaaacagcacaatcaattccaaatggtatgagatggattggaagtggccagcagcaagttctggtgacaggacagggtggccttggatgtctttggtattttctgtagtagaaactaaagcaaagaccacaagtttcagagcatggagacattcctgctgaatcgccttctcacctcctcggcaattgctcattctagggttgggcatcatagttggtcagtcttaattcccatgccaaaggacaaacaggtgtgacatttggatagatgaatactgggattggctctggagcatgtgttttgagttgaaccttgcagtcctttctctacgcccgtggattttgtggaaacactttgcaatctctttgtctttttttttttaccagaactagttacattggaatgcttactgtcctacagagtggcagcaaataaaaccttgcattccatcaagccaaaatagcacactctgttagaggagatacatgtttaagatagaattggagggaaggacaaaaacagaaaaatgtttgggcttttaagccattgggtagtattgttttgatgatcttagaggagggaagaagagagagagacccaatggtagaaccagaatcagggagatgactgaactactgaaaaacaggttcccttgtatttaggatcttaaggtgtataaaaagcaaacatgactttgcacctaagtaaattctgcattctcatagttgtgtcccaattaaccaaaaagttgtctctagagaaaatactattacaatctaagcatgattctctgtggagactaattttttccccttttgccaaaagcagtccttcccaaattaacaaagcaaactgaaataataccttgaataacaggttgcctgtggtctctgtcatcctcgtttctcttctgaaatgaatttccacctctgcctttaaggcatttttgtcactgaagctgctgttcccaagagatcggcaacctttttgtccctttctcataagaaagggacactcctacaggtgagagtgtataccttactctctcagataagtggctggacttatcttgtgatttggggccatggaagattggaaacaaagattttaagccttcttctttttttcttttttcttttttttttgagaccaagtctcactccagcctgggagacagagcgagactctgtcttaaaaaaaaaaaaaggaggtgaatttttttttaagttttgtaacactgtcctactttatttattagaatctaaggctgttacaatcaagtcgttgcagggtttggatcagctgtaagttaggtatgcctaccaaacatccaaaggtagacgtggagacattttaatactacaaaactaggaaaatcagaactcatggccatttcctgccctcctccaacttgttaaaacatgtttattctaaagttcgaatggataaatttgagtataaaggttttgttataaaactgttctttagtgtaaggctgcattgtgggtttgggggaaatgtaaataattttctgtgtaaaacaaattcataggatctgatttgctcagagtattattcaagaatgtattaataaggcattgccccctgtttgcactcagggttaatatgtcaaatgaaatttaagaaggaaatggaagaattcaggtacattaattgcatattattttgggaaagatgagtcctatacgtggcaatttttcaatgtcatctgaagccagcattatcttccaaagaaatcgatcttttttttctaaaaaaaaaaaatgcttttgccttcccttcccttcccatccgccatatttcttcagcctttcttctcgatcacccgtgtattctttgaccagtaaatgaccacacctcaatgatggtaaaacagcatcatcagtaagctatcttatatgcctcatcctgtgagtttgagcttcaggaaacatgagtaaaagtatatgtaatgtatatagtcgtatatgtattctagcaagaaaaacatatttattttgacaaaggggaacactgactttctgaaggattcagaaagaaccttagtgaaaggttctcagtctctgagagtggaccctaattaacataaagaccattcatcagcgaataactactgagcaactctagtgtgccagcacaggccagacatactagtgagccaggcacatctggccttgggaaactcatcctacaggggaaggccagtttttttcccttcaattcctcaagtctgggtggtgacaaggtaggggctaggtactggactaccacaggtttttaggaactaaggtgtttctcataaacacaaaatgttgggtgaaactgggaacaactactcagaagctaatttatttgcttaaatggaaagtgtgggagccactaccctctcttttgatctgccaaggatttcctctcagagctgttgcacagacagagattgtacttggtaagataccaaacaagacagatatggatctaaatttctaatgtgttctatgggtttcaattctgaaaaaagaaaatgaataaagattttaataaatattgatatctgaact

SEQ ID NO: 415875 - DNA, 5638 bp, Homo sapiens
ctaccttttatctgtactaaaactacatcaaaagccctttagtggggcaaaaatgacagcttccatgttttattcttagaatgattggtgacgtagatagagaattctagtttccttctctacctcatcttcattccatctaccggcaattcatgctaatccacagttgtttgcagggttgacagagaaggtgactatagcagaatcaggcttgctaatgggtgtattctaccacttgtgctgtcacctgttactggtgtaatccacgtatacatctgtgcttcccattcactttgcaggtatagccgagaccatgtggtggaaggggaaccgtatgctggttatgatagacacaatgcagaggtagcagcctttcacttggacaggattctgggtttccaccgagcccccttggtagttggcagatttgttaatcttcggacagagatcaaacctgtcgccacagagcagctgttgagcaccttcctaactgtaggaaacaatacttgtttttatgggaagtgctattactgccgagaaacagaaccagcttgtgctgatggagacataatggagggatctgtcacactttggcttccagatgtgtggcctctgcagaagcaccgtcacccatggggcaggacttaccgagaaggcaaattggccaggtgggagtatgatgagagctactgtgatgctgtgaagaaaacgtccccttatgactctggcccgcgcctcttggacatcattgacacagctgtctttgattacctgattggcaatgctgaccgccatcactatgagagctttcaagatgatgaaggcgctagtatgctcatccttcttgataatgccaaaagctttgggaacccctcgctggatgaaagaagcattcttgcccctctctatcagtgttgcatgtaagttatgcacagcaaatacatgtgcctgcattgccttcttttccaggctcagcattcgggtgtccacctggaacagactgaactacctaaagaatggtgtgctaaagtctgccttaaaatctgccatggcccatgaccccatctccccagtgctctctgatcctcatctggacgccgtggaccagcggctcctgagtgtcctggccaccgtgaagcagtgcaccgaccagtttgggatggacacagtactggtggaagacaggatgcctctctcacacttgtaattctcgacacaaaataagtgaaacttctttttacaaagatagagaaacagcacaatcaattccaaatggtatgagatggattggaagtggccagcagcaagttctggtgacaggacagggtggccttggatgtctttggtattttctgtagtagaaactaaagcaaagaccacaagtttcagagcatggagacattcctgctgaatcgccttctcacctcctcggcaattgctcattctagggttgggcatcatagttggtcagtcttaattcccatgccaaaggacaaacaggtgtgacatttggatagatgaatactgggattggctctggagcatgtgttttgagttgaaccttgcagtcctttctctacgcccgtggattttgtggaaacactttgcaatctctttgtctttttttttttaccagaactagttacattggaatgcttactgtcctacagagtggcagcaaataaaaccttgcattccatcaagccaaaatagcacactctgttagaggagatacatgtttaagatagaattggagggaaggacaaaaacagaaaaatgtttgggcttttaagccattgggtagtattgttttgatgatcttagaggagggaagaagagagagagacccaatggtagaaccagaatcagggagatgactgaactactgaaaaacaggttcccttgtatttaggatcttaaggtgtataaaaagcaaacatgactttgcacctaagtaaattctgcattctcatagttgtgtcccaattaaccaaaaagttgtctctagagaaaatactattacaatctaagcatgattctctgtggagactaattttttccccttttgccaaaagcagtccttcccaaattaacaaagcaaactgaaataataccttgaataacaggttgcctgtggtctctgtcatcctcgtttctcttctgaaatgaatttccacctctgcctttaaggcatttttgtcactgaagctgctgttcccaagagatcggcaacctttttgtccctttctcataagaaagggacactcctacaggtgagagtgtataccttactctctcagataagtggctggacttatcttgtgatttggggccatggaagattggaaacaaagattttaagccttcttctttttttcttttttcttttttttttgagaccaagtctcacctgttgcccaggctggagtgcagtggcacgatcttggctcactgcaacctccgtctcccaggttcaagcgattctcttgcctcagcctccagagtagctgggattacaggcgcccgccatcgtgcccagctaatttttatatttttagtggagacagggtttcgggtttcaccatgttggccaggttgatcttggactcctgaccccaggtgatccacctgcctcagccttccaaagtgctgggattacaggcatgagccaccgtggccggccaagattttaagccttctgagccttgaaattgaggaggttaaaaggaagagccttaagattttgatttatgtcaaatcctaattctatcattcagtcttgtttggagttctgaacccatgatgttgtattatgcttctttctcctcttagcactctcaaatttcaggtttgtaaaacacagtttttgttttgtgttctggcaaagtgatctcaacatgtaagtagttgcagtaaaacacaggggcaaaggaagacaggcctgatgtgcccactcatctatggactcagagctgtgtgctttgctcctgcatcttgttgaggtgctgttccagctttgcatttctgtcaagtagaggcgaatatataaacagtgtggttgaatacatttaatgccagccattggaaactagttttaggcaaccactctcaaaaacagctttagaatttatgcccagttttcttgcattgaaagataactgagtaataacctgtaactatttttaaatggcatgaaattaggaaacttttgtacattttatatacattttgagatgaacagaacaatgggctgagttataaaaagcgtgtattgaatttaagaagacagactagcacaaaacacagaattcgtgttaaccaaaggaggcattgatttcagttttaaggctactcagtgttgtgtgtccagggaaattcacagctcagtatgagaataccttggttagtgctcacccacaagcttccaggagccagctgggaggagacaataggaagagatgtcagctctgctctccctgtaaatgttagttgaactaagttatggatttgtggtctttcaaatacatgacgcctttagtatgccacactgaaatgaataagaagtcttctgaaactgggaacttcataacattgaaggcagaagattctgctaaggaaaaaagcaggcaggaaagaaaatgtctcatcctttcttgaaagcatttgcagaaaatatatcatttcattttattcccatctgttttcaaactcgtgatcttaaaaggcattctgatgataaatttagaattttcatctataaaatttagaactctaatccataaagttagaattgagctaatagagtggtatgacatggcactaaaaatataaatttttgttgtaagtcaggattggagtaagctggaaaagtatgtttaggcaaatcttggagaaaaccaaccataaacttacagctctaaaattcagaaagccctaaaatttcaaacactgtttgaaagaagaggtgggggccgggtgccgtggctcatgcctgtcatcccagcatttgggaggctgaggcaggcagatcacctgaggccaggagttcgagaccagcctggctggctagcatggtgagaccgtctctactaaaaatgcaaaaattaacagggcacggtggcatgcgcctgtagtcccagctactcgggaggctgaggcaggagaatcacttgaatccaggaggcgaaggttgcagtgagctgagattgtgctgctgcactccagcctgggagacagagcgagactctgtcttaaaaaaaaaaaaaggaggtgaatttttttttaagttttgtaacactgtcctactttatttattagaatctaaggctgttacaatcaagtcgttgcagggtttggatcagctgtaagttaggtatgcctaccaaacatccaaaggtagacgtggagacattttaatactacaaaactaggaaaatcagaactcatggccatttcctgccctcctccaacttgttaaaacatgtttattctaaagttcgaatggataaatttgagtataaaggttttgttataaaactgttctttagtgtaaggctgcattgtgggtttgggggaaatgtaaataattttctgtgtaaaacaaattcataggatctgatttgctcagagtattattcaagaatgtattaataaggcattgccccctgtttgcactcagggttaatatgtcaaatgaaatttaagaaggaaatggaagaattcaggtacattaattgcatattattttgggaaagatgagtcctatacgtggcaatttttcaatgtcatctgaagccagcattatcttccaaagaaatcgatcttttttttctaaaaaaaaaaaatgcttttgccttcccttcccttcccatccgccatatttcttcagcctttcttctcgatcacccgtgtattctttgaccagtaaatgaccacacctcaatgatggtaaaacagcatcatcagtaagctatcttatatgcctcatcctgtgagtttgagcttcaggaaacatgagtaaaagtatatgtaatgtatatagtcgtatatgtattctagcaagaaaaacatatttattttgacaaaggggaacactgactttctgaaggattcagaaagaaccttagtgaaaggttctcagtctctgagagtggaccctaattaacataaagaccattcatcagcgaataactactgagcaactctagtgtgccagcacaggccagacatactagtgagccaggcacatctggccttgggaaactcatcctacaggggaaggccagtttttttcccttcaattcctcaagtctgggtggtgacaaggtaggggctaggtactggactaccacaggtttttaggaactaaggtgtttctcataaacacaaaatgttgggtgaaactgggaacaactactcagaagctaatttatttgcttaaatggaaagtgtgggagccactaccctctcttttgatctgccaaggatttcctctcagagctgttgcacagacagagattgtacttggtaagataccaaacaagacagatatggatctaaatttctaatgtgttctatgggtttcaattctgaaaaaagaaaatgaataaagattttaataaatattgatatctgaact

SEQ ID NO: 415876 - DNA, 1018 bp, Homo sapiens
tgcaacagggggcaatgccttattaatacattcttgaataatactctgagcaaatcagggttaatatgtcaaatgaaatttaagaaggaaatggaagaattcaggtacattaattgcatattattttgggaaagatgagtcctatacgtggcaatttttcaatgtcatctgaagccagcattatcttccaaagaaatcgatcttttttttctaaaaaaaaaaaatgcttttgccttcccttcccttcccatccgccatatttcttcagcctttcttctcgatcacccgtgtattctttgaccagtaaatgaccacacctcaatgatggtaaaacagcatcatcagtaagctatcttatatgcctcatcctgtgagtttgagcttcaggaaacatgagtaaaagtatatgtaatgtatatagtcgtatatgtattctagcaagaaaaacatatttattttgacaaaggggaacactgactttctgaaggattcagaaagaaccttagtgaaaggttctcagtctctgagagtggaccctaattaacataaagaccattcatcagcgaataactactgagcaactctagtgtgccagcacaggccagacatactagtgagccaggcacatctggccttgggaaactcatcctacaggggaaggccagtttttttcccttcaattcctcaagtctgggtggtgacaaggtaggggctaggtactggactaccacaggtttttaggaactaaggtgtttctcataaacacaaaatgttgggtgaaactgggaacaactactcagaagctaatttatttgcttaaatggaaagtgtgggagccactaccctctcttttgatctgccaaggatttcctctcagagctgttgcacagacagagattgtacttggtaagataccaaacaagacagatatggatctaaatttctaatgtgttctatgggtttcaattctgaaaaaagaaaatgaataaagattttaataaatattgatatctgaact

SEQ ID NO: 415877 - DNA, 842 bp, Homo sapiens
aaaaaaaaaaaaaaaaaaaagaaaaaaaaaaaaaaaaaaaaaaaaaaatgcttttgccttcccttcccttcccatccgccatatttcttcagcctttcttctcgatcacccgtgtattctttgaccagtaaatgaccacacctcaatgatggtaaaacagcatcatcagtaagctatcttatatgcctcatcctgtgagtttgagcttcaggaaacatgagtaaaagtatatgtaatgtatatagtcgtatatgtattctagcaagaaaaacatatttattttgacaaaggggaacactgactttctgaaggattcagaaagaaccttagtgaaaggttctcagtctctgagagtggaccctaattaacataaagaccattcatcagcgaataactactgagcaactctagtgtgccagcacaggccagacatactagtgagccaggcacatctggccttgggaaactcatcctacaggggaaggccagtttttttcccttcaattcctcaagtctgggtggtgacaaggtaggggctaggtactggactaccacaggtttttaggaactaaggtgtttctcataaacacaaaatgttgggtgaaactgggaacaactactcagaagctaatttatttgcttaaatggaaagtgtgggagccactaccctctcttttgatctgccaaggatttcctctcagagctgttgcacagacagagattgtacttggtaagataccaaacaagacagatatggatctaaatttctaatgtgttctatgggtttcaattctgaaaaaagaaaatgaataaagattttaataaatattgatatctgaact

SEQ ID NO: 415878 - DNA, 6035 bp, Homo sapiens
  misc_feature (5967)..(5967): n is a, c, g, or t
  misc_feature (5977)..(5978): n is a, c, g, or t
  misc_feature (6002)..(6003): n is a, c, g, or t
  misc_feature (6011)..(6011): n is a, c, g, or t
  misc_feature (6018)..(6018): n is a, c, g, or t
  misc_feature (6020)..(6020): n is a, c, g, or t
gtgtgggactgccgctctgcgcggcgagaggtggcctgggaatggccgggccgggggtgggccggagccgctgtggcggcggcggcggctgggggcggtgagcgcggcgtggggctgcccctccccggaggcggcgggggcggccggggccgcgccgcaccgcaccgcgcgggcggccatggagcgagcctagggcccgacaggaactgtggaaggtgcatcagtgaagaaatggaccaatgtgtataatcatggaatctccttgctaaccatcaccaccagctctccttaatacatgagcaagagtgggtcaggggagaaggaaaagaggtcaacatgaagctaaagcagcgagtcgtgctgttagcaattctccttgtcatttttatcttcaccaaagttttcctgattgacaacttagatacatcagctgccaaccgggaggaccagagggcctttcaccgaatgatgactggcttgcgggtggagctggcacccaagctggaccataccttgcagtctccctgggagattgcagcccagtgggtggttccccgggaagtgtaccctgaagagacaccagagctgggggcagtcatgcatgccatggccaccaagaaaatcattaaagctgatgtgggttataaagggacacagctgaaagccttactgatacttgaaggaggccagaaagttgttttcaaacctaagcggtatagccgagaccatgtggtggaaggggaaccgtatgctggttatgatagacacaatgcagaggtagcagcctttcacttggacaggattctgggtttccaccgagcccccttggtagttggcagatttgttaatcttcggacagagatcaaacctgtcgccacagagcagctgttgagcaccttcctaactgtaggaaacaatacttgtttttatgggaagtgctattactgccgagaaacagaaccagcttgtgctgatggagacataatggagggatctgtcacactttggcttccagatgtgtggcctctgcagaagcaccgtcacccatggggcaggacttaccgagaaggcaaattggccaggtgggagtatgatgagagctactgtgatgctgtgaagaaaacgtccccttatgactctggcccgcgcctcttggacatcattgacacagctgtctttgattacctgattggcaatgctgaccgccatcactatgagagctttcaagatgatgaaggcgctagtatgctcatccttcttgataatgccaaaagctttgggaacccctcgctggatgaaagaagcattcttgcccctctctatcagtgttgcatcattcgggtgtccacctggaacagactgaactacctaaagaatggtgtgctaaagtctgccttaaaatctgccatggcccatgaccccatctccccagtgctctctgatcctcatctggacgccgtggaccagcggctcctgagtgtcctggccaccgtgaagcagtgcaccgaccagtttgggatggacacagtactggtggaagacaggatgcctctctcacacttgtaattctcgacacaaaataagtgaaacttctttttacaaagatagagaaacagcacaatcaattccaaatggtatgagatggattggaagtggccagcagcaagttctggtgacaggacagggtggccttggatgtctttggtattttctgtagtagaaactaaagcaaagaccacaagtttcagagcatggagacattcctgctgaatcgccttctcacctcctcggcaattgctcattctagggttgggcatcatagttggtcagtcttaattcccatgccaaaggacaaacaggtgtgacatttggatagatgaatactgggattggctctggagcatgtgttttgagttgaaccttgcagtcctttctctacgcccgtggattttgtggaaacactttgcaatctctttgtctttttttttttaccagaactagttacattggaatgcttactgtcctacagagtggcagcaaataaaaccttgcattccatcaagccaaaatagcacactctgttagaggagatacatgtttaagatagaattggagggaaggacaaaaacagaaaaatgtttgggcttttaagccattgggtagtattgttttgatgatcttagaggagggaagaagagagagagacccaatggtagaaccagaatcagggagatgactgaactactgaaaaacaggttcccttgtatttaggatcttaaggtgtataaaaagcaaacatgactttgcacctaagtaaattctgcattctcatagttgtgtcccaattaaccaaaaagttgtctctagagaaaatactattacaatctaagcatgattctctgtggagactaattttttccccttttgccaaaagcagtccttcccaaattaacaaagcaaactgaaataataccttgaataacaggttgcctgtggtctctgtcatcctcgtttctcttctgaaatgaatttccacctctgcctttaaggcatttttgtcactgaagctgctgttcccaagagatcggcaacctttttgtccctttctcataagaaagggacactcctacaggtgagagtgtataccttactctctcagataagtggctggacttatcttgtgatttggggccatggaagattggaaacaaagattttaagccttcttctttttttcttttttcttttttttttgagaccaagtctcacctgttgcccaggctggagtgcagtggcacgatcttggctcactgcaacctccgtctcccaggttcaagcgattctcttgcctcagcctccagagtagctgggattacaggcgcccgccatcgtgcccagctaatttttatatttttagtggagacagggtttcgggtttcaccatgttggccaggttgatcttggactcctgaccccaggtgatccacctgcctcagccttccaaagtgctgggattacaggcatgagccaccgtggccggccaagattttaagccttctgagccttgaaattgaggaggttaaaaggaagagccttaagattttgatttatgtcaaatcctaattctatcattcagtcttgtttggagttctgaacccatgatgttgtattatgcttctttctcctcttagcactctcaaatttcaggtttgtaaaacacagtttttgttttgtgttctggcaaagtgatctcaacatgtaagtagttgcagtaaaacacaggggcaaaggaagacaggcctgatgtgcccactcatctatggactcagagctgtgtgctttgctcctgcatcttgttgaggtgctgttccagctttgcatttctgtcaagtagaggcgaatatataaacagtgtggttgaatacatttaatgccagccattggaaactagttttaggcaaccactctcaaaaacagctttagaatttatgcccagttttcttgcattgaaagataactgagtaataacctgtaactatttttaaatggcatgaaattaggaaacttttgtacattttatatacattttgagatgaacagaacaatgggctgagttataaaaagcgtgtattgaatttaagaagacagactagcacaaaacacagaattcgtgttaaccaaaggaggcattgatttcagttttaaggctactcagtgttgtgtgtccagggaaattcacagctcagtatgagaataccttggttagtgctcacccacaagcttccaggagccagctgggaggagacaataggaagagatgtcagctctgctctccctgtaaatgttagttgaactaagttatggatttgtggtctttcaaatacatgacgcctttagtatgccacactgaaatgaataagaagtcttctgaaactgggaacttcataacattgaaggcagaagattctgctaaggaaaaaagcaggcaggaaagaaaatgtctcatcctttcttgaaagcatttgcagaaaatatatcatttcattttattcccatctgttttcaaactcgtgatcttaaaaggcattctgatgataaatttagaattttcatctataaaatttagaactctaatccataaagttagaattgagctaatagagtggtatgacatggcactaaaaatataaatttttgttgtaagtcaggattggagtaagctggaaaagtatgtttaggcaaatcttggagaaaaccaaccataaacttacagctctaaaattcagaaagccctaaaatttcaaacactgtttgaaagaagaggtgggggccgggtgccgtggctcatgcctgtcatcccagcatttgggaggctgaggcaggcagatcacctgaggccaggagttcgagaccagcctggctggctagcatggtgagaccgtctctactaaaaatgcaaaaattaacagggcacggtggcatgcgcctgtagtcccagctactcgggaggctgaggcaggagaatcacttgaatccaggaggcgaaggttgcagtgagctgagattgtgctgctgcactccagcctgggagacagagcgagactctgtcttaaaaaaaaaaaaaggaggtgaatttttttttaagttttgtaacactgtcctactttatttattagaatctaaggctgttacaatcaagtcgttgcagggtttggatcagctgtaagttaggtatgcctaccaaacatccaaaggtagacgtggagacattttaatactacaaaactaggaaaatcagaactcatggccatttcctgccctcctccaacttgttaaaacatgtttattctaaagttcgaatggataaatttgagtataaaggttttgttataaaactgttctttagtgtaaggctgcattgtgggtttgggggaaatgtaaataattttctgtgtaaaacaaattcataggatctgatttgctcagagtattattcaagaatgtattaataaggcattgccccctgtttgcactcagggttaatatgtcaaatgaaatttaagaaggaaatggaagaattcaggtacattaattgcatattattttgggaaagatgagtcctatacgtggcaatttttcaatgtcatctgaagccagcattatcttccaaagaaatcgatcttttttttctaaaaaaaaaaaatgcttttgccttcccttcccttcccatccgccatatttcttcagcctttcttctcgatcacccgtgtattctttgaccagtaaatgaccacacctcaatgatggtaaaacagcatcatcagtaagctatcttatatgcctcatcctgtgagtttgagcttcaggaaacatgagtaaaagtatatgtaatgtatatagtcgtatatgtattctagcaagaaaaacatatttattttgacaaaggggaacactgactttctgaaggattcagaaagaaccttagtgaaaggttctcagtctctgagagtggaccctaattaacataaagaccattcatcagcgaataactactgagcaactctagtgtgccagcacaggccagacatactagtgagccaggcacatctggccttgggaaactcatcctacaggggaaggccagtttttttcccttcaattcctcaagtctgggtggtgacaaggtaggggctaggtactggactaccacaggtttttaggaactaaggtgtttctcataaacacaaaatgttgggtgaaactgggaacaactactcagaagctaatttattgctgagagggggaggggcccccccgctccctttttgttggagccgaggacggcgggcgcggcgagagccggcaacgaaaggagacgcacacgcccgtcgtcacgctctcgaccgtatgtccatgtggtgtgtgggcgtcccgtggcgccgcggcgcgcccggacgcgcgccccgncggcccaaanncacaccaaattatttatggggggnngggcgggntgattgnantagggaaaaagaaga

SEQ ID NO: 415879 - DNA, 5943 bp, Homo sapiens
gtgtgggactgccgctctgcgcggcgagaggtggcctgggaatggccgggccgggggtgggccggagccgctgtggcggcggcggcggctgggggcggtgagcgcggcgtggggctgcccctccccggaggcggcgggggcggccggggccgcgccgcaccgcaccgcgcgggcggccatggagcgagcctagggcccgacaggaactgtggaaggtgcatcagtgaagaaatggaccaatgtgtataatcatggaatctccttgctaaccatcaccaccagctctccttaatacatgagcaagagtgggtcaggggagaaggaaaagaggtcaacatgaagctaaagcagcgagtcgtgctgttagcaattctccttgtcatttttatcttcaccaaagttttcctgattgacaacttagatacatcagctgccaaccgggaggaccagagggcctttcaccgaatgatgactggcttgcgggtggagctggcacccaagctggaccataccttgcagtctccctgggagattgcagcccagtgggtggttccccgggaagtgtaccctgaagagacaccagagctgggggcagtcatgcatgccatggccaccaagaaaatcattaaagctgatgtgggttataaagggacacagctgaaagccttactgatacttgaaggaggccagaaagttgttttcaaacctaagcggtatagccgagaccatgtggtggaaggggaaccgtatgctggttatgatagacacaatgcagaggtagcagcctttcacttggacaggattctgggtttccaccgagcccccttggtagttggcagatttgttaatcttcggacagagatcaaacctgtcgccacagagcagctgttgagcaccttcctaactgtaggaaacaatacttgtttttatgggaagtgctattactgccgagaaacagaaccagcttgtgctgatggagacataatggagggatctgtcacactttggcttccagatgtgtggcctctgcagaagcaccgtcacccatggggcaggacttaccgagaaggcaaattggccaggtgggagtatgatgagagctactgtgatgctgtgaagaaaacgtccccttatgactctggcccgcgcctcttggacatcattgacacagctgtctttgattacctgattggcaatgctgaccgccatcactatgagagctttcaagatgatgaaggcgctagtatgctcatccttcttgataatgccaaaagctttgggaacccctcgctggatgaaagaagcattcttgcccctctctatcagtgttgcatcattcgggtgtccacctggaacagactgaactacctaaagaatggtgtgctaaagtctgccttaaaatctgccatggcccatgaccccatctccccagtgctctctgatcctcatctggacgccgtggaccagcggctcctgagtgtcctggccaccgtgaagcagtgcaccgaccagtttgggatggacacagtactggtggaagacaggatgcctctctcacacttgtaattctcgacacaaaataagtgaaacttctttttacaaagatagagaaacagcacaatcaattccaaatggtatgagatggattggaagtggccagcagcaagttctggtgacaggacagggtggccttggatgtctttggtattttctgtagtagaaactaaagcaaagaccacaagtttcagagcatggagacattcctgctgaatcgccttctcacctcctcggcaattgctcattctagggttgggcatcatagttggtcagtcttaattcccatgccaaaggacaaacaggtgtgacatttggatagatgaatactgggattggctctggagcatgtgttttgagttgaaccttgcagtcctttctctacgcccgtggattttgtggaaacactttgcaatctctttgtctttttttttttaccagaactagttacattggaatgcttactgtcctacagagtggcagcaaataaaaccttgcattccatcaagccaaaatagcacactctgttagaggagatacatgtttaagatagaattggagggaaggacaaaaacagaaaaatgtttgggcttttaagccattgggtagtattgttttgatgatcttagaggagggaagaagagagagagacccaatggtagaaccagaatcagggagatgactgaactactgaaaaacaggttcccttgtatttaggatcttaaggtgtataaaaagcaaacatgactttgcacctaagtaaattctgcattctcatagttgtgtcccaattaaccaaaaagttgtctctagagaaaatactattacaatctaagcatgattctctgtggagactaattttttccccttttgccaaaagcagtccttcccaaattaacaaagcaaactgaaataataccttgaataacaggttgcctgtggtctctgtcatcctcgtttctcttctgaaatgaatttccacctctgcctttaaggcatttttgtcactgaagctgctgttcccaagagatcggcaacctttttgtccctttctcataagaaagggacactcctacaggtgagagtgtataccttactctctcagataagtggctggacttatcttgtgatttggggccatggaagattggaaacaaagattttaagccttcttctttttttcttttttcttttttttttgagaccaagtctcacctgttgcccaggctggagtgcagtggcacgatcttggctcactgcaacctccgtctcccaggttcaagcgattctcttgcctcagcctccagagtagctgggattacaggcgcccgccatcgtgcccagctaatttttatatttttagtggagacagggtttcgggtttcaccatgttggccaggttgatcttggactcctgaccccaggtgatccacctgcctcagccttccaaagtgctgggattacaggcatgagccaccgtggccggccaagattttaagccttctgagccttgaaattgaggaggttaaaaggaagagccttaagattttgatttatgtcaaatcctaattctatcattcagtcttgtttggagttctgaacccatgatgttgtattatgcttctttctcctcttagcactctcaaatttcaggtttgtaaaacacagtttttgttttgtgttctggcaaagtgatctcaacatgtaagtagttgcagtaaaacacaggggcaaaggaagacaggcctgatgtgcccactcatctatggactcagagctgtgtgctttgctcctgcatcttgttgaggtgctgttccagctttgcatttctgtcaagtagaggcgaatatataaacagtgtggttgaatacatttaatgccagccattggaaactagttttaggcaaccactctcaaaaacagctttagaatttatgcccagttttcttgcattgaaagataactgagtaataacctgtaactatttttaaatggcatgaaattaggaaacttttgtacattttatatacattttgagatgaacagaacaatgggctgagttataaaaagcgtgtattgaatttaagaagacagactagcacaaaacacagaattcgtgttaaccaaaggaggcattgatttcagttttaaggctactcagtgttgtgtgtccagggaaattcacagctcagtatgagaataccttggttagtgctcacccacaagcttccaggagccagctgggaggagacaataggaagagatgtcagctctgctctccctgtaaatgttagttgaactaagttatggatttgtggtctttcaaatacatgacgcctttagtatgccacactgaaatgaataagaagtcttctgaaactgggaacttcataacattgaaggcagaagattctgctaaggaaaaaagcaggcaggaaagaaaatgtctcatcctttcttgaaagcatttgcagaaaatatatcatttcattttattcccatctgttttcaaactcgtgatcttaaaaggcattctgatgataaatttagaattttcatctataaaatttagaactctaatccataaagttagaattgagctaatagagtggtatgacatggcactaaaaatataaatttttgttgtaagtcaggattggagtaagctggaaaagtatgtttaggcaaatcttggagaaaaccaaccataaacttacagctctaaaattcagaaagccctaaaatttcaaacactgtttgaaagaagaggtgggggccgggtgccgtggctcatgcctgtcatcccagcatttgggaggctgaggcaggcagatcacctgaggccaggagttcgagaccagcctggctggctagcatggtgagaccgtctctactaaaaatgcaaaaattaacagggcacggtggcatgcgcctgtagtcccagctactcgggaggctgaggcaggagaatcacttgaatccaggaggcgaaggttgcagtgagctgagattgtgctgctgcactccagcctgggagacagagcgagactctgtcttaaaaaaaaaaaaaggaggtgaatttttttttaagttttgtaacactgtcctactttatttattagaatctaaggctgttacaatcaagtcgttgcagggtttggatcagctgtaagttaggtatgcctaccaaacatccaaaggtagacgtggagacattttaatactacaaaactaggaaaatcagaactcatggccatttcctgccctcctccaacttgttaaaacatgtttattctaaagttcgaatggataaatttgagtataaaggttttgttataaaactgttctttagtgtaaggctgcattgtgggtttgggggaaatgtaaataattttctgtgtaaaacaaattcataggatctgatttgctcagagtattattcaagaatgtattaataaggcattgccccctgtttgcactcagggttaatatgtcaaatgaaatttaagaaggaaatggaagaattcaggtacattaattgcatattattttgggaaagatgagtcctatacgtggcaatttttcaatgtcatctgaagccagcattatcttccaaagaaatcgatcttttttttctaaaaaaaaaaaatgcttttgccttcccttcccttcccatccgccatatttcttcagcctttcttctcgatcacccgtgtattctttgaccagtaaatgaccacacctcaatgatggtaaaacagcatcatcagtaagctatcttatatgcctcatcctgtgagtttgagcttcaggaaacatgagtaaaagtatatgtaatgtatatagtcgtatatgtattctagcaagaaaaacatatttattttgacaaaggggaacactgactttctgaaggattcagaaagaaccttagtgaaaggttctcagtctctgagagtggaccctaattaacataaagaccattcatcagcgaataactactgagcaactctagtgtgccagcacaggccagacatactatttttcccttcaattcctcaagtctgggtggtgacaaggtaggggctaggtactggactaccacaggtttttaggaactaaggtgtttctcataaacacaaaatgttgggtgaaactgggaacaactactcagaagctaatttatttgcttaaatggaaagtgtgggagccactaccctctcttttgatctgccaaggatttcctctcagagctgttgcacagacagagattgtacttggtaagataccaaacaagacagatatggatctaaatttctaatgtgttctatgggtttcaattctgaaaaaagaaaatgaataaagattttaataaatattgatatctgaact

SEQ ID NO: 415880 - DNA, 2076 bp, Homo sapiens
gcggcgagactgcacctcccagcatgccattgcagccaggactggagtcggtacttaagagtgatggggttccctagatactttaggccgtcgcatcgattatagagattgaggtggaacccggggcctgggaactggacgcacgcggagggcgaagatggaagcctggcgctgtgtgaggaagggctacggccactgtgtggtgggaagaggccgataccccatgtttccccatcactcgaggagtctgggcagagactggactacaccgtgggagaatctgcaaaggtgttgctggaacagacatatttctagttgtatgaggtggcctggacattactctcgagctccttacccatacttcagtagtaggcatttttcactaaattggagaccaccctgtttgtttgagtctagaactcagttccagtactgtaactggagacctgacaacctgagccagacatctttgattcatctctctagttacgtcatgaacgctgagggagatgagccttcatcaaaacgaagaaaacaccaaggtgtgataaagcggaattgggaatatatatgtagccatgataaagaaaaaacgaagatcctaggagacaaaaatgttgatcccaaatgtgaagacagtgagaacaagtttgacttttcagtgatgtcctataatatactttcacaagatttactggaagataactctcacctttatagacattgccggcggccagtattacactggagttttaggtttcccaatattctgaaagaaattaaacattttgatgcagacgtactttgtttgcaagaagttcaagaagatcattatggagcagagatcaggccaagtttggaatcactgggttatcactgtgaatataagatgcggacaggaaggaaacctgatggctgtgctatttgcttcaaacattccaaattttcactcttgtcagtgaacccagtggaattcttccgccctgatatttctctgttggacagagacaatgttggattagttttactcttacagcccaaaattccatatgctgcctgccctgcaatctgcgtagcaaatacgcatctgttgtataatccaaggcgaggtgatattaagctgacgcaattggcaatgctactggcagagatttccagtgttgcccaccagaaagatggcagcttctgccctattgttatgtgtggtgactttaattctgttcctggttctccactatatagtttcataaaggaaggaaaattgaattatgaaggacttcccataggaaaggtatctggccaggaacagtcttcacggggacaaagaattttatctattccaatttggcccccaaacctaggtatctcacagaactgtgtgtatgaggtacagcaggtaccaaaagtagaaaagacagacagtgatctgacacaaacacagctgaagcaaacagaggtcctagtgacagctgaaaaattgtcttcaaatttacagcaccatttcagtttgtcatctgtttattcacattactttcctgacactggaattccagaagtgaccacctgtcattcccgaagtgccataactgtggattatattttctactctgcagaaaaggaagatgttgctgggcacccaggagctgaagttgctttggttggtggcttgaaacttctagctagactgtcacttcttacagaacaagacttatggactgttaatggacttccaaacgaaaataactcttcagatcatctgcctttattggcaaagttcagacttgagctctgactctctttgatcacatactaattttctttccaatttgtattgtttttcaaagaatgtaaagttcttaagtgtatgcatgttgtttatttttgcactgtggagattctgaagcggttatgttagatgctttgaaactccatatcagaagaaataactttataacaattttttttaataatgaaaaatattttcctgacaagtgagctctaaattctctttattgtaaaagagatgtaaaggttttatattctaaatcctagtaaaattgacagtgatttttaaat

SEQ ID NO: 415881 - DNA, 743 bp, Homo sapiens
cctgcttttagatattttaagataaaagcaccaggaaattcatgattgcatctctgtgttctaattcaagctatttttttcttccaaggtactttgtttgcaagaagttcaagaagatcattatggagcagagatcaggccaagtttggaatcactgggtacaatgcaactttttttttttttttttcttttttgagacagggtctcactctgtcgcccaactggagtgcagtggcacaatcatggctcactacagcctcaacctactgggctcaagtaatcctctcatttcggcttcctgagtagctgggactagagatgtgtgccaccatgcccggccaattatttaattttttttatagagacaaggcaatgtaacttttagccaaatttacttttgaaaattcatgtgtcattaaagtataacttgctgacaaagatgtgtggcatattttggctaaaaatcttaattttaaaaacttaatttcaaagaggaaaagattgaggtactcactggaaacttttgtgttggtgtataattttaattcaaacagaaagatgtgtaagaatatcttagtagctccctttcctaggagttgttctgtccacctgtagacctataagcttctgagctccaggagaccattttgtctcgttcatcattataataccagtgcctgccagtgtctacctaatggatagatgccaaaaacctgtttgataaataaacactcctagaaaca

SEQ ID NO: 415882 - DNA, 436 bp, Homo sapiens
cctgcttttagatattttaagataaaagcaccaggaaattcatgattgcatctctgtgttctaattcaagctatttttttcttccaaggtactttgtttgcaagaagttcaagaagatcattatggagcagagatcaggccaagtttggaatcactgggtacaatgcaactttttttttttttttttcttttttgagacagggtctcactctgtcgcccaactggagtgcagtggcacaatcatggctcactacagcctcaacctactgggctcaagtaatcctctcatttcggcttcctgagtagctgggactagagatgtgtgccaccatgcccggccaattatttaattttttttatagagacaaggcaatgtaacttttagccaaatttacttttgaaaattcatgtgtcattaaagtataacttgctgaca

SEQ ID NO: 415883 - DNA, 493 bp, Homo sapiens
ttagttcaaagcgatagatgatttgtatgtccaaattaaagaaaagcatgtatgggaaaaagattgtcatttttatgtaaatgataagtgctttctgaattgtatttaaagaaaagaagattttataagtccaaagaatcacttaatacaatgaataaagggtaataatttaccacttttggattaccttttatttaagacataaatttttcaactcataagctatttaaaatcttttcacttaagatacctgttgaaattttgtttaggtatctggccaggaacagtcttcacggggacaaagaattttatctattccaatttggcccccaaacctaggtatctcacagaactgtgtgtatgaggtacagcaggtaccaaaagtagaaaagacaggtaagtgtttgtaatacattttggcagtctgctgggtaatcatgttccctttgaagacataaaactaagtttttaaaaagaaaaaatctcagggatg

SEQ ID NO: 415884 - DNA, 481 bp, Homo sapiens
  misc_feature (472)..(472): n is a, c, g, or t
cacgaggattttttttcttaagacctctaaatttacctttttaaagttgaacttccagaattatctgtgcatgatttacttgcatgttgctttggaattgtttgcatttttctatttttcctaattctggaggccatcgaaatatatagattccagaatgaaacatgtaactaggcatctttctaacctagataagtcttaaatattgtttctagagtaagatgacgatattaaggcaaactagaacaataacattaatatattttcctctattcttacagacagtgatctgacacaaacacagctgaagcaaacagaggtcctagtgacagctgaaaaattgtcttcaaatttacagcaccatttcagtttgtcatctgtttattcacattactttcctgacactggaattccagaagtgaccacctgtcattcccgaagtgccataactgtggattccagaagatgagancggtacccg

SEQ ID NO: 415885 - DNA, 2689 bp, Homo sapiens
tagcatcgagtcggccttgttggcttactgtgagctctaaattctctttattgtaaaagagatgtaaaggttttatattctaaatcctagtaaaattgacagtgatttttaaatataatgcatcttcctttgtctgcttagtaaaaaatttcatttcataattttggcaagctctgtagtggatccaaagtatctttgagttcttgcaaactacaagttgtttcctttccagaaggcttgatttcattaggagacccctctattgagttctaaatagtttatcttagaaagccttgggtcattcacaggtatccaaccagccattgtttagtttgtttttgaaggggtttgataatgctttttaagttgtacagaatgcttaatccatcttattactgtcctgagccatgtaatatgcctgcatcgtgttggggaaatgtttgggaaatataagccagcataacgtgtaaagctcactctttcaccctggaacagacaagaggtgggcttaatagaggcagagactggggatatacctttgtttccctagcatttttatttatttatttttattttattttattttttgagatggagtttcactcttgttgcccaggctgggggtgcaatggcgcaatctttgctcactgcaacccctgcctcccgggctcaagcgattctcctgcctcagcctctcgagtagctgggattacaggcatgcgtcaccactcccagctaattttgtattttcagtagagacagggtttccccatgttggttaggctggtctcgaactcccaacctcaggtgatccgcccacctcagctctcaaagtgctgggattacaggcgggagccactgcacatggcagcattttttaaaaattcagttttaagatctctggtttaggggagagattttattttactgaaccagttctatagaaatttattttattaggaaatttgtctttggaacaaagtggcagctataaaattatttttgttaagcctcagaaatatgaggaagcctgtaaaactctagtggggagatattaacttggagacctaatgctctgtaaatagtcatttaaactgttggttttagtggttttgtttctaaaatgttttcttttaccgtgatgcaccagtatgagatggtgctgacactttctatgaagtggttatgagcaggtttaataaatcctctatacaagtgtttgaatcaattttaaaacataaaaagtggaaatttccttttttgtagacagtaggaacaaggaattatatgcatttttactaagtagtaattttacactgaattgtaaatgtttttacagtgagttttattaatagaatgcttcaccttaaattggaaaacaataatagtcttggactaagtctttgtactaaagcatttgctataattatttttaaaaaaacaaacagatgaaaacctcagagaaggcatgtggattataagatttgtctagtaaaaattgtaattgaatatgtttaaatatttaatttctcattttggggggtttttatttttttattttttagatggtgtctcacgctatcgcccaggctggagtgcagtggcgcgaactcggctcactgcaacctccgcctcctgggttcaagcaattctccttcctcagcctcccaagtagctgggattacaggcatgcaccaccatgcccagctaatttttgtatttttagtagagatggaattttgccatgttggccaggctggtcttgaactcctgacctcaggggtgatccacccgcctcgggctcccaaagtgctgtgattacaggcatgagccaccatgcctggcctttggggggattttaattacagtattaattatagttctaggatttcccacattttatagtagtagtttgcaggatattatgtgccctaattagcagatatagacattatcaaattataatgatagtataattatccctttttaatattggggaaagaaaaatgaaaattcattagttaattactgctttgtgttgtgtgaatttattaacaaataacattattacatataggtcattgttaacaaacaaacatccctgaaaacctctgtgaaaatttaattttttatatcctgattaatatattgtgactttaggcccatttttcatgtgcttcactttgatagagttaatccataaaattgctctttactttagcttatcaaatgaagtattattttgtggactggaggccaaaaagtcaatgtgagcttctcacaggtttttaaagctccactaaaaataattatccacttgtctttacttttgttgaccagaatagttggtaactctgccagagcctgtacttacctgccaaaaacaattaaatctggttaatgcctgaaaccaaatctctcagtctcaagtgttatactatccaagttttaaatggaaaggtaaactgtggagtaatgaaattttggttttactgtaccttttgctatcaagataatattcatgtttgaaatcttgtctttatttggaatttagttactgtctgcttttaacctttgctttcctaaagaaagtttgagatccagagagttcaagggattggggaaagagaggcgtcaagtcatttgcactttgtacctgtaagttaggtaataaactattatactcgta

SEQ ID NO: 415886 - DNA, 4706 bp, Homo sapiens
gaagagggtctgggcgatggtgcatccgggacgagcctccagagaccaagcgggataggtaaacccgccgcgcagctggcgggacgctgggccaacgaggtctggggtcttggcgcggagttcatgggccgccggccaggcttgtgccagtggctttggatccctggcctgcttcccccaacccagcctccagaccagcgctggcctgctccacacactccgcagcaccgtcccgggaaccgagcgtcggcggggaggccgcctctccgcaataccccatgtttccccatcactcgaggagtctgggcagagactggactacaccgtgggagaatctgcaaaggtgttgctggaacagacatatttctagttgtatgaggtggcctggacattactctcgagctccttacccatacttcagtagtaggcatttttcactaaattggagaccaccctgtttgtttgagtctagaactcagttccagtactgtaactggagacctgacaacctgagccagacatctttgattcatctctctagttacgtcatgaacgctgagggagatgagccttcatcaaaacgaagaaaacaccaaggtgtgataaagcggaattgggaatatatatgtagccatgataaagaaaaaacgaagatcctaggagacaaaaatgttgatcccaaatgtgaagacagtgagaacaagtttgacttttcagtgatgtcctataatatactttcacaagatttactggaagataactctcacctttatagacattgccggcggccagtattacactggagttttaggtttcccaatattctgaaagaaattaaacattttgatgcagacgtactttgtttgcaagaagttcaagaagatcattatggagcagagatcaggccaagtttggaatcactgggttatcactgtgaatataagatgcggacaggaaggaaacctgatggctgtgctatttgcttcaaacattccaaattttcactcttgtcagtgaacccagtggaattcttccgccctgatatttctctgttggacagagacaatgttggattagttttactcttacagcccaaaattccatatgctgcctgccctgcaatctgcgtagcaaatacgcatctgttgtataatccaaggcgaggtgatattaagctgacgcaattggcaatgctactggcagagatttccagtgttgcccaccagaaagatggcagcttctgccctattgttatgtgtggtgactttaattctgttcctggttctccactatatagtttcataaaggaaggaaaattgaattatgaaggacttcccataggaaaggtatctggccaggaacagtcttcacggggacaaagaattttatctattccaatttggcccccaaacctaggtatctcacagaactgtgtgtatgaggtacagcaggtaccaaaagtagaaaagacagacagtgatctgacacaaacacagctgaagcaaacagaggtcctagtgacagctgaaaaattgtcttcaaatttacagcaccatttcagtttgtcatctgtttattcacattactttcctgacactggaattccagaagtgaccacctgtcattcccgaagtgccataactgtggattatattttctactctgcagaaaaggaagatgttgctgggcacccaggagctgaagttgctttggttggtggcttgaaacttctagctagactgtcacttcttacagaacaagacttatggactgttaatggacttccaaacgaaaataactcttcagatcatctgcctttattggcaaagttcagacttgagctctgactctctttgatcacatactaattttctttccaatttgtattgtttttcaaagaatgtaaagttcttaagtgtatgcatgttgtttatttttgcactgtggagattctgaagcggttatgttagatgctttgaaactccatatcagaagaaataactttataacaattttttttaataatgaaaaatattttcctgacaagtgagctctaaattctctttattgtaaaagagatgtaaaggttttatattctaaatcctagtaaaattgacagtgatttttaaatataatgcatcttcctttgtctgcttagtaaaaaatttcatttcataattttggcaagctctgtagtggatccaaagtatctttgagttcttgcaaactacaagttgtttcctttccagaaggcttgatttcattaggagacccctctattgagttctaaatagtttatcttagaaagccttgggtcattcacaggtatccaaccagccattgtttagtttgtttttgaaggggtttgataatgctttttaagttgtacagaatgcttaatccatcttattactgtcctgagccatgtaatatgcctgcatcgtgttggggaaatgtttgggaaatataagccagcataacgtgtaaagctcactctttcaccctggaacagacaagaggtgggcttaatagaggcagagactggggatatacctttgtttccctagcatttttatttatttatttttattttattttattttttgagatggagtttcactcttgttgcccaggctgggggtgcaatggcgcaatctttgctcactgcaacccctgcctcccgggctcaagcgattctcctgcctcagcctctcgagtagctgggattacaggcatgcgtcaccactcccagctaattttgtattttcagtagagacagggtttccccatgttggttaggctggtctcgaactcccaacctcaggtgatccgcccacctcagctctcaaagtgctgggattacaggcgggagccactgcacatggcagcattttttaaaaattcagttttaagatctctggtttaggggagagattttattttactgaaccagttctatagaaatttattttattaggaaatttgtctttggaacaaagtggcagctataaaattatttttgttaagcctcagaaatatgaggaagcctgtaaaactctagtggggagatattaacttggagacctaatgctctgtaaatagtcatttaaactgttggttttagtggttttgtttctaaaatgttttcttttaccgtgatgcaccagtatgagatggtgctgacactttctatgaagtggttatgagcaggtttaataaatcctctatacaagtgtttgaatcaattttaaaacataaaaagtggaaatttccttttttgtagacagtaggaacaaggaattatatgcatttttactaagtagtaattttacactgaattgtaaatgtttttacagtgagttttattaatagaatgcttcaccttaaattggaaaacaataatagtcttggactaagtctttgtactaaagcatttgctataattatttttaaaaaaacaaacagatgaaaacctcagagaaggcatgtggattataagatttgtctagtaaaaattgtaattgaatatgtttaaatatttaatttctcattttggggggtttttatttttttattttttagatggtgtctcacgctatcgcccaggctggagtgcagtggcgcgaactcggctcactgcaacctccgcctcctgggttcaagcaattctccttcctcagcctcccaagtagctgggattacaggcatgcaccaccatgcccagctaatttttgtatttttagtagagatggaattttgccatgttggccaggctggtcttgaactcctgacctcaggggtgatccacccgcctcgggctcccaaagtgctgtgattacaggcatgagccaccatgcctggcctttggggggattttaattacagtattaattatagttctaggatttcccacattttatagtagtagtttgcaggatattatgtgccctaattagcagatatagacattatcaaattataatgatagtataattatccctttttaatattggggaaagaaaaatgaaaattcattagttaattactgctttgtgttgtgtgaatttattaacaaataacattattacatataggtcattgttaacaaacaaacatccctgaaaacctctgtgaaaatttaattttttatatcctgattaatatattgtgactttaggcccatttttcatgtgcttcactttgatagagttaatccataaaattgctctttactttagcttatcaaatgaagtattattttgtggactggaggccaaaaagtcaatgtgagcttctcacaggtttttaaagctccactaaaaataattatccacttgtctttacttttgttgaccagaatagttggtaactctgccagagcctgtacttacctgccaaaaacaattaaatctggttaatgcctgaaaccaaatctctcagtctcaagtgttatactatccaagttttaaatggaaaggtaaactgtggagtaatgaaattttggttttactgtaccttttgctatcaagataatattcatgtttgaaatcttgtctttatttggaatttagttactgtctgcttttaacctttgctttcctaaagaaagtttgagatccagagagttcaagggattggggaaagagaggcgtcaagtcatttgcactttgtacctgtaagttaggtaataaactattatactcgta

SEQ ID NO: 415887 - DNA, 4651 bp, Homo sapiens
gcggcgagactgcacctcccagcatgccattgcagccaggactggagtcggtacttaagagtgatggggttccctagatactttaggccgtcgcatcgattatagagattgaggtggaacccggggcctgggaactggacgcacgcggagggcgaagatggaagcctggcgctgtgtgaggaagggctacggccactgtgtggtgggaagaggccgataccccatgtttccccatcactcgaggagtctgggcagagactggactacaccgtgggagaatctgcaaaggtgttgctggaacagacatatttctagttgtatgaggtggcctggacattactctcgagctccttacccatacttcagtagtaggcatttttcactaaattggagaccaccctgtttgtttgagtctagaactcagttccagtactgtaactggagacctgacaacctgagccagacatctttgattcatctctctagttacgtcatgaacgctgagggagatgagccttcatcaaaacgaagaaaacaccaaggtgtgataaagcggaattgggaatatatatgtagccatgataaagaaaaaacgaagatcctaggagacaaaaatgttgatcccaaatgtgaagacagtgagaacaagtttgacttttcagtgatgtcctataatatactttcacaagatttactggaagataactctcacctttatagacattgccggcggccagtattacactggagttttaggtttcccaatattctgaaagaaattaaacattttgatgcagacgtactttgtttgcaagaagttcaagaagatcattatggagcagagatcaggccaagtttggaatcactgggttatcactgtgaatataagatgcggacaggaaggaaacctgatggctgtgctatttgcttcaaacattccaaattttcactcttgtcagtgaacccagtggaattcttccgccctgatatttctctgttggacagagacaatgttggattagttttactcttacagcccaaaattccatatgctgcctgccctgcaatctgcgtagcaaatacgcatctgttgtataatccaaggcgaggtgatattaagctgacgcaattggcaatgctactggcagagatttccagtgttgcccaccagaaagatggcagcttctgccctattgttatgtgtggtgactttaattctgttcctggttctccactatatagtttcataaaggaaggaaaattgaattatgaaggacttcccataggaaaggtatctggccaggaacagtcttcacggggacaaagaattttatctattccaatttggcccccaaacctaggtatctcacagaactgtgtgtatgaggtacagcaggtaccaaaagtagaaaagacagacagtgatctgacacaaacacagctgaagcaaacagaggtcctagtgacagctgaaaaattgtcttcaaatttacagcaccatttcagtttgtcatctgtttattcacattactttcctgacactggaattccagaagtgaccacctgtcattcccgaagtgccataactgtggattatattttctactctgcagaaaaggaagatgttgctgggcacccaggagctgaagttgctttggttggtggcttgaaacttctagctagactgtcacttcttacagaacaagacttatggactgttaatggacttccaaacgaaaataactcttcagatcatctgcctttattggcaaagttcagacttgagctctgactctctttgatcacatactaattttctttccaatttgtattgtttttcaaagaatgtaaagttcttaagtgtatgcatgttgtttatttttgcactgtggagattctgaagcggttatgttagatgctttgaaactccatatcagaagaaataactttataacaattttttttaataatgaaaaatattttcctgacaagtgagctctaaattctctttattgtaaaagagatgtaaaggttttatattctaaatcctagtaaaattgacagtgatttttaaatataatgcatcttcctttgtctgcttagtaaaaaatttcatttcataattttggcaagctctgtagtggatccaaagtatctttgagttcttgcaaactacaagttgtttcctttccagaaggcttgatttcattaggagacccctctattgagttctaaatagtttatcttagaaagccttgggtcattcacaggtatccaaccagccattgtttagtttgtttttgaaggggtttgataatgctttttaagttgtacagaatgcttaatccatcttattactgtcctgagccatgtaatatgcctgcatcgtgttggggaaatgtttgggaaatataagccagcataacgtgtaaagctcactctttcaccctggaacagacaagaggtgggcttaatagaggcagagactggggatatacctttgtttccctagcatttttatttatttatttttattttattttattttttgagatggagtttcactcttgttgcccaggctgggggtgcaatggcgcaatctttgctcactgcaacccctgcctcccgggctcaagcgattctcctgcctcagcctctcgagtagctgggattacaggcatgcgtcaccactcccagctaattttgtattttcagtagagacagggtttccccatgttggttaggctggtctcgaactcccaacctcaggtgatccgcccacctcagctctcaaagtgctgggattacaggcgggagccactgcacatggcagcattttttaaaaattcagttttaagatctctggtttaggggagagattttattttactgaaccagttctatagaaatttattttattaggaaatttgtctttggaacaaagtggcagctataaaattatttttgttaagcctcagaaatatgaggaagcctgtaaaactctagtggggagatattaacttggagacctaatgctctgtaaatagtcatttaaactgttggttttagtggttttgtttctaaaatgttttcttttaccgtgatgcaccagtatgagatggtgctgacactttctatgaagtggttatgagcaggtttaataaatcctctatacaagtgtttgaatcaattttaaaacataaaaagtggaaatttccttttttgtagacagtaggaacaaggaattatatgcatttttactaagtagtaattttacactgaattgtaaatgtttttacagtgagttttattaatagaatgcttcaccttaaattggaaaacaataatagtcttggactaagtctttgtactaaagcatttgctataattatttttaaaaaaacaaacagatgaaaacctcagagaaggcatgtggattataagatttgtctagtaaaaattgtaattgaatatgtttaaatatttaatttctcattttggggggtttttatttttttattttttagatggtgtctcacgctatcgcccaggctggagtgcagtggcgcgaactcggctcactgcaacctccgcctcctgggttcaagcaattctccttcctcagcctcccaagtagctgggattacaggcatgcaccaccatgcccagctaatttttgtatttttagtagagatggaattttgccatgttggccaggctggtcttgaactcctgacctcaggggtgatccacccgcctcgggctcccaaagtgctgtgattacaggcatgagccaccatgcctggcctttggggggattttaattacagtattaattatagttctaggatttcccacattttatagtagtagtttgcaggatattatgtgccctaattagcagatatagacattatcaaattataatgatagtataattatccctttttaatattggggaaagaaaaatgaaaattcattagttaattactgctttgtgttgtgtgaatttattaacaaataacattattacatataggtcattgttaacaaacaaacatccctgaaaacctctgtgaaaatttaattttttatatcctgattaatatattgtgactttaggcccatttttcatgtgcttcactttgatagagttaatccataaaattgctctttactttagcttatcaaatgaagtattattttgtggactggaggccaaaaagtcaatgtgagcttctcacaggtttttaaagctccactaaaaataattatccacttgtctttacttttgttgaccagaatagttggtaactctgccagagcctgtacttacctgccaaaaacaattaaatctggttaatgcctgaaaccaaatctctcagtctcaagtgttatactatccaagttttaaatggaaaggtaaactgtggagtaatgaaattttggttttactgtaccttttgctatcaagataatattcatgtttgaaatcttgtctttatttggaatttagttactgtctgcttttaacctttgctttcctaaagaaagtttgagatccagagagttcaagggattggggaaagagaggcgtcaagtcatttgcactttgtacctgtaagttaggtaataaactattatactcgta

SEQ ID NO: 415888 - DNA, 4325 bp, Homo sapiens
gcggcgagactgcacctcccagcatgccattgcagccaggactggagtcggtacttaagagtgatggggttccctagatactttaggccgtcgcatcgattatagagattgaggtggaacccggggcctgggaactggacgcacgcggagggcgaagatggaagcctggcgctgtgtgaggaagggctacggccactgtgtggtgggaagaggccggtgtgataaagcggaattgggaatatatatgtagccatgataaagaaaaaacgaagatcctaggagacaaaaatgttgatcccaaatgtgaagacagtgagaacaagtttgacttttcagtgatgtcctataatatactttcacaagatttactggaagataactctcacctttatagacattgccggcggccagtattacactggagttttaggtttcccaatattctgaaagaaattaaacattttgatgcagacgtactttgtttgcaagaagttcaagaagatcattatggagcagagatcaggccaagtttggaatcactgggttatcactgtgaatataagatgcggacaggaaggaaacctgatggctgtgctatttgcttcaaacattccaaattttcactcttgtcagtgaacccagtggaattcttccgccctgatatttctctgttggacagagacaatgttggattagttttactcttacagcccaaaattccatatgctgcctgccctgcaatctgcgtagcaaatacgcatctgttgtataatccaaggcgaggtgatattaagctgacgcaattggcaatgctactggcagagatttccagtgttgcccaccagaaagatggcagcttctgccctattgttatgtgtggtgactttaattctgttcctggttctccactatatagtttcataaaggaaggaaaattgaattatgaaggacttcccataggaaaggtatctggccaggaacagtcttcacggggacaaagaattttatctattccaatttggcccccaaacctaggtatctcacagaactgtgtgtatgaggtacagcaggtaccaaaagtagaaaagacagacagtgatctgacacaaacacagctgaagcaaacagaggtcctagtgacagctgaaaaattgtcttcaaatttacagcaccatttcagtttgtcatctgtttattcacattactttcctgacactggaattccagaagtgaccacctgtcattcccgaagtgccataactgtggattatattttctactctgcagaaaaggaagatgttgctgggcacccaggagctgaagttgctttggttggtggcttgaaacttctagctagactgtcacttcttacagaacaagacttatggactgttaatggacttccaaacgaaaataactcttcagatcatctgcctttattggcaaagttcagacttgagctctgactctctttgatcacatactaattttctttccaatttgtattgtttttcaaagaatgtaaagttcttaagtgtatgcatgttgtttatttttgcactgtggagattctgaagcggttatgttagatgctttgaaactccatatcagaagaaataactttataacaattttttttaataatgaaaaatattttcctgacaagtgagctctaaattctctttattgtaaaagagatgtaaaggttttatattctaaatcctagtaaaattgacagtgatttttaaatataatgcatcttcctttgtctgcttagtaaaaaatttcatttcataattttggcaagctctgtagtggatccaaagtatctttgagttcttgcaaactacaagttgtttcctttccagaaggcttgatttcattaggagacccctctattgagttctaaatagtttatcttagaaagccttgggtcattcacaggtatccaaccagccattgtttagtttgtttttgaaggggtttgataatgctttttaagttgtacagaatgcttaatccatcttattactgtcctgagccatgtaatatgcctgcatcgtgttggggaaatgtttgggaaatataagccagcataacgtgtaaagctcactctttcaccctggaacagacaagaggtgggcttaatagaggcagagactggggatatacctttgtttccctagcatttttatttatttatttttattttattttattttttgagatggagtttcactcttgttgcccaggctgggggtgcaatggcgcaatctttgctcactgcaacccctgcctcccgggctcaagcgattctcctgcctcagcctctcgagtagctgggattacaggcatgcgtcaccactcccagctaattttgtattttcagtagagacagggtttccccatgttggttaggctggtctcgaactcccaacctcaggtgatccgcccacctcagctctcaaagtgctgggattacaggcgggagccactgcacatggcagcattttttaaaaattcagttttaagatctctggtttaggggagagattttattttactgaaccagttctatagaaatttattttattaggaaatttgtctttggaacaaagtggcagctataaaattatttttgttaagcctcagaaatatgaggaagcctgtaaaactctagtggggagatattaacttggagacctaatgctctgtaaatagtcatttaaactgttggttttagtggttttgtttctaaaatgttttcttttaccgtgatgcaccagtatgagatggtgctgacactttctatgaagtggttatgagcaggtttaataaatcctctatacaagtgtttgaatcaattttaaaacataaaaagtggaaatttccttttttgtagacagtaggaacaaggaattatatgcatttttactaagtagtaattttacactgaattgtaaatgtttttacagtgagttttattaatagaatgcttcaccttaaattggaaaacaataatagtcttggactaagtctttgtactaaagcatttgctataattatttttaaaaaaacaaacagatgaaaacctcagagaaggcatgtggattataagatttgtctagtaaaaattgtaattgaatatgtttaaatatttaatttctcattttggggggtttttatttttttattttttagatggtgtctcacgctatcgcccaggctggagtgcagtggcgcgaactcggctcactgcaacctccgcctcctgggttcaagcaattctccttcctcagcctcccaagtagctgggattacaggcatgcaccaccatgcccagctaatttttgtatttttagtagagatggaattttgccatgttggccaggctggtcttgaactcctgacctcaggggtgatccacccgcctcgggctcccaaagtgctgtgattacaggcatgagccaccatgcctggcctttggggggattttaattacagtattaattatagttctaggatttcccacattttatagtagtagtttgcaggatattatgtgccctaattagcagatatagacattatcaaattataatgatagtataattatccctttttaatattggggaaagaaaaatgaaaattcattagttaattactgctttgtgttgtgtgaatttattaacaaataacattattacatataggtcattgttaacaaacaaacatccctgaaaacctctgtgaaaatttaattttttatatcctgattaatatattgtgactttaggcccatttttcatgtgcttcactttgatagagttaatccataaaattgctctttactttagcttatcaaatgaagtattattttgtggactggaggccaaaaagtcaatgtgagcttctcacaggtttttaaagctccactaaaaataattatccacttgtctttacttttgttgaccagaatagttggtaactctgccagagcctgtacttacctgccaaaaacaattaaatctggttaatgcctgaaaccaaatctctcagtctcaagtgttatactatccaagttttaaatggaaaggtaaactgtggagtaatgaaattttggttttactgtaccttttgctatcaagataatattcatgtttgaaatcttgtctttatttggaatttagttactgtctgcttttaacctttgctttcctaaagaaagtttgagatccagagagttcaagggattggggaaagagaggcgtcaagtcatttgcactttgtacctgtaagttaggtaataaactattatactcgta

SEQ ID NO: 415889 - DNA, 3938 bp, Homo sapiens
tcaaacgttttttattccaatgtttattgacatcctacattactaatgttttgcagaatacagtttggtaaacattgttcagaagtatcaggtgagctgtgttttgataaatatataaaagcagtcatttgttttaaattcatttgtttcttgtaggttatcactgtgaatataagatgcggacaggaaggaaacctgatggctgtgctatttgcttcaaacattccaaattttcactcttgtcagtgaacccagtggaattcttccgccctgatatttctctgttggacagagacaatgttggattagttttactcttacagcccaaaattccatatgctgcctgccctgcaatctgcgtagcaaatacgcatctgttgtataatccaaggcgaggtgatattaagctgacgcaattggcaatgctactggcagagatttccagtgttgcccaccagaaagatggcagcttctgccctattgttatgtgtggtgactttaattctgttcctggttctccactatatagtttcataaaggaaggaaaattgaattatgaaggacttcccataggaaaggtatctggccaggaacagtcttcacggggacaaagaattttatctattccaatttggcccccaaacctaggtatctcacagaactgtgtgtatgaggtacagcaggtaccaaaagtagaaaagacagacagtgatctgacacaaacacagctgaagcaaacagaggtcctagtgacagctgaaaaattgtcttcaaatttacagcaccatttcagtttgtcatctgtttattcacattactttcctgacactggaattccagaagtgaccacctgtcattcccgaagtgccataactgtggattatattttctactctgcagaaaaggaagatgttgctgggcacccaggagctgaagttgctttggttggtggcttgaaacttctagctagactgtcacttcttacagaacaagacttatggactgttaatggacttccaaacgaaaataactcttcagatcatctgcctttattggcaaagttcagacttgagctctgactctctttgatcacatactaattttctttccaatttgtattgtttttcaaagaatgtaaagttcttaagtgtatgcatgttgtttatttttgcactgtggagattctgaagcggttatgttagatgctttgaaactccatatcagaagaaataactttataacaattttttttaataatgaaaaatattttcctgacaagtgagctctaaattctctttattgtaaaagagatgtaaaggttttatattctaaatcctagtaaaattgacagtgatttttaaatataatgcatcttcctttgtctgcttagtaaaaaatttcatttcataattttggcaagctctgtagtggatccaaagtatctttgagttcttgcaaactacaagttgtttcctttccagaaggcttgatttcattaggagacccctctattgagttctaaatagtttatcttagaaagccttgggtcattcacaggtatccaaccagccattgtttagtttgtttttgaaggggtttgataatgctttttaagttgtacagaatgcttaatccatcttattactgtcctgagccatgtaatatgcctgcatcgtgttggggaaatgtttgggaaatataagccagcataacgtgtaaagctcactctttcaccctggaacagacaagaggtgggcttaatagaggcagagactggggatatacctttgtttccctagcatttttatttatttatttttattttattttattttttgagatggagtttcactcttgttgcccaggctgggggtgcaatggcgcaatctttgctcactgcaacccctgcctcccgggctcaagcgattctcctgcctcagcctctcgagtagctgggattacaggcatgcgtcaccactcccagctaattttgtattttcagtagagacagggtttccccatgttggttaggctggtctcgaactcccaacctcaggtgatccgcccacctcagctctcaaagtgctgggattacaggcgggagccactgcacatggcagcattttttaaaaattcagttttaagatctctggtttaggggagagattttattttactgaaccagttctatagaaatttattttattaggaaatttgtctttggaacaaagtggcagctataaaattatttttgttaagcctcagaaatatgaggaagcctgtaaaactctagtggggagatattaacttggagacctaatgctctgtaaatagtcatttaaactgttggttttagtggttttgtttctaaaatgttttcttttaccgtgatgcaccagtatgagatggtgctgacactttctatgaagtggttatgagcaggtttaataaatcctctatacaagtgtttgaatcaattttaaaacataaaaagtggaaatttccttttttgtagacagtaggaacaaggaattatatgcatttttactaagtagtaattttacactgaattgtaaatgtttttacagtgagttttattaatagaatgcttcaccttaaattggaaaacaataatagtcttggactaagtctttgtactaaagcatttgctataattatttttaaaaaaacaaacagatgaaaacctcagagaaggcatgtggattataagatttgtctagtaaaaattgtaattgaatatgtttaaatatttaatttctcattttggggggtttttatttttttattttttagatggtgtctcacgctatcgcccaggctggagtgcagtggcgcgaactcggctcactgcaacctccgcctcctgggttcaagcaattctccttcctcagcctcccaagtagctgggattacaggcatgcaccaccatgcccagctaatttttgtatttttagtagagatggaattttgccatgttggccaggctggtcttgaactcctgacctcaggggtgatccacccgcctcgggctcccaaagtgctgtgattacaggcatgagccaccatgcctggcctttggggggattttaattacagtattaattatagttctaggatttcccacattttatagtagtagtttgcaggatattatgtgccctaattagcagatatagacattatcaaattataatgatagtataattatccctttttaatattggggaaagaaaaatgaaaattcattagttaattactgctttgtgttgtgtgaatttattaacaaataacattattacatataggtcattgttaacaaacaaacatccctgaaaacctctgtgaaaatttaattttttatatcctgattaatatattgtgactttaggcccatttttcatgtgcttcactttgatagagttaatccataaaattgctctttactttagcttatcaaatgaagtattattttgtggactggaggccaaaaagtcaatgtgagcttctcacaggtttttaaagctccactaaaaataattatccacttgtctttacttttgttgaccagaatagttggtaactctgccagagcctgtacttacctgccaaaaacaattaaatctggttaatgcctgaaaccaaatctctcagtctcaagtgttatactatccaagttttaaatggaaaggtaaactgtggagtaatgaaattttggttttactgtaccttttgctatcaagataatattcatgtttgaaatcttgtctttatttggaatttagttactgtctgcttttaacctttgctttcctaaagaaagtttgagatccagagagttcaagggattggggaaagagaggcgtcaagtcatttgcactttgtacctgtaagttaggtaataaactattatactcgta

SEQ ID NO: 415890 - DNA, 3514 bp, Homo sapiens
cacgaggattttttttcttaagacctctaaatttacctttttaaagttgaacttccagaattatctgtgcatgatttacttgcatgttgctttggaattgtttgcatttttctatttttcctaattctggaggccatcgaaatatatagattccagaatgaaacatgtaactaggcatctttctaacctagataagtcttaaatattgtttctagagtaagatgacgatattaaggcaaactagaacaataacattaatatattttcctctattcttacagacagtgatctgacacaaacacagctgaagcaaacagaggtcctagtgacagctgaaaaattgtcttcaaatttacagcaccatttcagtttgtcatctgtttattcacattactttcctgacactggaattccagaagtgaccacctgtcattcccgaagtgccataactgtggattatattttctactctgcagaaaaggaagatgttgctgggcacccaggagctgaagttgctttggttggtggcttgaaacttctagctagactgtcacttcttacagaacaagacttatggactgttaatggacttccaaacgaaaataactcttcagatcatctgcctttattggcaaagttcagacttgagctctgactctctttgatcacatactaattttctttccaatttgtattgtttttcaaagaatgtaaagttcttaagtgtatgcatgttgtttatttttgcactgtggagattctgaagcggttatgttagatgctttgaaactccatatcagaagaaataactttataacaattttttttaataatgaaaaatattttcctgacaagtgagctctaaattctctttattgtaaaagagatgtaaaggttttatattctaaatcctagtaaaattgacagtgatttttaaatataatgcatcttcctttgtctgcttagtaaaaaatttcatttcataattttggcaagctctgtagtggatccaaagtatctttgagttcttgcaaactacaagttgtttcctttccagaaggcttgatttcattaggagacccctctattgagttctaaatagtttatcttagaaagccttgggtcattcacaggtatccaaccagccattgtttagtttgtttttgaaggggtttgataatgctttttaagttgtacagaatgcttaatccatcttattactgtcctgagccatgtaatatgcctgcatcgtgttggggaaatgtttgggaaatataagccagcataacgtgtaaagctcactctttcaccctggaacagacaagaggtgggcttaatagaggcagagactggggatatacctttgtttccctagcatttttatttatttatttttattttattttattttttgagatggagtttcactcttgttgcccaggctgggggtgcaatggcgcaatctttgctcactgcaacccctgcctcccgggctcaagcgattctcctgcctcagcctctcgagtagctgggattacaggcatgcgtcaccactcccagctaattttgtattttcagtagagacagggtttccccatgttggttaggctggtctcgaactcccaacctcaggtgatccgcccacctcagctctcaaagtgctgggattacaggcgggagccactgcacatggcagcattttttaaaaattcagttttaagatctctggtttaggggagagattttattttactgaaccagttctatagaaatttattttattaggaaatttgtctttggaacaaagtggcagctataaaattatttttgttaagcctcagaaatatgaggaagcctgtaaaactctagtggggagatattaacttggagacctaatgctctgtaaatagtcatttaaactgttggttttagtggttttgtttctaaaatgttttcttttaccgtgatgcaccagtatgagatggtgctgacactttctatgaagtggttatgagcaggtttaataaatcctctatacaagtgtttgaatcaattttaaaacataaaaagtggaaatttccttttttgtagacagtaggaacaaggaattatatgcatttttactaagtagtaattttacactgaattgtaaatgtttttacagtgagttttattaatagaatgcttcaccttaaattggaaaacaataatagtcttggactaagtctttgtactaaagcatttgctataattatttttaaaaaaacaaacagatgaaaacctcagagaaggcatgtggattataagatttgtctagtaaaaattgtaattgaatatgtttaaatatttaatttctcattttggggggtttttatttttttattttttagatggtgtctcacgctatcgcccaggctggagtgcagtggcgcgaactcggctcactgcaacctccgcctcctgggttcaagcaattctccttcctcagcctcccaagtagctgggattacaggcatgcaccaccatgcccagctaatttttgtatttttagtagagatggaattttgccatgttggccaggctggtcttgaactcctgacctcaggggtgatccacccgcctcgggctcccaaagtgctgtgattacaggcatgagccaccatgcctggcctttggggggattttaattacagtattaattatagttctaggatttcccacattttatagtagtagtttgcaggatattatgtgccctaattagcagatatagacattatcaaattataatgatagtataattatccctttttaatattggggaaagaaaaatgaaaattcattagttaattactgctttgtgttgtgtgaatttattaacaaataacattattacatataggtcattgttaacaaacaaacatccctgaaaacctctgtgaaaatttaattttttatatcctgattaatatattgtgactttaggcccatttttcatgtgcttcactttgatagagttaatccataaaattgctctttactttagcttatcaaatgaagtattattttgtggactggaggccaaaaagtcaatgtgagcttctcacaggtttttaaagctccactaaaaataattatccacttgtctttacttttgttgaccagaatagttggtaactctgccagagcctgtacttacctgccaaaaacaattaaatctggttaatgcctgaaaccaaatctctcagtctcaagtgttatactatccaagttttaaatggaaaggtaaactgtggagtaatgaaattttggttttactgtaccttttgctatcaagataatattcatgtttgaaatcttgtctttatttggaatttagttactgtctgcttttaacctttgctttcctaaagaaagtttgagatccagagagttcaagggattggggaaagagaggcgtcaagtcatttgcactttgtacctgtaagttaggtaataaactattatactcgta

SEQ ID NO: 415891 - DNA, 3629 bp, Homo sapiens
ttagttcaaagcgatagatgatttgtatgtccaaattaaagaaaagcatgtatgggaaaaagattgtcatttttatgtaaatgataagtgctttctgaattgtatttaaagaaaagaagattttataagtccaaagaatcacttaatacaatgaataaagggtaataatttaccacttttggattaccttttatttaagacataaatttttcaactcataagctatttaaaatcttttcacttaagatacctgttgaaattttgtttaggtatctggccaggaacagtcttcacggggacaaagaattttatctattccaatttggcccccaaacctaggtatctcacagaactgtgtgtatgaggtacagcaggtaccaaaagtagaaaagacagacagtgatctgacacaaacacagctgaagcaaacagaggtcctagtgacagctgaaaaattgtcttcaaatttacagcaccatttcagtttgtcatctgtttattcacattactttcctgacactggaattccagaagtgaccacctgtcattcccgaagtgccataactgtggattatattttctactctgcagaaaaggaagatgttgctgggcacccaggagctgaagttgctttggttggtggcttgaaacttctagctagactgtcacttcttacagaacaagacttatggactgttaatggacttccaaacgaaaataactcttcagatcatctgcctttattggcaaagttcagacttgagctctgactctctttgatcacatactaattttctttccaatttgtattgtttttcaaagaatgtaaagttcttaagtgtatgcatgttgtttatttttgcactgtggagattctgaagcggttatgttagatgctttgaaactccatatcagaagaaataactttataacaattttttttaataatgaaaaatattttcctgacaagtgagctctaaattctctttattgtaaaagagatgtaaaggttttatattctaaatcctagtaaaattgacagtgatttttaaatataatgcatcttcctttgtctgcttagtaaaaaatttcatttcataattttggcaagctctgtagtggatccaaagtatctttgagttcttgcaaactacaagttgtttcctttccagaaggcttgatttcattaggagacccctctattgagttctaaatagtttatcttagaaagccttgggtcattcacaggtatccaaccagccattgtttagtttgtttttgaaggggtttgataatgctttttaagttgtacagaatgcttaatccatcttattactgtcctgagccatgtaatatgcctgcatcgtgttggggaaatgtttgggaaatataagccagcataacgtgtaaagctcactctttcaccctggaacagacaagaggtgggcttaatagaggcagagactggggatatacctttgtttccctagcatttttatttatttatttttattttattttattttttgagatggagtttcactcttgttgcccaggctgggggtgcaatggcgcaatctttgctcactgcaacccctgcctcccgggctcaagcgattctcctgcctcagcctctcgagtagctgggattacaggcatgcgtcaccactcccagctaattttgtattttcagtagagacagggtttccccatgttggttaggctggtctcgaactcccaacctcaggtgatccgcccacctcagctctcaaagtgctgggattacaggcgggagccactgcacatggcagcattttttaaaaattcagttttaagatctctggtttaggggagagattttattttactgaaccagttctatagaaatttattttattaggaaatttgtctttggaacaaagtggcagctataaaattatttttgttaagcctcagaaatatgaggaagcctgtaaaactctagtggggagatattaacttggagacctaatgctctgtaaatagtcatttaaactgttggttttagtggttttgtttctaaaatgttttcttttaccgtgatgcaccagtatgagatggtgctgacactttctatgaagtggttatgagcaggtttaataaatcctctatacaagtgtttgaatcaattttaaaacataaaaagtggaaatttccttttttgtagacagtaggaacaaggaattatatgcatttttactaagtagtaattttacactgaattgtaaatgtttttacagtgagttttattaatagaatgcttcaccttaaattggaaaacaataatagtcttggactaagtctttgtactaaagcatttgctataattatttttaaaaaaacaaacagatgaaaacctcagagaaggcatgtggattataagatttgtctagtaaaaattgtaattgaatatgtttaaatatttaatttctcattttggggggtttttatttttttattttttagatggtgtctcacgctatcgcccaggctggagtgcagtggcgcgaactcggctcactgcaacctccgcctcctgggttcaagcaattctccttcctcagcctcccaagtagctgggattacaggcatgcaccaccatgcccagctaatttttgtatttttagtagagatggaattttgccatgttggccaggctggtcttgaactcctgacctcaggggtgatccacccgcctcgggctcccaaagtgctgtgattacaggcatgagccaccatgcctggcctttggggggattttaattacagtattaattatagttctaggatttcccacattttatagtagtagtttgcaggatattatgtgccctaattagcagatatagacattatcaaattataatgatagtataattatccctttttaatattggggaaagaaaaatgaaaattcattagttaattactgctttgtgttgtgtgaatttattaacaaataacattattacatataggtcattgttaacaaacaaacatccctgaaaacctctgtgaaaatttaattttttatatcctgattaatatattgtgactttaggcccatttttcatgtgcttcactttgatagagttaatccataaaattgctctttactttagcttatcaaatgaagtattattttgtggactggaggccaaaaagtcaatgtgagcttctcacaggtttttaaagctccactaaaaataattatccacttgtctttacttttgttgaccagaatagttggtaactctgccagagcctgtacttacctgccaaaaacaattaaatctggttaatgcctgaaaccaaatctctcagtctcaagtgttatactatccaagttttaaatggaaaggtaaactgtggagtaatgaaattttggttttactgtaccttttgctatcaagataatattcatgtttgaaatcttgtctttatttggaatttagttactgtctgcttttaacctttgctttcctaaagaaagtttgagatccagagagttcaagggattggggaaagagaggcgtcaagtcatttgcactttgtacctgtaagttaggtaataaactattatactcgta

SEQ ID NO: 415892 - DNA, 3033 bp, Homo sapiens
tagcatcgagtcggccttgttggcttactgtgagctctaaattctctttattgtaaaagagatgtaaaggttttatattctaaatcctagtaaaattgacagtgatttttaaatataatgcatcttcctttgtctgcttagtaaaaaatttcatttcataattttggcaagctctgtagtggatccaaagtatctttgagttcttgcaaactacaagttgtttcctttccagaaggcttgatttcattaggagacccctctattgagttctaaatagtttatcttagaaagccttgggtcattcacaggtatccaaccagccattgtttagtttgtttttgaaggggtttgataatgctttttaagttgtacagaatgcttaatccatcttattactgtcctgagccatgtaatatgcctgcatcgtgttggggaaatgtttgggaaatataagccagcataacgtgtaaagctcactctttcaccctggaacagacaagaggtgggcttaatagaggcagagactggggatatacctttgtttccctagcatttttatttatttatttttattttattttattttttgagatggagtttcactcttgttgcccaggctgggggtgcaatggcgcaatctttgctcactgcaacccctgcctcccgggctcaagcgattctcctgcctcagcctctcgagtagctgggattacaggcatgcgtcaccactcccagctaattttgtattttcagtagagacagggtttccccatgttggttaggctggtctcgaactcccaacctcaggtgatccgcccacctcagctctcaaagtgctgggattacaggcgggagccactgcacatggcagcattttttaaaaattcagttttaagatctctggtttaggggagagattttattttactgaaccagttctatagaaatttattttattaggaaatttgtctttggaacaaagtggcagctataaaattatttttgttaagcctcagaaatatgaggaagcctgtaaaactctagtggggagatattaacttggagacctaatgctctgtaaatagtcatttaaactgttggttttagtggttttgtttctaaaatgttttcttttaccgtgatgcaccagtatgagatggtgctgacactttctatgaagtggttatgagcaggtttaataaatcctctatacaagtgtttgaatcaattttaaaacataaaaagtggaaatttccttttttgtagacagtaggaacaaggaattatatgcatttttactaagtagtaattttacactgaattgtaaatgtttttacagtgagttttattaatagaatgcttcaccttaaattggaaaacaataatagtcttggactaagtctttgtactaaagcatttgctataattatttttaaaaaaacaaacagatgaaaacctcagagaaggcatgtggattataagatttgtctagtaaaaattgtaattgaatatgtttaaatatttaatttctcattttggggggtttttatttttttattttttagatggtgtctcacgctatcgcccaggctggagtgcagtggcgcgaactcggctcactgcaacctccgcctcctgggttcaagcaattctccttcctcagcctcccaagtagctgggattacaggcatgcaccaccatgcccagctaatttttgtatttttagtagagatggaattttgccatgttggccaggctggtcttgaactcctgacctcaggggtgatccacccgcctcgggctcccaaagtgctgtgattacaggcatgagccaccatgcctggcctttggggggattttaattacagtattaattatagttctaggatttcccacattttatagtagtagtttgcaggatattatgtgccctaattagcagatatagacattatcaaattataatgatagtataattatccctttttaatattggggaaagaaaaatgaaaattcattagttaattactgctttgtgttgtgtgaatttattaacaaataacattattacatataggtcattgttaacaaacaaacatccctgaaaacctctgtgaaaatttaattttttatatcctgattaatatattgtgactttaggcccatttttcatgtgcttcactttgatagagttaatccataaaattgctctttactttagcttatcaaatgaagtattattttgtggactggaggccaaaaagtcaatgtgagcttctcacaggtttttaaagctccactaaaaataattatccacttgtctttacttttgttgaccagaatagttggtaactctgccagagcctgtacttacctgccaaaaacaattaaatctggttaatgcctgaaaccaaatctctcagtctcaagtgttatactatccaagttttaaatggaaaggtaaactgtggagtaatgaaattttggttttactgtaccttttgctatcaagataatattcatgtttgaaatcttgtctttatttggaatttagttactgtctgcttttaacctttgctttcctaaagaaagtttgagatccagagagttcaagggattggggaaagagaggcgtcaagtcatttgcactttgtacctgtaagttaggtaataaactattatactcgtacttctgtgcctgaaggttttgtggtaggtatactgagatgtataagctgtactgttgcctttactaaactatttcattgccctttgcagccatttttacttaggggtgatgctaaaagatgagtgaattgagatatgtcaaaatagagtgatagagtgtttttaatatagagtctgcagattgtgaaagaagggtgaaagaacgataaataggttcagtagaataaatatataataagaggaccaaaaaaaaaaatcacaccatcttactttttttttttttgagactgagtcttgcactgttgcccaggctggagtacattggcgggatctcagctcactgca

SEQ ID NO: 415893 - DNA, 1509 bp, Homo sapiens
gaagagggtctgggcgatggtgcatccgggacgagcctccagagaccaagcgggataggtaaacccgccgcgcagctggcgggacgctgggccaacgaggtctggggtcttggcgcggagttcatgggccgccggccaggcttgtgccagtggctttggatccctggcctgcttcccccaacccagcctccagaccagcgctggcctgctccacacactccgcagcaccgtcccgggaaccgagcgtcggcggggaggccgcctctccgcaataccccatgtttccccatcactcgaggagtctgggcagagactggactacaccgtgggagaatctgcaaaggtgttgctggaacagacatatttctagttgtatgaggtggcctggacattactctcgagctccttacccatacttcagtagtaggcatttttcactaaattggagaccaccctgtttgtttgagtctagaactcagttccagtactgtaactggagacctgacaacctgagccagacatctttgattcatctctctagttacgtcatgaacgctgagggagatgagccttcatcaaaacgaagaaaacaccaaggtgtgataaagcggaattgggaatatatatgtagccatgataaagaaaaaacgaagatcctaggagacaaaaatgttgatcccaaatgtgaagacagtgagaacaagtttgacttttcagtgatgtcctataatatactttcacaagatttactggaagataactctcacctttatagacattgccggcggccagtattacactggagttttaggtttcccaatattctgaaagaaattaaacattttgatgcagacgtactttgtttgcaagaagttcaagaagatcattatggagcagagatcaggccaagtttggaatcactgggtacaatgcaactttttttttttttttttcttttttgagacagggtctcactctgtcgcccaactggagtgcagtggcacaatcatggctcactacagcctcaacctactgggctcaagtaatcctctcatttcggcttcctgagtagctgggactagagatgtgtgccaccatgcccggccaattatttaattttttttatagagacaaggcaatgtaacttttagccaaatttacttttgaaaattcatgtgtcattaaagtataacttgctgacaaagatgtgtggcatattttggctaaaaatcttaattttaaaaacttaatttcaaagaggaaaagattgaggtactcactggaaacttttgtgttggtgtataattttaattcaaacagaaagatgtgtaagaatatcttagtagctccctttcctaggagttgttctgtccacctgtagacctataagcttctgagctccaggagaccattttgtctcgttcatcattataataccagtgcctgccagtgtctacctaatggatagatgccaaaaacctgtttgataaataaacactcctagaaaca

SEQ ID NO: 415894 - DNA, 1202 bp, Homo sapiens
gaagagggtctgggcgatggtgcatccgggacgagcctccagagaccaagcgggataggtaaacccgccgcgcagctggcgggacgctgggccaacgaggtctggggtcttggcgcggagttcatgggccgccggccaggcttgtgccagtggctttggatccctggcctgcttcccccaacccagcctccagaccagcgctggcctgctccacacactccgcagcaccgtcccgggaaccgagcgtcggcggggaggccgcctctccgcaataccccatgtttccccatcactcgaggagtctgggcagagactggactacaccgtgggagaatctgcaaaggtgttgctggaacagacatatttctagttgtatgaggtggcctggacattactctcgagctccttacccatacttcagtagtaggcatttttcactaaattggagaccaccctgtttgtttgagtctagaactcagttccagtactgtaactggagacctgacaacctgagccagacatctttgattcatctctctagttacgtcatgaacgctgagggagatgagccttcatcaaaacgaagaaaacaccaaggtgtgataaagcggaattgggaatatatatgtagccatgataaagaaaaaacgaagatcctaggagacaaaaatgttgatcccaaatgtgaagacagtgagaacaagtttgacttttcagtgatgtcctataatatactttcacaagatttactggaagataactctcacctttatagacattgccggcggccagtattacactggagttttaggtttcccaatattctgaaagaaattaaacattttgatgcagacgtactttgtttgcaagaagttcaagaagatcattatggagcagagatcaggccaagtttggaatcactgggtacaatgcaactttttttttttttttttcttttttgagacagggtctcactctgtcgcccaactggagtgcagtggcacaatcatggctcactacagcctcaacctactgggctcaagtaatcctctcatttcggcttcctgagtagctgggactagagatgtgtgccaccatgcccggccaattatttaattttttttatagagacaaggcaatgtaacttttagccaaatttacttttgaaaattcatgtgtcattaaagtataacttgctgaca

SEQ ID NO: 415895 - DNA, 1184 bp, Homo sapiens
gaagagggtctgggcgatggtgcatccgggacgagcctccagagaccaagcgggataggtaaacccgccgcgcagctggcgggacgctgggccaacgaggtctggggtcttggcgcggagttcatgggccgccggccaggcttgtgccagtggctttggatccctggcctgcttcccccaacccagcctccagaccagcgctggcctgctccacacactccgcagcaccgtcccgggaaccgagcgtcggcggggaggccgcctctccgcaataccccatgtttccccatcactcgaggagtctgggcagagactggactacaccgtgggagaatctgcaaaggtgttgctggaacagacatatttctagttgtatgaggtggcctggacattactctcgagctccttacccatacttcagtagtaggcatttttcactaaattggagaccaccctgtttgtttgagtctagaactcagttccagtactgtaactggagacctgacaacctgagccagacatctttgattcatctctctagttacgtcatgaacgctgagggagatgagccttcatcaaaacgaagaaaacaccaaggtgtgataaagcggaattgggaatatatatgtagccatgataaagaaaaaacgaagatcctaggagacaaaaatgttgatcccaaatgtgaagacagtgagaacaagtttgacttttcagtgatgtcctataatatactttcacaagatttactggaagataactctcacctttatagacattgccggcggccagtattacactggagttttaggtttcccaatattctgaaagaaattaaacattttgatgcagacgtaagtgcaaaatattattgaaattcttcacataagaaaaagttggggccgggcacactggctcatgcttgtaatcccagcactttgggaggctgaggcaggtggatcacctgaggtcggtagtttgagaccagcctgaccaacatggagaaaccccgtctctactaaaaaatacaaaattagccgggcgtggtggctcatgcctgtaatcccagctactcaggaggctgaggcaggagaatcacttgaacctgggaggtcgatgttgcagtgagctgagattgcaccattgcaatccagcctgggcaacaagagcaaaactctgcctca

SEQ ID NO: 415896 - DNA, 782 bp, Homo sapiens
gattacttccgagctgtcctgcagcatgatgaaagaagtgaacgagcttttaagctaacccgggatgctattgagttaaatgcagccaattatacagtgtggcatttccggagagttcttttgaagtcacttcagaaggatctacatgaggaaatgaactacatcactgcaataattgaggagcagcccaaaaactatcaagtttggcatcataggcgagtattagtggaatggctaagagatccatctcaggagcttgaatttattgctgatattcttaatcaggatgcaaagaattatcatgcctggcagcatcgacaatgggttattcaggaatttaaactttgggataatgagctgcagtatgtggaccaacttctgaaagaggatgtgagaaataactctgtctggaaccaaagatacttcgttatttctaacaccactggctacaatgatcgtgctgtattggagagagaagtccagttagtaatctccttcacttgctcattcgttacaaacatgtttgcatgcctaccatatctcaggcactggggatacagcagatcaagatcctaccccatggaactaaaagaggacagagtactgagtggaacataggatgatagatttacaaataatgtagcatacttctacttcattgtatcttaagtttcttgaaatattgctactggagattggaaagaaatcttaatgttatggggtattgtctaagaagctttattttaaaaccatctcattaaattttgttgcattttaaaaaa

SEQ ID NO: 415897 - DNA, 1352 bp, Homo sapiens
gattacttccgagctgtcctgcagcatgatgaaagaagtgaacgagcttttaagctaacccgggatgctattgagttaaatgcagccaattatacagtgtggcatttccggagagttcttttgaagtcacttcagaaggatctacatgaggaaatgaactacatcactgcaataattgaggagcagcccaaaaactatcaagtttggcatcataggcgagtattagtggaatggctaagagatccatctcaggagcttgaatttattgctgatattcttaatcaggatgcaaagaattatcatgcctggcagcatcgacaatgggttattcaggaatttaaactttgggataatgagctgcagtatgtggaccaacttctgaaagaggatgtgagaaataactctgtctggaaccaaagatacttcgttatttctaacaccactggctacaatgatcgtgctgtattggagagagaagtccaatacactctggaaatgattaaactagtaccacataatgaaagtgcatggaactatttgaaagggattttgcaggatcgtggtctttccaaatatcctaatctgttaaatcaattacttgatttacaaccaagtcatagttccccctacctaattgcctttcttgtggatatctatgaagacatgctagaaaatcagtgtgacaataaggaagacattcttaataaagcattagagttatgtgaaatcctagctaaagaaaaggacactataagaaaggaatattggagatacattggaagatcccttcaaagcaaacacagcacagaaaatgactcaccaacaaatgtacagcaataacaccatccagaagaacttgatggaatgcttttattttttattaagggaccctgcaggagtttcacacgagagtggtccttccctttgcctgtggtgtaaaagtgcatcacacaggtattgctttttaacaagaactgatgctccttgggtgctgctgctactcagactagctctaagtaatgtgattcttctaaagcaaagtcattggatgggaggaggaagaaaaagtcccataaaggaacttttgtagtcttatcaacatataatctaatcccttagcatcagctcctccctcagtggtacatgcgtcaagatttgtagcagtaataactgcaggtcacttgtatgtaatggatgtgaggtagccgaagtttggttcagtaagcagggaatacagtcgttccatcagagctggtctgcacactcacattatcttgctatcactgtaaccaactaatgccaaaagaacggttttgtaataaaattatagctgtatctaaaaaaaaaaaaaa

SEQ ID NO: 415898 - DNA, 1481 bp, Homo sapiens
ctccatgcctatcctagactatctttgaacaagttttatttttaaagaagcagcactttctagtttgttttatcatgcctttatcaagaactttttaagaatttagggacgcacacctcttatgctctgcccccatatttcatatgtagaaacataaacatcgaatttatatctatactgtggtcactccttctcttactagtgagtttggggtttttttccctccaaattttcttggatgtcttttttcctgctttctgtatgtgtctttccaggctctatcatcaatttcatacttgtatccccctctatttcctttacttgcagctatcactaccttctgaatttgtgataaatcctgtgtcctcagttctaccttctttgttgtagttttaatttattttttattcataaataatgggacatttctaattggatgatttttctaaatttttcctttaggaatttaaactttgggataatgagctgcagtatgtggaccaacttctgaaagaggatgtgagaaataactctgtctggaaccaaagatacttcgttatttctaacaccactggctacaatgatcgtgctgtattggagagagaagtccaatacactctggaaatgattaaactagtaccacataatgaaagtgcatggaactatttgaaagggattttgcaggatcgtggtctttccaaatatcctaatctgttaaatcaattacttgatttacaaccaagtcatagttccccctacctaattgcctttcttgtggatatctatgaagacatgctagaaaatcagtgtgacaataaggaagacattcttaataaagcattagagttatgtgaaatcctagctaaagaaaaggacactataagaaaggaatattggagatacattggaagatcccttcaaagcaaacacagcacagaaaatgactcaccaacaaatgtacagcaataacaccatccagaagaacttgatggaatgcttttattttttattaagggaccctgcaggagtttcacacgagagtggtccttccctttgcctgtggtgtaaaagtgcatcacacaggtattgctttttaacaagaactgatgctccttgggtgctgctgctactcagactagctctaagtaatgtgattcttctaaagcaaagtcattggatgggaggaggaagaaaaagtcccataaaggaacttttgtagtcttatcaacatataatctaatcccttagcatcagctcctccctcagtggtacatgcgtcaagatttgtagcagtaataactgcaggtcacttgtatgtaatggatgtgaggtagccgaagtttggttcagtaagcagggaatacagtcgttccatcagagctggtctgcacactcacattatcttgctatcactgtaaccaactaatgccaaaagaacggttttgtaataaaattatagctgtatctaaaaaaaaaaaaaa

SEQ ID NO: 415899 - DNA, 823 bp, Homo sapiens
gaatgtctcaagacacccctgttttaaagatggatactggtagtgaaaagagagacggaatgagttttgtgtattctgagtgatgaattttctgctaactggtttaaagttttagttccatttgagtcataggaaaagttcaaaaggaatttttgatatacccctgaagggtcaggaaatctaaactccaggccctgtcactaatgaattttctgtgaccttgaccaggtcatgtctctttttctggggctctgttttctctaaacacgatccagtctaggtttgtttttaagagtaatttcctctttctctccaaactatatatataaataagaaaaaagcaaatgtttctaatgttcattttccttttttggtgcttatgaagttctcaaacaattttgttttctggataatataagaaaaatgtccagagaaaacagagacactgggaaaagatagttgcagcaaagaagagcaaaagaaagcaagaaaaagaacgaagaaaagccaatcgtgcagaaaatccaggtgacaataaatgagactgttggtataataatatttattttttagcaaacgtgtctgcatgttccaatgagagtaggaattttgtataagtaaaaagcatctgggatgtgggacccactgccctattttcttgggaatcaaaacatcaaagaaagcaaaatttgtagctgggtgtggtggctcacacctgtaatcccagcactttgggaggctgaggtgggtggatttgcgaggtcaggagatcgagaccgtcctggataacacggtgaaaccccatctctactaaaaatacaaa

SEQ ID NO: 415900 - DNA, 691 bp, Homo sapiens
ctttttgcagttttcagagcccgcccttttatatttttgagacagggtctcctctgtcacccaggctggagtgcagtggtgcagtcacagctcattgcagccttgatatatgtcccaggctcaagtgatcatccaacctcagcctccagagtagctgggactacaggcacacaccagcacaccctgtcaattttttttttgttatttgtagagacaggatctccctatgttgctcaggctggtcttgaactcctgggctcaagcagtcctctggccttggcctcaaagtgttgtgtgaggcacttcacctggcccctttcttttaattgggctctctcttctcacaccctaatgccacttgttgcagtggtgcacctgtcttgaatcttgtctaccttttcctctaatttgatgctgccttttggcaatgagctggaagttccagatatccagaattgggtcttactgagttagggctcagaatgtgctctgattgattagactgcttgggccttttgatgcctactgtggctgcagatgtgcctcttttgcttatttccctcttggttctaagtggcagtgagtggaggactgtggatgagtgaccccccaaaaagtaagatattgtcacataagctcttgagacagttaactcattatctgcagtttcttccattccacaataggctac

SEQ ID NO: 415901 - DNA, 480 bp, Homo sapiens
aaagacaggctgaagtgcagtggcatgatcttggctctctgcaacctctgcctcctgggctcaagccatcctgccacctcactcctaagtattatagctgggactacaggcacatgccaccatgcctggctaatttttttgtatttttagtagagactgggtttcaccatgttgcccagtctggtctcgaactttggagctcaagtgatccttccaccttagcctcccaaagttctgggattacagacgtgagccaccccacccagccgtgagctgttttaacatcagactgtttgcattttccagttagacataacagaagaagactgctttagtttatttcccttggaaacccttgtgtacctgactcctgactcagaacacgctcttgaagatgttgatctaaacaaagtttacatcctcggtgggcttgtggatgaaagcattcagaaggtaagtatacatttcagccccaacatc

SEQ ID NO: 415902 - DNA, 4659 bp, Homo sapiens
gggggatccgagtgcgcgccgctgccgctgcgtgggggtgaggggatcagtctggtggaaaggacagaggactaagtccatggactggaaattggaagggagtactcagaaagtagagtcacctgtgctgcaggggcaagaaggcatcctagaggagacaggtgaagatggacttcctgaaggcttccagcttctgcagatcgatgcggaaggcgagtgccaggagggagagatcctggccacaggcagtacggcatggtgctcgaaaaatgtccagagaaaacagagacactgggaaaagatagttgcagcaaagaagagcaaaagaaagcaagaaaaagaacgaagaaaagccaatcgtgcagaaaatccaggcatttgcccccagcacagcaaacgtttcctgagagctctaaccaaagacaaacttttggaagccaaacactcaggaccaagactatgtatcgatttgagtatgacccactacatgtcaaagaaggtagaacatccactaagcctggaattcctgctcgccatgagggaggcccagaagggtacagctttccgaagaatatggtcaactccagcttctgggattccttagtaaactagaattaagtagactggctggacagattcgaaggttgtatggttcaaacaaaaaagctgacaggccattttggatctgcctcactggattcacaacagacagtcccctttatgaagagtgtgtgaggatgaatgatggattttctagttacctgttagacataacagaagaagactgctttagtttatttcccttggaaacccttgtgtacctgactcctgactcagaacacgctcttgaagatgttgatctaaacaaagtttacatcctcggtgggcttgtggatgaaagcattcagaagaaggtgacatttcaaaaggcccgggaatactctgtcaagaccgcacgcttgccaatccaggaatacatggtcagaaaccagaatgggaaaaactatcattcagagatactggccatcaatcaagtgtttgatatcctgtccacttacttagagactcacaactggcctgaagcattgaagaaaggagtttcttcaggaaaaggctatattcttcggaactcagtggaatgatgggcctaagattgcagctgcgtggccaggtgctcacgccgtaatgccaacactttggtagaccgaagtgggcagatcacctgaggtcaggagttcacgaccagcctggccaacatggtgaaacccttctctactgaaaatacaaaaattagccaggtgtggtggcgcatacctgtagtcccagctacttgggaggctgaggcaggagaatcacttgaactcgggaggcgaaggttgcagtgagccgagatttcaccagtgcactccagcctgggtgacagagcaagactccatctcgaaaaaaaaaaaaaaaaaaaagagtggcatgtcacctattgtgtgtggcctgcacgtaatgcactaattcttaatccctcgctgatcccagtgtaaagtggagacaccagtacatactcagcctcacaggactgactggtcaggccactcatccccaggcacgcggccaccggtcactgacaactacagaccgactctgccacccagatcaggtgcccagatgctcagtcgctcacacaggtcagtgctgacagttgcttgtgaacaaactgaagttctgctttttgaccctatatcttcaaagcacataaaaacactttctgaagctcatgaagactgtgtaaataatatcagatttcttgataaccggctgtttgctacctgctctgatgacactacaatagcactatgggatctgagaaaattgaacaccaaagtatgcactttacatggtcacactagctgggtgaagaacatcgaatatgatactaatacaagactcttagtaacatcaggatttgatggaaatgtcattatttgggacactaacaggtatacagaagatgggtgtccacataagaaattctttcacacacgttttctcatgcgaatgaggttaacaccagattgttccaaaatgttgatttcaacgtcctctggatatctcttaattttgcatgaccttgacttaactaagtctttagaagtaggcagctatcccattttaagagcaagaagaactacttcaagttcaggagtttcaccacgaaatagtcttgaagtcgtaacccctgaagttcttggtgagagtgaccacggaaactgcatcacgtccttacagctgcacccaaaaggctgggccactcttcttcggtgctcaagcaacagtgatgatgaggagtgtacttgtgtctatgaattccaagaaggagctccagtgcgacctgtctcacctcgctgttctctacgactgactcattacattgaagaagccaatgtaggcaggggttacatcaaagaactttgcttcagccccgatggacgaatgatttcttccccacatggctatgggattcgcttgttgggatttgacaaacagtgcagtgaacttgttgactgcttgcccaaagaagccagtcccctgcgggtgatccgttctctgtactctcataatgatgtggtactgacaacaaagttctctccaacacattgtcagattgcctcagggtgccttagtggacgggtttctttgtatcagccaaagttttaggcacaacttacatcaaataaggaactcttctggtgtttgacttaggaattgcttcaatttagatgaagtattttctttttagaagatcttataagtttgggtcaagatcctggttcttatgggtccatgaacacacttgtgaccttagtacttggtcatccagcatcatacaggcatctccaagttagactctatgcagcatcatcttttgcagcattcctctgctcctgctgatctgtgccactgaactccagttcttctggtcattttgcatggtagctcttgtcacgttccttccttcctcactctctatttctctttccctctccctgtccctctctttctttgtgtttgttgattttggtgtcaattttgtggacatttggcaggagttttgactggggtaggagaaacccatgacattagaattgaataaaacctagaagttggatattggcatattggttgttgaaaaataaatttcatcctcacttatgagtatacttggccttttaaagttactgttatgtttatctatattgagcacagataatggcattattcttataattgttaagatagtcttgcaacaaaatgtcttttaagtttcctgttaaaattataaaaagattttcatggtgagagggattttattgtgaaattctagaaaaaaatattaccacctctctttgtaatttactttacttgtatgaatttaacatctctagcatgtatccttacttgatattttgttcctatcaacagcattagaaaggaaaggagacagaatgagctttggttatttctattgcacagaaaaggatttttaaaattagattagtataatatctggccatagagtgataagaacaatatgacttagattttctgtatttcatctgccagattatttgaatcacacaggatgatgtgttaacagtattagggtggaagaggaatcaagagtaaagaggtaggggtttactcatttttcttccctgagccaggtgtgacaagccaactctgtcaccattcgtgaggggagagttgcagtcctcttcaagctgttatcataagtacagtagtcagctacttggatatcaagactaagtgctgatatgaagacttgcctttgtgttttgttatgaaacacgcaagcataaagcaggactcaagcacaaggctgactgttctactttgaataacagcttccttgcagtctcctccacatgggtggtactgtgtttagaagggattaccaaaggctggagcgatttaagctatgcactagccttgccctcttaggttgcattctctttaggccactggttctcaaacattagggtgcactgtaaccattacagagcttgtgaaaagtgcagaaacctgagcctcaccttatgagattctgattcagccagggggaggacaggaatctgtatttttcatagcaacctcaagtaatctttattctgagggtctcgggattgcaggttgaaaaacacaaccttaatcagcagtaaattcttctctactcggccaggcgcagtggctcatgcctgtaatcccagcactttgggaggccgaggtgggtggatcacaaggtcaggagttcgagaccagcctgaccaacatggtgaaacgccatctctactaaaaatacaaaaattagccgggcgtggtggtgctcacctgtaatcccagctacccaggaggctgaggcaagagaatcacttgaacccgggaggcagagggtgcagtaagccgagattgcaccactgcactccagcctaggcgacagagcgagactctgtctcaaaaaaaaaaaaaaaaaaaaaaatgcagctgcaggagtgaggcgctgggaggtacctggacccaaagagcagggcagagggtggcagtggcacataggcaagtgtcttggcatgacatcttctcagagcttca

SEQ ID NO: 415903 - DNA, 3593 bp, Homo sapiens
agcggagctgaacaggggcactgaggtgtcggccggcggggcagtggcccggagcggggggcgggggcgttgatcatgtttccctttgggccccatagccctggaggggacggatcggccggagccggggctgaggagccgacgccccacgaggggcaggcagcagccaccgggccgccctcgccactacatcccggggctgatgcgacccatccccctccacccgcccgaagccctcgccgccccggcgccccatcgctgtccccggccccgcgctccggagagctagggctgcctggagctccggagtcctcaactgcctccgccccgggagagccgtcacctccctcccctccgtgccggcggcccgggccagactgcagggccaagagccggggccgacacggcctcggcgcgggcctgggcggccctggcgctaggctgttcgggtggctgaaagagcgcacctgggccgcgggctgttcgtggacccggcgcgggacaattttcgcaccatgactagcctctacggttccatccaccccgcggactcggtgtacctcagcacccgcacccacggcgccgtcttcaacctcgagtactcgcccgacgggtcagtgctgacagttgcttgtgaacaaactgaagttctgctttttgaccctatatcttcaaagcacataaaaacactttctgaagctcatgaagactgtgtaaataatatcagatttcttgataaccggctgtttgctacctgctctgatgacactacaatagcactatgggatctgagaaaattgaacaccaaagtatgcactttacatggtcacactagctgggtgaagaacatcgaatatgatactaatacaagactcttagtaacatcaggatttgatggaaatgtcattatttgggacactaacaggtatacagaagatgggtgtccacataagaaattctttcacacacgttttctcatgcgaatgaggttaacaccagattgttccaaaatgttgatttcaacgtcctctggatatctcttaattttgcatgaccttgacttaactaagtctttagaagtaggcagctatcccattttaagagcaagaagaactacttcaagttcaggagtttcaccacgaaatagtcttgaagtcgtaacccctgaagttcttggtgagagtgaccacggaaactgcatcacgtccttacagctgcacccaaaaggctgggccactcttcttcggtgctcaagcaacagtgatgatgaggagtgtacttgtgtctatgaattccaagaaggagctccagtgcgacctgtctcacctcgctgttctctacgactgactcattacattgaagaagccaatgtaggcaggggttacatcaaagaactttgcttcagccccgatggacgaatgatttcttccccacatggctatgggattcgcttgttgggatttgacaaacagtgcagtgaacttgttgactgcttgcccaaagaagccagtcccctgcgggtgatccgttctctgtactctcataatgatgtggtactgacaacaaagttctctccaacacattgtcagattgcctcagggtgccttagtggacgggtttctttgtatcagccaaagttttaggcacaacttacatcaaataaggaactcttctggtgtttgacttaggaattgcttcaatttagatgaagtattttctttttagaagatcttataagtttgggtcaagatcctggttcttatgggtccatgaacacacttgtgaccttagtacttggtcatccagcatcatacaggcatctccaagttagactctatgcagcatcatcttttgcagcattcctctgctcctgctgatctgtgccactgaactccagttcttctggtcattttgcatggtagctcttgtcacgttccttccttcctcactctctatttctctttccctctccctgtccctctctttctttgtgtttgttgattttggtgtcaattttgtggacatttggcaggagttttgactggggtaggagaaacccatgacattagaattgaataaaacctagaagttggatattggcatattggttgttgaaaaataaatttcatcctcacttatgagtatacttggccttttaaagttactgttatgtttatctatattgagcacagataatggcattattcttataattgttaagatagtcttgcaacaaaatgtcttttaagtttcctgttaaaattataaaaagattttcatggtgagagggattttattgtgaaattctagaaaaaaatattaccacctctctttgtaatttactttacttgtatgaatttaacatctctagcatgtatccttacttgatattttgttcctatcaacagcattagaaaggaaaggagacagaatgagctttggttatttctattgcacagaaaaggatttttaaaattagattagtataatatctggccatagagtgataagaacaatatgacttagattttctgtatttcatctgccagattatttgaatcacacaggatgatgtgttaacagtattagggtggaagaggaatcaagagtaaagaggtaggggtttactcatttttcttccctgagccaggtgtgacaagccaactctgtcaccattcgtgaggggagagttgcagtcctcttcaagctgttatcataagtacagtagtcagctacttggatatcaagactaagtgctgatatgaagacttgcctttgtgttttgttatgaaacacgcaagcataaagcaggactcaagcacaaggctgactgttctactttgaataacagcttccttgcagtctcctccacatgggtggtactgtgtttagaagggattaccaaaggctggagcgatttaagctatgcactagccttgccctcttaggttgcattctctttaggccactggttctcaaacattagggtgcactgtaaccattacagagcttgtgaaaagtgcagaaacctgagcctcaccttatgagattctgattcagccagggggaggacaggaatctgtatttttcatagcaacctcaagtaatctttattctgagggtctcgggattgcaggttgaaaaacacaaccttaatcagcagtaaattcttctctactcggccaggcgcagtggctcatgcctgtaatcccagcactttgggaggccgaggtgggtggatcacaaggtcaggagttcgagaccagcctgaccaacatggtgaaacgccatctctactaaaaatacaaaaattagccgggcgtggtggtgctcacctgtaatcccagctacccaggaggctgaggcaagagaatcacttgaacccgggaggcagagggtgcagtaagccgagattgcaccactgcactccagcctaggcgacagagcgagactctgtctcaaaaaaaaaaaaaaaaaaaaaaatgcagctgcaggagtgaggcgctgggaggtacctggacccaaagagcagggcagagggtggcagtggcacataggcaagtgtcttggcatgacatcttctcagagcttca

SEQ ID NO: 415904 - DNA, 4547 bp, Homo sapiens
gggggatccgagtgcgcgccgctgccgctgcgtgggggtgaggggatcagtctggtggaaaggacagaggactaagtccatggactggaaattggaagggagtactcagaaagtagagtcacctgtgctgcaggggcaagaaggcatcctagaggagacaggtgaagatggacttcctgaaggcttccagcttctgcagatcgatgcggaaggcgagtgccaggagggagagatcctggccacaggcagtacggcatggtgctcgaaaaatgtccagagaaaacagagacactgggaaaagatagttgcagcaaagaagagcaaaagaaagcaagaaaaagaacgaagaaaagccaatcgtgcagaaaatccaggcatttgcccccagcacagcaaacgtttcctgagagctctaaccaaagacaaacttttggaagccaaacactcaggaccaagactatgtatcgatttgagtatgacccactacatgtcaaagaaggaattaagtagactggctggacagattcgaaggttgtatggttcaaacaaaaaagctgacaggccattttggatctgcctcactggattcacaacagacagtcccctttatgaagagtgtgtgaggatgaatgatggattttctagttacctgttagacataacagaagaagactgctttagtttatttcccttggaaacccttgtgtacctgactcctgactcagaacacgctcttgaagatgttgatctaaacaaagtttacatcctcggtgggcttgtggatgaaagcattcagaagaaggtgacatttcaaaaggcccgggaatactctgtcaagaccgcacgcttgccaatccaggaatacatggtcagaaaccagaatgggaaaaactatcattcagagatactggccatcaatcaagtgtttgatatcctgtccacttacttagagactcacaactggcctgaagcattgaagaaaggagtttcttcaggaaaaggctatattcttcggaactcagtggaatgatgggcctaagattgcagctgcgtggccaggtgctcacgccgtaatgccaacactttggtagaccgaagtgggcagatcacctgaggtcaggagttcacgaccagcctggccaacatggtgaaacccttctctactgaaaatacaaaaattagccaggtgtggtggcgcatacctgtagtcccagctacttgggaggctgaggcaggagaatcacttgaactcgggaggcgaaggttgcagtgagccgagatttcaccagtgcactccagcctgggtgacagagcaagactccatctcgaaaaaaaaaaaaaaaaaaaagagtggcatgtcacctattgtgtgtggcctgcacgtaatgcactaattcttaatccctcgctgatcccagtgtaaagtggagacaccagtacatactcagcctcacaggactgactggtcaggccactcatccccaggcacgcggccaccggtcactgacaactacagaccgactctgccacccagatcaggtgcccagatgctcagtcgctcacacaggtcagtgctgacagttgcttgtgaacaaactgaagttctgctttttgaccctatatcttcaaagcacataaaaacactttctgaagctcatgaagactgtgtaaataatatcagatttcttgataaccggctgtttgctacctgctctgatgacactacaatagcactatgggatctgagaaaattgaacaccaaagtatgcactttacatggtcacactagctgggtgaagaacatcgaatatgatactaatacaagactcttagtaacatcaggatttgatggaaatgtcattatttgggacactaacaggtatacagaagatgggtgtccacataagaaattctttcacacacgttttctcatgcgaatgaggttaacaccagattgttccaaaatgttgatttcaacgtcctctggatatctcttaattttgcatgaccttgacttaactaagtctttagaagtaggcagctatcccattttaagagcaagaagaactacttcaagttcaggagtttcaccacgaaatagtcttgaagtcgtaacccctgaagttcttggtgagagtgaccacggaaactgcatcacgtccttacagctgcacccaaaaggctgggccactcttcttcggtgctcaagcaacagtgatgatgaggagtgtacttgtgtctatgaattccaagaaggagctccagtgcgacctgtctcacctcgctgttctctacgactgactcattacattgaagaagccaatgtaggcaggggttacatcaaagaactttgcttcagccccgatggacgaatgatttcttccccacatggctatgggattcgcttgttgggatttgacaaacagtgcagtgaacttgttgactgcttgcccaaagaagccagtcccctgcgggtgatccgttctctgtactctcataatgatgtggtactgacaacaaagttctctccaacacattgtcagattgcctcagggtgccttagtggacgggtttctttgtatcagccaaagttttaggcacaacttacatcaaataaggaactcttctggtgtttgacttaggaattgcttcaatttagatgaagtattttctttttagaagatcttataagtttgggtcaagatcctggttcttatgggtccatgaacacacttgtgaccttagtacttggtcatccagcatcatacaggcatctccaagttagactctatgcagcatcatcttttgcagcattcctctgctcctgctgatctgtgccactgaactccagttcttctggtcattttgcatggtagctcttgtcacgttccttccttcctcactctctatttctctttccctctccctgtccctctctttctttgtgtttgttgattttggtgtcaattttgtggacatttggcaggagttttgactggggtaggagaaacccatgacattagaattgaataaaacctagaagttggatattggcatattggttgttgaaaaataaatttcatcctcacttatgagtatacttggccttttaaagttactgttatgtttatctatattgagcacagataatggcattattcttataattgttaagatagtcttgcaacaaaatgtcttttaagtttcctgttaaaattataaaaagattttcatggtgagagggattttattgtgaaattctagaaaaaaatattaccacctctctttgtaatttactttacttgtatgaatttaacatctctagcatgtatccttacttgatattttgttcctatcaacagcattagaaaggaaaggagacagaatgagctttggttatttctattgcacagaaaaggatttttaaaattagattagtataatatctggccatagagtgataagaacaatatgacttagattttctgtatttcatctgccagattatttgaatcacacaggatgatgtgttaacagtattagggtggaagaggaatcaagagtaaagaggtaggggtttactcatttttcttccctgagccaggtgtgacaagccaactctgtcaccattcgtgaggggagagttgcagtcctcttcaagctgttatcataagtacagtagtcagctacttggatatcaagactaagtgctgatatgaagacttgcctttgtgttttgttatgaaacacgcaagcataaagcaggactcaagcacaaggctgactgttctactttgaataacagcttccttgcagtctcctccacatgggtggtactgtgtttagaagggattaccaaaggctggagcgatttaagctatgcactagccttgccctcttaggttgcattctctttaggccactggttctcaaacattagggtgcactgtaaccattacagagcttgtgaaaagtgcagaaacctgagcctcaccttatgagattctgattcagccagggggaggacaggaatctgtatttttcatagcaacctcaagtaatctttattctgagggtctcgggattgcaggttgaaaaacacaaccttaatcagcagtaaattcttctctactcggccaggcgcagtggctcatgcctgtaatcccagcactttgggaggccgaggtgggtggatcacaaggtcaggagttcgagaccagcctgaccaacatggtgaaacgccatctctactaaaaatacaaaaattagccgggcgtggtggtgctcacctgtaatcccagctacccaggaggctgaggcaagagaatcacttgaacccgggaggcagagggtgcagtaagccgagattgcaccactgcactccagcctaggcgacagagcgagactctgtctcaaaaaaaaaaaaaaaaaaaaaaatgcagctgcaggagtgaggcgctgggaggtacctggacccaaagagcagggcagagggtggcagtggcacataggcaagtgtcttggcatgacatcttctcagagcttca

SEQ ID NO: 415905 - DNA, 4701 bp, Homo sapiens
gaatgtctcaagacacccctgttttaaagatggatactggtagtgaaaagagagacggaatgagttttgtgtattctgagtgatgaattttctgctaactggtttaaagttttagttccatttgagtcataggaaaagttcaaaaggaatttttgatatacccctgaagggtcaggaaatctaaactccaggccctgtcactaatgaattttctgtgaccttgaccaggtcatgtctctttttctggggctctgttttctctaaacacgatccagtctaggtttgtttttaagagtaatttcctctttctctccaaactatatatataaataagaaaaaagcaaatgtttctaatgttcattttccttttttggtgcttatgaagttctcaaacaattttgttttctggataatataagaaaaatgtccagagaaaacagagacactgggaaaagatagttgcagcaaagaagagcaaaagaaagcaagaaaaagaacgaagaaaagccaatcgtgcagaaaatccaggcatttgcccccagcacagcaaacgtttcctgagagctctaaccaaagacaaacttttggaagccaaacactcaggaccaagactatgtatcgatttgagtatgacccactacatgtcaaagaaggaattaagtagactggctggacagattcgaaggttgtatggttcaaacaaaaaagctgacaggccattttggatctgcctcactggattcacaacagacagtcccctttatgaagagtgtgtgaggatgaatgatggattttctagttacctgttagacataacagaagaagactgctttagtttatttcccttggaaacccttgtgtacctgactcctgactcagaacacgctcttgaagatgttgatctaaacaaagtttacatcctcggtgggcttgtggatgaaagcattcagaagaaggtgacatttcaaaaggcccgggaatactctgtcaagaccgcacgcttgccaatccaggaatacatggtcagaaaccagaatgggaaaaactatcattcagagatactggccatcaatcaagtgtttgatatcctgtccacttacttagagactcacaactggcctgaagcattgaagaaaggagtttcttcaggaaaaggctatattcttcggaactcagtggaatgatgggcctaagattgcagctgcgtggccaggtgctcacgccgtaatgccaacactttggtagaccgaagtgggcagatcacctgaggtcaggagttcacgaccagcctggccaacatggtgaaacccttctctactgaaaatacaaaaattagccaggtgtggtggcgcatacctgtagtcccagctacttgggaggctgaggcaggagaatcacttgaactcgggaggcgaaggttgcagtgagccgagatttcaccagtgcactccagcctgggtgacagagcaagactccatctcgaaaaaaaaaaaaaaaaaaaagagtggcatgtcacctattgtgtgtggcctgcacgtaatgcactaattcttaatccctcgctgatcccagtgtaaagtggagacaccagtacatactcagcctcacaggactgactggtcaggccactcatccccaggcacgcggccaccggtcactgacaactacagaccgactctgccacccagatcaggtgcccagatgctcagtcgctcacacaggtcagtgctgacagttgcttgtgaacaaactgaagttctgctttttgaccctatatcttcaaagcacataaaaacactttctgaagctcatgaagactgtgtaaataatatcagatttcttgataaccggctgtttgctacctgctctgatgacactacaatagcactatgggatctgagaaaattgaacaccaaagtatgcactttacatggtcacactagctgggtgaagaacatcgaatatgatactaatacaagactcttagtaacatcaggatttgatggaaatgtcattatttgggacactaacaggtatacagaagatgggtgtccacataagaaattctttcacacacgttttctcatgcgaatgaggttaacaccagattgttccaaaatgttgatttcaacgtcctctggatatctcttaattttgcatgaccttgacttaactaagtctttagaagtaggcagctatcccattttaagagcaagaagaactacttcaagttcaggagtttcaccacgaaatagtcttgaagtcgtaacccctgaagttcttggtgagagtgaccacggaaactgcatcacgtccttacagctgcacccaaaaggctgggccactcttcttcggtgctcaagcaacagtgatgatgaggagtgtacttgtgtctatgaattccaagaaggagctccagtgcgacctgtctcacctcgctgttctctacgactgactcattacattgaagaagccaatgtaggcaggggttacatcaaagaactttgcttcagccccgatggacgaatgatttcttccccacatggctatgggattcgcttgttgggatttgacaaacagtgcagtgaacttgttgactgcttgcccaaagaagccagtcccctgcgggtgatccgttctctgtactctcataatgatgtggtactgacaacaaagttctctccaacacattgtcagattgcctcagggtgccttagtggacgggtttctttgtatcagccaaagttttaggcacaacttacatcaaataaggaactcttctggtgtttgacttaggaattgcttcaatttagatgaagtattttctttttagaagatcttataagtttgggtcaagatcctggttcttatgggtccatgaacacacttgtgaccttagtacttggtcatccagcatcatacaggcatctccaagttagactctatgcagcatcatcttttgcagcattcctctgctcctgctgatctgtgccactgaactccagttcttctggtcattttgcatggtagctcttgtcacgttccttccttcctcactctctatttctctttccctctccctgtccctctctttctttgtgtttgttgattttggtgtcaattttgtggacatttggcaggagttttgactggggtaggagaaacccatgacattagaattgaataaaacctagaagttggatattggcatattggttgttgaaaaataaatttcatcctcacttatgagtatacttggccttttaaagttactgttatgtttatctatattgagcacagataatggcattattcttataattgttaagatagtcttgcaacaaaatgtcttttaagtttcctgttaaaattataaaaagattttcatggtgagagggattttattgtgaaattctagaaaaaaatattaccacctctctttgtaatttactttacttgtatgaatttaacatctctagcatgtatccttacttgatattttgttcctatcaacagcattagaaaggaaaggagacagaatgagctttggttatttctattgcacagaaaaggatttttaaaattagattagtataatatctggccatagagtgataagaacaatatgacttagattttctgtatttcatctgccagattatttgaatcacacaggatgatgtgttaacagtattagggtggaagaggaatcaagagtaaagaggtaggggtttactcatttttcttccctgagccaggtgtgacaagccaactctgtcaccattcgtgaggggagagttgcagtcctcttcaagctgttatcataagtacagtagtcagctacttggatatcaagactaagtgctgatatgaagacttgcctttgtgttttgttatgaaacacgcaagcataaagcaggactcaagcacaaggctgactgttctactttgaataacagcttccttgcagtctcctccacatgggtggtactgtgtttagaagggattaccaaaggctggagcgatttaagctatgcactagccttgccctcttaggttgcattctctttaggccactggttctcaaacattagggtgcactgtaaccattacagagcttgtgaaaagtgcagaaacctgagcctcaccttatgagattctgattcagccagggggaggacaggaatctgtatttttcatagcaacctcaagtaatctttattctgagggtctcgggattgcaggttgaaaaacacaaccttaatcagcagtaaattcttctctactcggccaggcgcagtggctcatgcctgtaatcccagcactttgggaggccgaggtgggtggatcacaaggtcaggagttcgagaccagcctgaccaacatggtgaaacgccatctctactaaaaatacaaaaattagccgggcgtggtggtgctcacctgtaatcccagctacccaggaggctgaggcaagagaatcacttgaacccgggaggcagagggtgcagtaagccgagattgcaccactgcactccagcctaggcgacagagcgagactctgtctcaaaaaaaaaaaaaaaaaaaaaaatgcagctgcaggagtgaggcgctgggaggtacctggacccaaagagcagggcagagggtggcagtggcacataggcaagtgtcttggcatgacatcttctcagagcttca

SEQ ID NO: 415906 - DNA, 4735 bp, Homo sapiens
ttaaggctgcttttcaaatataagctatctaactaacgtgtttataagctcagaataggagtgataccagcaacagctaatatttattcagtattctgtgttaggttcagttctaagaattttacatggattacctcaataaagaggagctgttattatcattcccattttgtaggtgaagagactgaggcttagagaaattaagtaacataattatgcccaagataatgtagccaatcaatgaacaaactgaacttggatttaaaccctgctgtgtgctgcagagcccatactcctcaccactctgtgtaaatcttctaatgaacgaataccttacatcagtatcaagtttctctttatatgcaaaatacccacctggctaagatttgtttcttatataatattcctctggttttccacttttatttctttctgatatttctgctttaggcatttgcccccagcacagcaaacgtttcctgagagctctaaccaaagacaaacttttggaagccaaacactcaggaccaagactatgtatcgatttgagtatgacccactacatgtcaaagaaggtagaacatccactaagcctggaattcctgctcgccatgagggaggcccagaagggtacagctttccgaagaatatggtcaactccagcttctgggattccttagtaaactagaattaagtagactggctggacagattcgaaggttgtatggttcaaacaaaaaagctgacaggccattttggatctgcctcactggattcacaacagacagtcccctttatgaagagtgtgtgaggatgaatgatggattttctagttacctgttagacataacagaagaagactgctttagtttatttcccttggaaacccttgtgtacctgactcctgactcagaacacgctcttgaagatgttgatctaaacaaagtttacatcctcggtgggcttgtggatgaaagcattcagaagaaggtgacatttcaaaaggcccgggaatactctgtcaagaccgcacgcttgccaatccaggaatacatggtcagaaaccagaatgggaaaaactatcattcagagatactggccatcaatcaagtgtttgatatcctgtccacttacttagagactcacaactggcctgaagcattgaagaaaggagtttcttcaggaaaaggctatattcttcggaactcagtggaatgatgggcctaagattgcagctgcgtggccaggtgctcacgccgtaatgccaacactttggtagaccgaagtgggcagatcacctgaggtcaggagttcacgaccagcctggccaacatggtgaaacccttctctactgaaaatacaaaaattagccaggtgtggtggcgcatacctgtagtcccagctacttgggaggctgaggcaggagaatcacttgaactcgggaggcgaaggttgcagtgagccgagatttcaccagtgcactccagcctgggtgacagagcaagactccatctcgaaaaaaaaaaaaaaaaaaaagagtggcatgtcacctattgtgtgtggcctgcacgtaatgcactaattcttaatccctcgctgatcccagtgtaaagtggagacaccagtacatactcagcctcacaggactgactggtcaggccactcatccccaggcacgcggccaccggtcactgacaactacagaccgactctgccacccagatcaggtgcccagatgctcagtcgctcacacaggtcagtgctgacagttgcttgtgaacaaactgaagttctgctttttgaccctatatcttcaaagcacataaaaacactttctgaagctcatgaagactgtgtaaataatatcagatttcttgataaccggctgtttgctacctgctctgatgacactacaatagcactatgggatctgagaaaattgaacaccaaagtatgcactttacatggtcacactagctgggtgaagaacatcgaatatgatactaatacaagactcttagtaacatcaggatttgatggaaatgtcattatttgggacactaacaggtatacagaagatgggtgtccacataagaaattctttcacacacgttttctcatgcgaatgaggttaacaccagattgttccaaaatgttgatttcaacgtcctctggatatctcttaattttgcatgaccttgacttaactaagtctttagaagtaggcagctatcccattttaagagcaagaagaactacttcaagttcaggagtttcaccacgaaatagtcttgaagtcgtaacccctgaagttcttggtgagagtgaccacggaaactgcatcacgtccttacagctgcacccaaaaggctgggccactcttcttcggtgctcaagcaacagtgatgatgaggagtgtacttgtgtctatgaattccaagaaggagctccagtgcgacctgtctcacctcgctgttctctacgactgactcattacattgaagaagccaatgtaggcaggggttacatcaaagaactttgcttcagccccgatggacgaatgatttcttccccacatggctatgggattcgcttgttgggatttgacaaacagtgcagtgaacttgttgactgcttgcccaaagaagccagtcccctgcgggtgatccgttctctgtactctcataatgatgtggtactgacaacaaagttctctccaacacattgtcagattgcctcagggtgccttagtggacgggtttctttgtatcagccaaagttttaggcacaacttacatcaaataaggaactcttctggtgtttgacttaggaattgcttcaatttagatgaagtattttctttttagaagatcttataagtttgggtcaagatcctggttcttatgggtccatgaacacacttgtgaccttagtacttggtcatccagcatcatacaggcatctccaagttagactctatgcagcatcatcttttgcagcattcctctgctcctgctgatctgtgccactgaactccagttcttctggtcattttgcatggtagctcttgtcacgttccttccttcctcactctctatttctctttccctctccctgtccctctctttctttgtgtttgttgattttggtgtcaattttgtggacatttggcaggagttttgactggggtaggagaaacccatgacattagaattgaataaaacctagaagttggatattggcatattggttgttgaaaaataaatttcatcctcacttatgagtatacttggccttttaaagttactgttatgtttatctatattgagcacagataatggcattattcttataattgttaagatagtcttgcaacaaaatgtcttttaagtttcctgttaaaattataaaaagattttcatggtgagagggattttattgtgaaattctagaaaaaaatattaccacctctctttgtaatttactttacttgtatgaatttaacatctctagcatgtatccttacttgatattttgttcctatcaacagcattagaaaggaaaggagacagaatgagctttggttatttctattgcacagaaaaggatttttaaaattagattagtataatatctggccatagagtgataagaacaatatgacttagattttctgtatttcatctgccagattatttgaatcacacaggatgatgtgttaacagtattagggtggaagaggaatcaagagtaaagaggtaggggtttactcatttttcttccctgagccaggtgtgacaagccaactctgtcaccattcgtgaggggagagttgcagtcctcttcaagctgttatcataagtacagtagtcagctacttggatatcaagactaagtgctgatatgaagacttgcctttgtgttttgttatgaaacacgcaagcataaagcaggactcaagcacaaggctgactgttctactttgaataacagcttccttgcagtctcctccacatgggtggtactgtgtttagaagggattaccaaaggctggagcgatttaagctatgcactagccttgccctcttaggttgcattctctttaggccactggttctcaaacattagggtgcactgtaaccattacagagcttgtgaaaagtgcagaaacctgagcctcaccttatgagattctgattcagccagggggaggacaggaatctgtatttttcatagcaacctcaagtaatctttattctgagggtctcgggattgcaggttgaaaaacacaaccttaatcagcagtaaattcttctctactcggccaggcgcagtggctcatgcctgtaatcccagcactttgggaggccgaggtgggtggatcacaaggtcaggagttcgagaccagcctgaccaacatggtgaaacgccatctctactaaaaatacaaaaattagccgggcgtggtggtgctcacctgtaatcccagctacccaggaggctgaggcaagagaatcacttgaacccgggaggcagagggtgcagtaagccgagattgcaccactgcactccagcctaggcgacagagcgagactctgtctcaaaaaaaaaaaaaaaaaaaaaaatgcagctgcaggagtgaggcgctgggaggtacctggacccaaagagcagggcagagggtggcagtggcacataggcaagtgtcttggcatgacatcttctcagagcttca

SEQ ID NO: 415907 - DNA, 4098 bp, Homo sapiens
gggggatccgagtgcgcgccgctgccgctgcgtgggggtgaggggatcaggaattaagtagactggctggacagattcgaaggttgtatggttcaaacaaaaaagctgacaggccattttggatctgcctcactggattcacaacagacagtcccctttatgaagagtgtgtgaggatgaatgatggattttctagttacctgttagacataacagaagaagactgctttagtttatttcccttggaaacccttgtgtacctgactcctgactcagaacacgctcttgaagatgttgatctaaacaaagtttacatcctcggtgggcttgtggatgaaagcattcagaagaaggtgacatttcaaaaggcccgggaatactctgtcaagaccgcacgcttgccaatccaggaatacatggtcagaaaccagaatgggaaaaactatcattcagagatactggccatcaatcaagtgtttgatatcctgtccacttacttagagactcacaactggcctgaagcattgaagaaaggagtttcttcaggaaaaggctatattcttcggaactcagtggaatgatgggcctaagattgcagctgcgtggccaggtgctcacgccgtaatgccaacactttggtagaccgaagtgggcagatcacctgaggtcaggagttcacgaccagcctggccaacatggtgaaacccttctctactgaaaatacaaaaattagccaggtgtggtggcgcatacctgtagtcccagctacttgggaggctgaggcaggagaatcacttgaactcgggaggcgaaggttgcagtgagccgagatttcaccagtgcactccagcctgggtgacagagcaagactccatctcgaaaaaaaaaaaaaaaaaaaagagtggcatgtcacctattgtgtgtggcctgcacgtaatgcactaattcttaatccctcgctgatcccagtgtaaagtggagacaccagtacatactcagcctcacaggactgactggtcaggccactcatccccaggcacgcggccaccggtcactgacaactacagaccgactctgccacccagatcaggtgcccagatgctcagtcgctcacacaggtcagtgctgacagttgcttgtgaacaaactgaagttctgctttttgaccctatatcttcaaagcacataaaaacactttctgaagctcatgaagactgtgtaaataatatcagatttcttgataaccggctgtttgctacctgctctgatgacactacaatagcactatgggatctgagaaaattgaacaccaaagtatgcactttacatggtcacactagctgggtgaagaacatcgaatatgatactaatacaagactcttagtaacatcaggatttgatggaaatgtcattatttgggacactaacaggtatacagaagatgggtgtccacataagaaattctttcacacacgttttctcatgcgaatgaggttaacaccagattgttccaaaatgttgatttcaacgtcctctggatatctcttaattttgcatgaccttgacttaactaagtctttagaagtaggcagctatcccattttaagagcaagaagaactacttcaagttcaggagtttcaccacgaaatagtcttgaagtcgtaacccctgaagttcttggtgagagtgaccacggaaactgcatcacgtccttacagctgcacccaaaaggctgggccactcttcttcggtgctcaagcaacagtgatgatgaggagtgtacttgtgtctatgaattccaagaaggagctccagtgcgacctgtctcacctcgctgttctctacgactgactcattacattgaagaagccaatgtaggcaggggttacatcaaagaactttgcttcagccccgatggacgaatgatttcttccccacatggctatgggattcgcttgttgggatttgacaaacagtgcagtgaacttgttgactgcttgcccaaagaagccagtcccctgcgggtgatccgttctctgtactctcataatgatgtggtactgacaacaaagttctctccaacacattgtcagattgcctcagggtgccttagtggacgggtttctttgtatcagccaaagttttaggcacaacttacatcaaataaggaactcttctggtgtttgacttaggaattgcttcaatttagatgaagtattttctttttagaagatcttataagtttgggtcaagatcctggttcttatgggtccatgaacacacttgtgaccttagtacttggtcatccagcatcatacaggcatctccaagttagactctatgcagcatcatcttttgcagcattcctctgctcctgctgatctgtgccactgaactccagttcttctggtcattttgcatggtagctcttgtcacgttccttccttcctcactctctatttctctttccctctccctgtccctctctttctttgtgtttgttgattttggtgtcaattttgtggacatttggcaggagttttgactggggtaggagaaacccatgacattagaattgaataaaacctagaagttggatattggcatattggttgttgaaaaataaatttcatcctcacttatgagtatacttggccttttaaagttactgttatgtttatctatattgagcacagataatggcattattcttataattgttaagatagtcttgcaacaaaatgtcttttaagtttcctgttaaaattataaaaagattttcatggtgagagggattttattgtgaaattctagaaaaaaatattaccacctctctttgtaatttactttacttgtatgaatttaacatctctagcatgtatccttacttgatattttgttcctatcaacagcattagaaaggaaaggagacagaatgagctttggttatttctattgcacagaaaaggatttttaaaattagattagtataatatctggccatagagtgataagaacaatatgacttagattttctgtatttcatctgccagattatttgaatcacacaggatgatgtgttaacagtattagggtggaagaggaatcaagagtaaagaggtaggggtttactcatttttcttccctgagccaggtgtgacaagccaactctgtcaccattcgtgaggggagagttgcagtcctcttcaagctgttatcataagtacagtagtcagctacttggatatcaagactaagtgctgatatgaagacttgcctttgtgttttgttatgaaacacgcaagcataaagcaggactcaagcacaaggctgactgttctactttgaataacagcttccttgcagtctcctccacatgggtggtactgtgtttagaagggattaccaaaggctggagcgatttaagctatgcactagccttgccctcttaggttgcattctctttaggccactggttctcaaacattagggtgcactgtaaccattacagagcttgtgaaaagtgcagaaacctgagcctcaccttatgagattctgattcagccagggggaggacaggaatctgtatttttcatagcaacctcaagtaatctttattctgagggtctcgggattgcaggttgaaaaacacaaccttaatcagcagtaaattcttctctactcggccaggcgcagtggctcatgcctgtaatcccagcactttgggaggccgaggtgggtggatcacaaggtcaggagttcgagaccagcctgaccaacatggtgaaacgccatctctactaaaaatacaaaaattagccgggcgtggtggtgctcacctgtaatcccagctacccaggaggctgaggcaagagaatcacttgaacccgggaggcagagggtgcagtaagccgagattgcaccactgcactccagcctaggcgacagagcgagactctgtctcaaaaaaaaaaaaaaaaaaaaaaatgcagctgcaggagtgaggcgctgggaggtacctggacccaaagagcagggcagagggtggcagtggcacataggcaagtgtcttggcatgacatcttctcagagcttca

SEQ ID NO: 415908 - DNA, 3975 bp, Homo sapiens
aatgcccagcttttaacctctcaccactgaattcctgtttgatcttcagggttcagttcaggagcatcttggcccttccccatcccaggccacagcagagcccttctgtttcccattttactgtgttcctttctgttgcaccctatccattcataggcctgtatctttcagggtaggctgaggtccttgagagcaagcagagcctgtgtccttgcctctccccgcaagaccttagtaccacatatggtgcagaataggtttgttgaacgaaatattacagaacatccttttcatttactcgttctttttttccctctgtggtcactgtgttttctgtttactctctaacagtgtttgatatcctgtccacttacttagagactcacaactggcctgaagcattgaagaaaggagtttcttcaggaaaaggctatattcttcggaactcagtggaatgatgggcctaagattgcagctgcgtggccaggtgctcacgccgtaatgccaacactttggtagaccgaagtgggcagatcacctgaggtcaggagttcacgaccagcctggccaacatggtgaaacccttctctactgaaaatacaaaaattagccaggtgtggtggcgcatacctgtagtcccagctacttgggaggctgaggcaggagaatcacttgaactcgggaggcgaaggttgcagtgagccgagatttcaccagtgcactccagcctgggtgacagagcaagactccatctcgaaaaaaaaaaaaaaaaaaaagagtggcatgtcacctattgtgtgtggcctgcacgtaatgcactaattcttaatccctcgctgatcccagtgtaaagtggagacaccagtacatactcagcctcacaggactgactggtcaggccactcatccccaggcacgcggccaccggtcactgacaactacagaccgactctgccacccagatcaggtgcccagatgctcagtcgctcacacaggtcagtgctgacagttgcttgtgaacaaactgaagttctgctttttgaccctatatcttcaaagcacataaaaacactttctgaagctcatgaagactgtgtaaataatatcagatttcttgataaccggctgtttgctacctgctctgatgacactacaatagcactatgggatctgagaaaattgaacaccaaagtatgcactttacatggtcacactagctgggtgaagaacatcgaatatgatactaatacaagactcttagtaacatcaggatttgatggaaatgtcattatttgggacactaacaggtatacagaagatgggtgtccacataagaaattctttcacacacgttttctcatgcgaatgaggttaacaccagattgttccaaaatgttgatttcaacgtcctctggatatctcttaattttgcatgaccttgacttaactaagtctttagaagtaggcagctatcccattttaagagcaagaagaactacttcaagttcaggagtttcaccacgaaatagtcttgaagtcgtaacccctgaagttcttggtgagagtgaccacggaaactgcatcacgtccttacagctgcacccaaaaggctgggccactcttcttcggtgctcaagcaacagtgatgatgaggagtgtacttgtgtctatgaattccaagaaggagctccagtgcgacctgtctcacctcgctgttctctacgactgactcattacattgaagaagccaatgtaggcaggggttacatcaaagaactttgcttcagccccgatggacgaatgatttcttccccacatggctatgggattcgcttgttgggatttgacaaacagtgcagtgaacttgttgactgcttgcccaaagaagccagtcccctgcgggtgatccgttctctgtactctcataatgatgtggtactgacaacaaagttctctccaacacattgtcagattgcctcagggtgccttagtggacgggtttctttgtatcagccaaagttttaggcacaacttacatcaaataaggaactcttctggtgtttgacttaggaattgcttcaatttagatgaagtattttctttttagaagatcttataagtttgggtcaagatcctggttcttatgggtccatgaacacacttgtgaccttagtacttggtcatccagcatcatacaggcatctccaagttagactctatgcagcatcatcttttgcagcattcctctgctcctgctgatctgtgccactgaactccagttcttctggtcattttgcatggtagctcttgtcacgttccttccttcctcactctctatttctctttccctctccctgtccctctctttctttgtgtttgttgattttggtgtcaattttgtggacatttggcaggagttttgactggggtaggagaaacccatgacattagaattgaataaaacctagaagttggatattggcatattggttgttgaaaaataaatttcatcctcacttatgagtatacttggccttttaaagttactgttatgtttatctatattgagcacagataatggcattattcttataattgttaagatagtcttgcaacaaaatgtcttttaagtttcctgttaaaattataaaaagattttcatggtgagagggattttattgtgaaattctagaaaaaaatattaccacctctctttgtaatttactttacttgtatgaatttaacatctctagcatgtatccttacttgatattttgttcctatcaacagcattagaaaggaaaggagacagaatgagctttggttatttctattgcacagaaaaggatttttaaaattagattagtataatatctggccatagagtgataagaacaatatgacttagattttctgtatttcatctgccagattatttgaatcacacaggatgatgtgttaacagtattagggtggaagaggaatcaagagtaaagaggtaggggtttactcatttttcttccctgagccaggtgtgacaagccaactctgtcaccattcgtgaggggagagttgcagtcctcttcaagctgttatcataagtacagtagtcagctacttggatatcaagactaagtgctgatatgaagacttgcctttgtgttttgttatgaaacacgcaagcataaagcaggactcaagcacaaggctgactgttctactttgaataacagcttccttgcagtctcctccacatgggtggtactgtgtttagaagggattaccaaaggctggagcgatttaagctatgcactagccttgccctcttaggttgcattctctttaggccactggttctcaaacattagggtgcactgtaaccattacagagcttgtgaaaagtgcagaaacctgagcctcaccttatgagattctgattcagccagggggaggacaggaatctgtatttttcatagcaacctcaagtaatctttattctgagggtctcgggattgcaggttgaaaaacacaaccttaatcagcagtaaattcttctctactcggccaggcgcagtggctcatgcctgtaatcccagcactttgggaggccgaggtgggtggatcacaaggtcaggagttcgagaccagcctgaccaacatggtgaaacgccatctctactaaaaatacaaaaattagccgggcgtggtggtgctcacctgtaatcccagctacccaggaggctgaggcaagagaatcacttgaacccgggaggcagagggtgcagtaagccgagattgcaccactgcactccagcctaggcgacagagcgagactctgtctcaaaaaaaaaaaaaaaaaaaaaaatgcagctgcaggagtgaggcgctgggaggtacctggacccaaagagcagggcagagggtggcagtggcacataggcaagtgtcttggcatgacatcttctcagagcttca

SEQ ID NO: 415909 - DNA, 4770 bp, Homo sapiens
gggggatccgagtgcgcgccgctgccgctgcgtgggggtgaggggatcagtctggtggaaaggacagaggactaagtccatggactggaaattggaagggagtactcagaaagtagagtcacctgtgctgcaggggcaagaaggcatcctagaggagacaggtgaagatggacttcctgaaggcttccagcttctgcagatcgatgcggaaggcgagtgccaggagggagagatcctggccacaggcagtacggcatggtgctcgaaaaatgtccagagaaaacagagacactgggaaaagatagttgcagcaaagaagagcaaaagaaagcaagaaaaagaacgaagaaaagccaatcgtgcagaaaatccaggcatttgcccccagcacagcaaacgtttcctgagagctctaaccaaagacaaacttttggaagccaaacactcaggaccaagactatgtatcgatttgagtatgacccactacatgtcaaagaaggtagaacatccactaagcctggaattcctgctcgccatgagggaggcccagaagggtacagctttccgaagaatatggtcaactccagcttctgggattccttagtaaactagaattaagtagactggctggacagattcgaaggttgtatggttcaaacaaaaaagctgacaggccattttggatctgcctcactggattcacaacagacagtcccctttatgaagagtgtgtgaggatgaatgatggattttctagttacctgttagacataacagaagaagactgctttagtttatttcccttggaaacccttgtgtacctgactcctgactcagaacacgctcttgaagatgttgatctaaacaaagtttacatcctcggtgggcttgtggatgaaagcattcagaagaaggtgacatttcaaaaggcccgggaatactctgtcaagaccgcacgcttgccaatccaggaatacatggtcagaaaccagaatgggaaaaactatcattcagagatactggccatcaatcaagtgtttgatatcctgtccacttacttagagactcacaactggcctgaagcattgaagaaaggagtttcttcaggaaaaggctatattcttcggaactcagtggaatgatgggcctaagattgcagctgcgtggccaggtgctcacgccgtaatgccaacactttggtagaccgaagtgggcagatcacctgaggtcaggagttcacgaccagcctggccaacatggtgaaacccttctctactgaaaatacaaaaattagccaggtgtggtggcgcatacctgtagtcccagctacttgggaggctgaggcaggagaatcacttgaactcgggaggcgaaggttgcagtgagccgagatttcaccagtgcactccagcctgggtgacagagcaagactccatctcgaaaaaaaaaaaaaaaaaaaagagtggcatgtcacctattgtgtgtggcctgcacgtaatgcactaattcttaatccctcgctgatcccagtgtaaagtggagacaccagtacatactcagcctcacaggactgactggtcaggccactcatccccaggcacgcggccaccggtcactgacaactacagaccgactctgccacccagatcaggtgcccagatgctcagtcgctcacacaggtcagtgctgacagttgcttgtgaacaaactgaagttctgctttttgaccctatatcttcaaagcacataaaaacactttctgaagctcatgaagactgtgtaaataatatcagatttcttgataaccggctgtttgctacctgctctgatgacactacaatagcactatgggatctgagaaaattgaacaccaaagtatgcactttacatggtcacactagctgggtgaagaacatcgaatatgatactaatacaagactcttagtaacatcaggatttgatggaaatgtcattatttgggacactaacaggtatacagaagatgggtgtccacataagaaattctttcacacacgttttctcatgcgaatgaggttaacaccagattgttccaaaatgttgatttcaacgtcctctggatatctcttaattttgcatgaccttgacttaactaagtctttagaagtaggcagctatcccattttaagagcaagaagaactacttcaagttcagatttgaccacttcatcaagttcatctggtcctagagtttctggctcaccttgtcatcatagtgattctaattcttctgagaaacacatgtcacgagcctctcaaagagaaggagtttcaccacgaaatagtcttgaagtcgtaacccctgaagttcttggtgagagtgaccacggaaactgcatcacgtccttacagctgcacccaaaaggctgggccactcttcttcggtgctcaagcaacagtgatgatgaggagtgtacttgtgtctatgaattccaagaaggagctccagtgcgacctgtctcacctcgctgttctctacgactgactcattacattgaagaagccaatgtaggcaggggttacatcaaagaactttgcttcagccccgatggacgaatgatttcttccccacatggctatgggattcgcttgttgggatttgacaaacagtgcagtgaacttgttgactgcttgcccaaagaagccagtcccctgcgggtgatccgttctctgtactctcataatgatgtggtactgacaacaaagttctctccaacacattgtcagattgcctcagggtgccttagtggacgggtttctttgtatcagccaaagttttaggcacaacttacatcaaataaggaactcttctggtgtttgacttaggaattgcttcaatttagatgaagtattttctttttagaagatcttataagtttgggtcaagatcctggttcttatgggtccatgaacacacttgtgaccttagtacttggtcatccagcatcatacaggcatctccaagttagactctatgcagcatcatcttttgcagcattcctctgctcctgctgatctgtgccactgaactccagttcttctggtcattttgcatggtagctcttgtcacgttccttccttcctcactctctatttctctttccctctccctgtccctctctttctttgtgtttgttgattttggtgtcaattttgtggacatttggcaggagttttgactggggtaggagaaacccatgacattagaattgaataaaacctagaagttggatattggcatattggttgttgaaaaataaatttcatcctcacttatgagtatacttggccttttaaagttactgttatgtttatctatattgagcacagataatggcattattcttataattgttaagatagtcttgcaacaaaatgtcttttaagtttcctgttaaaattataaaaagattttcatggtgagagggattttattgtgaaattctagaaaaaaatattaccacctctctttgtaatttactttacttgtatgaatttaacatctctagcatgtatccttacttgatattttgttcctatcaacagcattagaaaggaaaggagacagaatgagctttggttatttctattgcacagaaaaggatttttaaaattagattagtataatatctggccatagagtgataagaacaatatgacttagattttctgtatttcatctgccagattatttgaatcacacaggatgatgtgttaacagtattagggtggaagaggaatcaagagtaaagaggtaggggtttactcatttttcttccctgagccaggtgtgacaagccaactctgtcaccattcgtgaggggagagttgcagtcctcttcaagctgttatcataagtacagtagtcagctacttggatatcaagactaagtgctgatatgaagacttgcctttgtgttttgttatgaaacacgcaagcataaagcaggactcaagcacaaggctgactgttctactttgaataacagcttccttgcagtctcctccacatgggtggtactgtgtttagaagggattaccaaaggctggagcgatttaagctatgcactagccttgccctcttaggttgcattctctttaggccactggttctcaaacattagggtgcactgtaaccattacagagcttgtgaaaagtgcagaaacctgagcctcaccttatgagattctgattcagccagggggaggacaggaatctgtatttttcatagcaacctcaagtaatctttattctgagggtctcgggattgcaggttgaaaaacacaaccttaatcagcagtaaattcttctctactcggccaggcgcagtggctcatgcctgtaatcccagcactttgggaggccgaggtgggtggatcacaaggtcaggagttcgagaccagcctgaccaacatggtgaaacgccatctctactaaaaatacaaaaattagccgggcgtggtggtgctcacctgtaatcccagctacccaggaggctgaggcaagagaatcacttgaacccgggaggcagagggtgcagtaagccgagattgcaccactgcactccagcctaggcgacagagcgagactctgtctcaaaaaaaaaaaaaaaaaaaaaaatgcagctgcaggagtgaggcgctgggaggtacctggacccaaagagcagggcagagggtggcagtggcacataggcaagtgtcttggcatgacatcttctcagagcttca

SEQ ID NO: 415910 - DNA, 3395 bp, Homo sapiens
agcggagctgaacaggggcactgaggtgtcggccggcggggcagtggcccggagcggggggcgggggcgttgatcatgtttccctttgggccccatagccctggaggggacggatcggccggagccggggctgaggagccgacgccccacgaggggcaggcagcagccaccgggccgccctcgccactacatcccggggctgatgcgacccatccccctccacccgcccgaagccctcgccgccccggcgccccatcgctgtccccggccccgcgctccggagagctagggctgcctggagctccggagtcctcaactgcctccgccccgggagagccgtcacctccctcccctccgtgccggcggcccgggccagactgcagggccaagagccggggccgacacggcctcggcgcgggcctgggcggccctggcgctaggctgttcgggtggctgaaagagcgcacctgggccgcgggctgttcgtggacccggcgcgggacaattttcgcaccatgactagcctctacggttccatccaccccgcggactcggtgtacctcagcacccgcacccacggcgccgtcttcaacctcgagtactcgcccgacgggtcagtgctgacagttgcttgtgaacaaactgaagttctgctttttgaccctatatcttcaaagcacataaaaacactttctgaagctcatgaagactgtgtaaataatatcaggtatacagaagatgggtgtccacataagaaattctttcacacacgttttctcatgcgaatgaggttaacaccagattgttccaaaatgttgatttcaacgtcctctggatatctcttaattttgcatgaccttgacttaactaagtctttagaagtaggcagctatcccattttaagagcaagaagaactacttcaagttcaggagtttcaccacgaaatagtcttgaagtcgtaacccctgaagttcttggtgagagtgaccacggaaactgcatcacgtccttacagctgcacccaaaaggctgggccactcttcttcggtgctcaagcaacagtgatgatgaggagtgtacttgtgtctatgaattccaagaaggagctccagtgcgacctgtctcacctcgctgttctctacgactgactcattacattgaagaagccaatgtaggcaggggttacatcaaagaactttgcttcagccccgatggacgaatgatttcttccccacatggctatgggattcgcttgttgggatttgacaaacagtgcagtgaacttgttgactgcttgcccaaagaagccagtcccctgcgggtgatccgttctctgtactctcataatgatgtggtactgacaacaaagttctctccaacacattgtcagattgcctcagggtgccttagtggacgggtttctttgtatcagccaaagttttaggcacaacttacatcaaataaggaactcttctggtgtttgacttaggaattgcttcaatttagatgaagtattttctttttagaagatcttataagtttgggtcaagatcctggttcttatgggtccatgaacacacttgtgaccttagtacttggtcatccagcatcatacaggcatctccaagttagactctatgcagcatcatcttttgcagcattcctctgctcctgctgatctgtgccactgaactccagttcttctggtcattttgcatggtagctcttgtcacgttccttccttcctcactctctatttctctttccctctccctgtccctctctttctttgtgtttgttgattttggtgtcaattttgtggacatttggcaggagttttgactggggtaggagaaacccatgacattagaattgaataaaacctagaagttggatattggcatattggttgttgaaaaataaatttcatcctcacttatgagtatacttggccttttaaagttactgttatgtttatctatattgagcacagataatggcattattcttataattgttaagatagtcttgcaacaaaatgtcttttaagtttcctgttaaaattataaaaagattttcatggtgagagggattttattgtgaaattctagaaaaaaatattaccacctctctttgtaatttactttacttgtatgaatttaacatctctagcatgtatccttacttgatattttgttcctatcaacagcattagaaaggaaaggagacagaatgagctttggttatttctattgcacagaaaaggatttttaaaattagattagtataatatctggccatagagtgataagaacaatatgacttagattttctgtatttcatctgccagattatttgaatcacacaggatgatgtgttaacagtattagggtggaagaggaatcaagagtaaagaggtaggggtttactcatttttcttccctgagccaggtgtgacaagccaactctgtcaccattcgtgaggggagagttgcagtcctcttcaagctgttatcataagtacagtagtcagctacttggatatcaagactaagtgctgatatgaagacttgcctttgtgttttgttatgaaacacgcaagcataaagcaggactcaagcacaaggctgactgttctactttgaataacagcttccttgcagtctcctccacatgggtggtactgtgtttagaagggattaccaaaggctggagcgatttaagctatgcactagccttgccctcttaggttgcattctctttaggccactggttctcaaacattagggtgcactgtaaccattacagagcttgtgaaaagtgcagaaacctgagcctcaccttatgagattctgattcagccagggggaggacaggaatctgtatttttcatagcaacctcaagtaatctttattctgagggtctcgggattgcaggttgaaaaacacaaccttaatcagcagtaaattcttctctactcggccaggcgcagtggctcatgcctgtaatcccagcactttgggaggccgaggtgggtggatcacaaggtcaggagttcgagaccagcctgaccaacatggtgaaacgccatctctactaaaaatacaaaaattagccgggcgtggtggtgctcacctgtaatcccagctacccaggaggctgaggcaagagaatcacttgaacccgggaggcagagggtgcagtaagccgagattgcaccactgcactccagcctaggcgacagagcgagactctgtctcaaaaaaaaaaaaaaaaaaaaaaatgcagctgcaggagtgaggcgctgggaggtacctggacccaaagagcagggcagagggtggcagtggcacataggcaagtgtcttggcatgacatcttctcagagcttca

SEQ ID NO: 415911 - DNA, 3323 bp, Homo sapiens
gggggatccgagtgcgcgccgctgccgctgcgtgggggtgaggggatcagtctggtggaaaggacagaggactaagtccatggactggaaattggaagggagtactcagaaagtagagtcacctgtgctgcaggggcaagaaggcatcctagaggagacaggtgaagatggacttcctgaaggcttccagcttctgcagatcgatgcggaaggcgagtgccaggagggagagatcctggccacaggcagtacggcatggtgctcgaaaaatgtccagagaaaacagagacactgggaaaagatagttgcagcaaagaagagcaaaagaaagcaagaaaaagaacgaagaaaagccaatcgtgcagaaaatccaggcatttgcccccagcacagcaaacgtttcctgagagctctaaccaaagacaaacttttggaagccaaacactcaggaccaagactatgtatcgatttgagtatgacccactacatgtcaaagaaggtagaacatccactaagcctggaattcctgctcgccatgagggaggcccagaagggtacagctttccgaagaatatggtcaactccagcttctgggattccttagtaaactagaattaagtagactggctggacagattcgaaggttgtatggttcaaacaaaaaagctgacaggccattttggatctgcctcactggattcacaacagacagtcccctttatgaagagtgtgtgaggatgaatgatggattttctagttacctgttagacataacagaagaagactgctttagtttatttcccttggaaacccttgtgtacctgactcctgactcagaacacgctcttgaagatgttgatctaaacaaagtttacatcctcggtgggcttgtggatgaaagcattcagaagaaggtgacatttcaaaaggcccgggaatactctgtcaagaccgcacgcttgccaatccaggaatacatggtcagaaaccagaatgggaaaaactatcattcagagatactggccatcaatcaagtgtttgatatcctgtccacttacttagagactcacaactggcctgaagcattgaagaaaggagtttcttcaggaaaaggctatattcttcggaactcagtggaatgatgggcctaagattgcagctgcgtggccaggtgctcacgccgtaatgccaacactttggtagaccgaagtgggcagatcacctgaggtcaggagttcacgaccagcctggccaacatggtgaaacccttctctactgaaaatacaaaaattagccaggtgtggtggcgcatacctgtagtcccagctacttgggaggctgaggcaggagaatcacttgaactcgggaggcgaaggttgcagtgagccgagatttcaccagtgcactccagcctgggtgacagagcaagactccatctcgaaaaaaaaaaaaaaaaaaaagagtggcatgtcacctattgtgtgtggcctgcacgtaatgcactaattcttaatccctcgctgatcccagtgtaaagtggagacaccagtacatactcagcctcacaggactgactggtcaggccactcatccccaggcacgcggccaccggtcactgacaactacagaccgactctgccacccagatcaggtgcccagatgctcagtcgctcacacaggtcagtgctgacagttgcttgtgaacaaactgaagttctgctttttgaccctatatcttcaaagcacataaaaacactttctgaagctcatgaagactgtgtaaataatatcagatttcttgataaccggctgtttgctacctgctctgatgacactacaatagcactatgggatctgagaaaattgaacaccaaagtatgcactttacatggtcacactagctgggtgaagaacatcgaatatgatactaatacaagactcttagtaacatcaggatttgatggaaatgtcattatttgggacactaacaggtatacagaagatgggtgtccacataagaaattctttcacacacgttttctcatgcgaatgaggttaacaccagattgttccaaaatgttgatttcaacgtcctctggatatctcttaattttgcatgaccttgacttaactaagtctttagaagtaggcagctatcccattttaagagcaagaagaactacttcaagttcagatttgaccacttcatcaagttcatctggtcctagagtttctggctcaccttgtcatcatagtgattctaattcttctgagaaacacatgtcacgagcctctcaaagagaaggagtttcaccacgaaatagtcttgaagtcgtaacccctgaagttcttggtgagagtgaccacggaaactgcatcacgtccttacagctgcacccaaaaggctgggccactcttcttcggtgctcaagcaacagtgatgatgaggagtgtacttgtgtctatgaattccaagaaggagctccagtgcgacctgtctcacctcgctgttctctacgactgactcattacattgaagaagccaatgtaggcaggggttacatcaaagaactttgcttcagccccgatggacgaatgatttcttccccacatggctatgggattcgcttgttgggatttgacaaacagtgcagtgaacttgttgactgcttgcccaaagaagccagtcccctgcgggtgatccgttctctgtactctcataatgatgtggtactgacaacaaagttctctccaacacattgtcagattgcctcagggtgccttagtggacgggtttctttgtatcagccaaagttttaggcacaacttacatcaaataaggaactcttctggtgtttgacttaggaattgcttcaatttagatgaagtattttctttttagaagatcttataagtttgggtcaagatcctggttcttatgggtccatgaacacacttgtgaccttagtacttggtcatccagcatcatacaggcatctccaagttagactctatgcagcatcatcttttgcagcattcctctgctcctgctgatctgtgccactgaactccagttcttctggtcattttgcatggtagctcttgtcacgttccttccttcctcactctctatttctctttccctctccctgtccctctctttctttgtgtttgttgattttggtgtcaattttgtggacatttggcaggagttttgactggggtaggagaaacccatgacattagaattgaataaaacctagaagttggatattggcatattggttgttgaaaaataaatttcatcctcacttatgagtata

SEQ ID NO: 415912 - DNA, 4572 bp, Homo sapiens
gggggatccgagtgcgcgccgctgccgctgcgtgggggtgaggggatcagtctggtggaaaggacagaggactaagtccatggactggaaattggaagggagtactcagaaagtagagtcacctgtgctgcaggggcaagaaggcatcctagaggagacaggtgaagatggacttcctgaaggcttccagcttctgcagatcgatgcggaaggcgagtgccaggagggagagatcctggccacaggcagtacggcatggtgctcgaaaaatgtccagagaaaacagagacactgggaaaagatagttgcagcaaagaagagcaaaagaaagcaagaaaaagaacgaagaaaagccaatcgtgcagaaaatccaggcatttgcccccagcacagcaaacgtttcctgagagctctaaccaaagacaaacttttggaagccaaacactcaggaccaagactatgtatcgatttgagtatgacccactacatgtcaaagaaggtagaacatccactaagcctggaattcctgctcgccatgagggaggcccagaagggtacagctttccgaagaatatggtcaactccagcttctgggattccttagtaaactagaattaagtagactggctggacagattcgaaggttgtatggttcaaacaaaaaagctgacaggccattttggatctgcctcactggattcacaacagacagtcccctttatgaagagtgtgtgaggatgaatgatggattttctagttacctgttagacataacagaagaagactgctttagtttatttcccttggaaacccttgtgtacctgactcctgactcagaacacgctcttgaagatgttgatctaaacaaagtttacatcctcggtgggcttgtggatgaaagcattcagaagaaggtgacatttcaaaaggcccgggaatactctgtcaagaccgcacgcttgccaatccaggaatacatggtcagaaaccagaatgggaaaaactatcattcagagatactggccatcaatcaagtgtttgatatcctgtccacttacttagagactcacaactggcctgaagcattgaagaaaggagtttcttcaggaaaaggctatattcttcggaactcagtggaatgatgggcctaagattgcagctgcgtggccaggtgctcacgccgtaatgccaacactttggtagaccgaagtgggcagatcacctgaggtcaggagttcacgaccagcctggccaacatggtgaaacccttctctactgaaaatacaaaaattagccaggtgtggtggcgcatacctgtagtcccagctacttgggaggctgaggcaggagaatcacttgaactcgggaggcgaaggttgcagtgagccgagatttcaccagtgcactccagcctgggtgacagagcaagactccatctcgaaaaaaaaaaaaaaaaaaaagagtggcatgtcacctattgtgtgtggcctgcacgtaatgcactaattcttaatccctcgctgatcccagtgtaaagtggagacaccagtacatactcagcctcacaggactgactggtcaggccactcatccccaggcacgcggccaccggtcactgacaactacagaccgactctgccacccagatcaggtgcccagatgctcagtcgctcacacaggtcagtgctgacagttgcttgtgaacaaactgaagttctgctttttgaccctatatcttcaaagcacataaaaacactttctgaagctcatgaagactgtgtaaataatatcaggtatacagaagatgggtgtccacataagaaattctttcacacacgttttctcatgcgaatgaggttaacaccagattgttccaaaatgttgatttcaacgtcctctggatatctcttaattttgcatgaccttgacttaactaagtctttagaagtaggcagctatcccattttaagagcaagaagaactacttcaagttcagatttgaccacttcatcaagttcatctggtcctagagtttctggctcaccttgtcatcatagtgattctaattcttctgagaaacacatgtcacgagcctctcaaagagaaggagtttcaccacgaaatagtcttgaagtcgtaacccctgaagttcttggtgagagtgaccacggaaactgcatcacgtccttacagctgcacccaaaaggctgggccactcttcttcggtgctcaagcaacagtgatgatgaggagtgtacttgtgtctatgaattccaagaaggagctccagtgcgacctgtctcacctcgctgttctctacgactgactcattacattgaagaagccaatgtaggcaggggttacatcaaagaactttgcttcagccccgatggacgaatgatttcttccccacatggctatgggattcgcttgttgggatttgacaaacagtgcagtgaacttgttgactgcttgcccaaagaagccagtcccctgcgggtgatccgttctctgtactctcataatgatgtggtactgacaacaaagttctctccaacacattgtcagattgcctcagggtgccttagtggacgggtttctttgtatcagccaaagttttaggcacaacttacatcaaataaggaactcttctggtgtttgacttaggaattgcttcaatttagatgaagtattttctttttagaagatcttataagtttgggtcaagatcctggttcttatgggtccatgaacacacttgtgaccttagtacttggtcatccagcatcatacaggcatctccaagttagactctatgcagcatcatcttttgcagcattcctctgctcctgctgatctgtgccactgaactccagttcttctggtcattttgcatggtagctcttgtcacgttccttccttcctcactctctatttctctttccctctccctgtccctctctttctttgtgtttgttgattttggtgtcaattttgtggacatttggcaggagttttgactggggtaggagaaacccatgacattagaattgaataaaacctagaagttggatattggcatattggttgttgaaaaataaatttcatcctcacttatgagtatacttggccttttaaagttactgttatgtttatctatattgagcacagataatggcattattcttataattgttaagatagtcttgcaacaaaatgtcttttaagtttcctgttaaaattataaaaagattttcatggtgagagggattttattgtgaaattctagaaaaaaatattaccacctctctttgtaatttactttacttgtatgaatttaacatctctagcatgtatccttacttgatattttgttcctatcaacagcattagaaaggaaaggagacagaatgagctttggttatttctattgcacagaaaaggatttttaaaattagattagtataatatctggccatagagtgataagaacaatatgacttagattttctgtatttcatctgccagattatttgaatcacacaggatgatgtgttaacagtattagggtggaagaggaatcaagagtaaagaggtaggggtttactcatttttcttccctgagccaggtgtgacaagccaactctgtcaccattcgtgaggggagagttgcagtcctcttcaagctgttatcataagtacagtagtcagctacttggatatcaagactaagtgctgatatgaagacttgcctttgtgttttgttatgaaacacgcaagcataaagcaggactcaagcacaaggctgactgttctactttgaataacagcttccttgcagtctcctccacatgggtggtactgtgtttagaagggattaccaaaggctggagcgatttaagctatgcactagccttgccctcttaggttgcattctctttaggccactggttctcaaacattagggtgcactgtaaccattacagagcttgtgaaaagtgcagaaacctgagcctcaccttatgagattctgattcagccagggggaggacaggaatctgtatttttcatagcaacctcaagtaatctttattctgagggtctcgggattgcaggttgaaaaacacaaccttaatcagcagtaaattcttctctactcggccaggcgcagtggctcatgcctgtaatcccagcactttgggaggccgaggtgggtggatcacaaggtcaggagttcgagaccagcctgaccaacatggtgaaacgccatctctactaaaaatacaaaaattagccgggcgtggtggtgctcacctgtaatcccagctacccaggaggctgaggcaagagaatcacttgaacccgggaggcagagggtgcagtaagccgagattgcaccactgcactccagcctaggcgacagagcgagactctgtctcaaaaaaaaaaaaaaaaaaaaaaatgcagctgcaggagtgaggcgctgggaggtacctggacccaaagagcagggcagagggtggcagtggcacataggcaagtgtcttggcatgacatcttctcagagcttca

SEQ ID NO: 415913 - DNA, 4723 bp, Homo sapiens
  misc_feature (2295)..(2295): n is a, c, g, or t
gggggatccgagtgcgcgccgctgccgctgcgtgggggtgaggggatcagtctggtggaaaggacagaggactaagtccatggactggaaattggaagggagtactcagaaagtagagtcacctgtgctgcaggggcaagaaggcatcctagaggagacaggtgaagatggacttcctgaaggcttccagcttctgcagatcgatgcggaaggcgagtgccaggagggagagatcctggccacaggcagtacggcatggtgctcgaaaaatgtccagagaaaacagagacactgggaaaagatagttgcagcaaagaagagcaaaagaaagcaagaaaaagaacgaagaaaagccaatcgtgcagaaaatccaggcatttgcccccagcacagcaaacgtttcctgagagctctaaccaaagacaaacttttggaagccaaacactcaggaccaagactatgtatcgatttgagtatgacccactacatgtcaaagaaggtagaacatccactaagcctggaattcctgctcgccatgagggaggcccagaagggtacagctttccgaagaatatggtcaactccagcttctgggattccttagtaaactagaattaagtagactggctggacagattcgaaggttgtatggttcaaacaaaaaagctgacaggccattttggatctgcctcactggattcacaacagacagtcccctttatgaagagtgtgtgaggatgaatgatggattttctagttacctgttagacataacagaagaagactgctttagtttatttcccttggaaacccttgtgtacctgactcctgactcagaacacgctcttgaagatgttgatctaaacaaagtttacatcctcggtgggcttgtggatgaaagcattcagaagaaggtgacatttcaaaaggcccgggaatactctgtcaagaccgcacgcttgccaatccaggaatacatggtcagaaaccagaatgggaaaaactatcattcagagatactggccatcaatcaagtgtttgatatcctgtccacttacttagagactcacaactggcctgaagcattgaagaaaggagtttcttcaggaaaaggctatattcttcggaactcagtggaatgatgggcctaagattgcagctgcgtggccaggtgctcacgccgtaatgccaacactttggtagaccgaagtgggcagatcacctgaggtcaggagttcacgaccagcctggccaacatggtgaaacccttctctactgaaaatacaaaaattagccaggtgtggtggcgcatacctgtagtcccagctacttgggaggctgaggcaggagaatcacttgaactcgggaggcgaaggttgcagtgagccgagatttcaccagtgcactccagcctgggtgacagagcaagactccatctcgaaaaaaaaaaaaaaaaaaaagagtggcatgtcacctattgtgtgtggcctgcacgtaatgcactaattcttaatccctcgctgatcccagtgtaaagtggagacaccagtacatactcagcctcacaggactgactggtcaggccactcatccccaggcacgcggccaccggtcactgacaactacagaccgactctgccacccagatcaggtgcccagatgctcagtcgctcacacaggtcagtgctgacagttgcttgtgaacaaactgaagttctgctttttgaccctatatcttcaaagcacataaaaacactttctgaagctcatgaagactgtgtaaataatatcagatttcttgataaccggctgtttgctacctgctctgatgacactacaatagcactatgggatctgagaaaattgaacaccaaagtatgcactttacatggtcacactagctgggtgaagaacatcgaatatgatactaatacaagactcttagtaacatcaggatttgatggaaatgtcattatttgggacactaacaggtatacagaagatgggtgtccacataagaaattctttcacacacgttttctcatgcgaatgaggttaacaccagattgttccaaaatgttgatttcaacgtcctctggatatctcttaattttgcatgaccttgacttaactaagtctttagaagtaggcagctatcccattttaagagcaagaagaactacttcaagttcagatttgaccacttcatcaagttcatctggtcctagagtttctggctcaccttgtcatcatagtgattctaattcttctgagaaacacatgaacacacttgtnaccttagtacttggtcatccagcatcatacatgcatcacgtccttacagctgcacccaaaaggctgggccactcttcttcggtgctcaagcaacagtgatgatgaggagtgtacttgtgtctatgaattccaagaaggagctccagtgcgacctgtctcacctcgctgttctctacgactgactcattacattgaagaagccaatgtaggcaggggttacatcaaagaactttgcttcagccccgatggacgaatgatttcttccccacatggctatgggattcgcttgttgggatttgacaaacagtgcagtgaacttgttgactgcttgcccaaagaagccagtcccctgcgggtgatccgttctctgtactctcataatgatgtggtactgacaacaaagttctctccaacacattgtcagattgcctcagggtgccttagtggacgggtttctttgtatcagccaaagttttaggcacaacttacatcaaataaggaactcttctggtgtttgacttaggaattgcttcaatttagatgaagtattttctttttagaagatcttataagtttgggtcaagatcctggttcttatgggtccatgaacacacttgtgaccttagtacttggtcatccagcatcatacaggcatctccaagttagactctatgcagcatcatcttttgcagcattcctctgctcctgctgatctgtgccactgaactccagttcttctggtcattttgcatggtagctcttgtcacgttccttccttcctcactctctatttctctttccctctccctgtccctctctttctttgtgtttgttgattttggtgtcaattttgtggacatttggcaggagttttgactggggtaggagaaacccatgacattagaattgaataaaacctagaagttggatattggcatattggttgttgaaaaataaatttcatcctcacttatgagtatacttggccttttaaagttactgttatgtttatctatattgagcacagataatggcattattcttataattgttaagatagtcttgcaacaaaatgtcttttaagtttcctgttaaaattataaaaagattttcatggtgagagggattttattgtgaaattctagaaaaaaatattaccacctctctttgtaatttactttacttgtatgaatttaacatctctagcatgtatccttacttgatattttgttcctatcaacagcattagaaaggaaaggagacagaatgagctttggttatttctattgcacagaaaaggatttttaaaattagattagtataatatctggccatagagtgataagaacaatatgacttagattttctgtatttcatctgccagattatttgaatcacacaggatgatgtgttaacagtattagggtggaagaggaatcaagagtaaagaggtaggggtttactcatttttcttccctgagccaggtgtgacaagccaactctgtcaccattcgtgaggggagagttgcagtcctcttcaagctgttatcataagtacagtagtcagctacttggatatcaagactaagtgctgatatgaagacttgcctttgtgttttgttatgaaacacgcaagcataaagcaggactcaagcacaaggctgactgttctactttgaataacagcttccttgcagtctcctccacatgggtggtactgtgtttagaagggattaccaaaggctggagcgatttaagctatgcactagccttgccctcttaggttgcattctctttaggccactggttctcaaacattagggtgcactgtaaccattacagagcttgtgaaaagtgcagaaacctgagcctcaccttatgagattctgattcagccagggggaggacaggaatctgtatttttcatagcaacctcaagtaatctttattctgagggtctcgggattgcaggttgaaaaacacaaccttaatcagcagtaaattcttctctactcggccaggcgcagtggctcatgcctgtaatcccagcactttgggaggccgaggtgggtggatcacaaggtcaggagttcgagaccagcctgaccaacatggtgaaacgccatctctactaaaaatacaaaaattagccgggcgtggtggtgctcacctgtaatcccagctacccaggaggctgaggcaagagaatcacttgaacccgggaggcagagggtgcagtaagccgagattgcaccactgcactccagcctaggcgacagagcgagactctgtctcaaaaaaaaaaaaaaaaaaaaaaatgcagctgcaggagtgaggcgctgggaggtacctggacccaaagagcagggcagagggtggcagtggcacataggcaagtgtcttggcatgacatcttctcagagcttca

SEQ ID NO: 415914 - DNA, 2500 bp, Homo sapiens
gggggatccgagtgcgcgccgctgccgctgcgtgggggtgaggggatcagtctggtggaaaggacagaggactaagtccatggactggaaattggaagggagtactcagaaagtagagtcacctgtgctgcaggggcaagaaggcatcctagaggagacaggtgaagatggacttcctgaaggcttccagcttctgcagatcgatgcggaaggcgagtgccaggagggagagatcctggccacaggcagtacggcatggtgctcgaaaaatgtccagagaaaacagagacactgggaaaagatagttgcagcaaagaagagcaaaagaaagcaagaaaaagaacgaagaaaagccaatcgtgcagaaaatccaggcatttgcccccagcacagcaaacgtttcctgagagctctaaccaaagacaaacttttggaagccaaacactcaggaccaagactatgtatcgatttgagtatgacccactacatgtcaaagaaggtagaacatccactaagcctggaattcctgctcgccatgagggaggcccagaagggtacagctttccgaagaatatggtcaactccagcttctgggattccttagtaaactagaattaagtagactggctggacagattcgaaggttgtatggttcaaacaaaaaagctgacaggccattttggatctgcctcactggattcacaacagacagtcccctttatgaagagtgtgtgaggatgaatgatggattttctagttacctgttagacataacagaagaagactgctttagtttatttcccttggaaacccttgtgtacctgactcctgactcagaacacgctcttgaagatgttgatctaaacaaagtttacatcctcggtgggcttgtggatgaaagcattcagaagaaggtgacatttcaaaaggcccgggaatactctgtcaagaccgcacgcttgccaatccaggaatacatggtcagaaaccagaatgggaaaaactatcattcagagatactggccatcaatcaagtgtttgatatcctgtccacttacttagagactcacaactggcctgaagcattgaagaaaggagtttcttcaggaaaaggctatattcttcggaactcagtggaatgatgggcctaagattgcagctgcgtggccaggtgctcacgccgtaatgccaacactttggtagaccgaagtgggcagatcacctgaggtcaggagttcacgaccagcctggccaacatggtgaaacccttctctactgaaaatacaaaaattagccaggtgtggtggcgcatacctgtagtcccagctacttgggaggctgaggcaggagaatcacttgaactcgggaggcgaaggttgcagtgagccgagatttcaccagtgcactccagcctgggtgacagagcaagactccatctcgaaaaaaaaaaaaaaaaaaaagagtggcatgtcacctattgtgtgtggcctgcacgtaatgcactaattcttaatccctcgctgatcccagtgtaaagtggagacaccagtacatactcagcctcacaggactgactggtcaggccactcatccccaggcacgcggccaccggtcactgacaactacagaccgactctgccacccagatcaggtgcccagatgctcagtcgctcacacaggtcagtgctgacagttgcttgtgaacaaactgaagttctgctttttgaccctatatcttcaaagcacataaaaacactttctgaagctcatgaagactgtgtaaataatatcaggtatacagaagatgggtgtccacataagaaattctttcacacacgttttctcatgcgaatgaggttaacaccagattgttccaaaatgttgatttcaacgtcctctggatatctcttaattttgcatgaccttgacttaactaagtctttagaagtaggcagctatcccattttaagagcaagaagaactacttcaagttcagatttgaccacttcatcaagttcatctggtcctagagtttctggctcaccttgtcatcatagtgattctaattcttctgagaaacacatgtcacgagcctctcaaagagaaggagtttcaccacgaaatagtcttgaagtcgtaacccctgaagttcttggtgagagtgaccacggaaactgcatcacgtccttacagctgcacccaaaaggctgggccactcttcttcggtgctcaagcaacagtgatgatgaggaggtacaggcagcagcactccaccttcaacagggctcattggacaaattgccattgccgtgtgtgcagagcttaggccgatcgctggctgcagtctctgccttcaagggcatactgctagagatcctgcttctcgactctcctgtttctggcctctcttgcttcatatgggatcattaccccttccaaactcttcttattcctctcctgctggggtgagcaaggtgggaggtactttaaggccagcatc

SEQ ID NO: 415915 - DNA, 2587 bp, Homo sapiens
gggggatccgagtgcgcgccgctgccgctgcgtgggggtgaggggatcagtctggtggaaaggacagaggactaagtccatggactggaaattggaagggagtactcagaaagtagagtcacctgtgctgcaggggcaagaaggcatcctagaggagacaggtgaagatggacttcctgaaggcttccagcttctgcagatcgatgcggaaggcgagtgccaggagggagagatcctggccacaggcagtacggcatggtgctcgaaaaatgtccagagaaaacagagacactgggaaaagatagttgcagcaaagaagagcaaaagaaagcaagaaaaagaacgaagaaaagccaatcgtgcagaaaatccaggcatttgcccccagcacagcaaacgtttcctgagagctctaaccaaagacaaacttttggaagccaaacactcaggaccaagactatgtatcgatttgagtatgacccactacatgtcaaagaaggtagaacatccactaagcctggaattcctgctcgccatgagggaggcccagaagggtacagctttccgaagaatatggtcaactccagcttctgggattccttagtaaactagaattaagtagactggctggacagattcgaaggttgtatggttcaaacaaaaaagctgacaggccattttggatctgcctcactggattcacaacagacagtcccctttatgaagagtgtgtgaggatgaatgatggattttctagttacctgttagacataacagaagaagactgctttagtttatttcccttggaaacccttgtgtacctgactcctgactcagaacacgctcttgaagatgttgatctaaacaaagtttacatcctcggtgggcttgtggatgaaagcattcagaagaaggtgacatttcaaaaggcccgggaatactctgtcaagaccgcacgcttgccaatccaggaatacatggtcagaaaccagaatgggaaaaactatcattcagagatactggccatcaatcaagtgtttgatatcctgtccacttacttagagactcacaactggcctgaagcattgaagaaaggagtttcttcaggaaaaggctatattcttcggaactcagtggaatgatgggcctaagattgcagctgcgtggccaggtgctcacgccgtaatgccaacactttggtagaccgaagtgggcagatcacctgaggtcaggagttcacgaccagcctggccaacatggtgaaacccttctctactgaaaatacaaaaattagccaggtgtggtggcgcatacctgtagtcccagctacttgggaggctgaggcaggagaatcacttgaactcgggaggcgaaggttgcagtgagccgagatttcaccagtgcactccagcctgggtgacagagcaagactccatctcgaaaaaaaaaaaaaaaaaaaagagtggcatgtcacctattgtgtgtggcctgcacgtaatgcactaattcttaatccctcgctgatcccagtgtaaagtggagacaccagtacatactcagcctcacaggactgactggtcaggccactcatccccaggcacgcggccaccggtcactgacaactacagaccgactctgccacccagatcaggtgcccagatgctcagtcgctcacacaggtcagtgctgacagttgcttgtgaacaaactgaagttctgctttttgaccctatatcttcaaagcacataaaaacactttctgaagctcatgaagactgtgtaaataatatcagatttcttgataaccggctgtttgctacctgctctgatgacactacaatagcactatgggatctgagaaaattgaacaccaaagtatgcactttacatggtcacactagctgggtgaagaacatcgaatatgatactaatacaagactcttagtaacatcaggatttgatggaaatgtcattatttgggacactaacaggtatacagaagatgggtgtccacataagaaattctttcacacacgttttctcatgcgaatgaggttaacaccagattgttccaaaatgttgatttcaacgtcctctggatatctcttaattttgcatgaccttgacttaactaagtctttagaagtaggcagctatcccattttaagagcaagaagaactacttcaagttcaggagtttcaccacgaaatagtcttgaagtcgtaacccctgaagttcttggtgagagtgaccacggaaactgcatcacgtccttacagctgcacccaaaaggctgggccactcttcttcggtgctcaagcaacagtgatgatgaggaggtacaggcagcagcactccaccttcaacagggctcattggacaaattgccattgccgtgtgtgcagagcttaggccgatcgctggctgcagtctctgccttcaagggcatactgctagagatcctgcttctcgactctcctgtttctggcctctcttgcttcatatgggatcattaccccttccaaactcttcttattcctctcctgctggggtgagcaaggtgggaggtactttaaggccagcatc

SEQ ID NO: 415916 - DNA, 446 bp, Homo sapiens
ctgtggatgagtgaccccccaaaaagtaagatattgtcacataagctcttgagacagttaactcattatctgcagtttcttccattccacaataggctacttatttttaatgctgtattacattgagaatatactcatgtataatttttataagaaaaatatttaactatatatttacagaaggtgacatttcaaaaggcccgggaatactctgtcaagaccgcacgcttgccaatccaggaatacatggtcagaaaccagaatgggaaaaactatcattcagagatactggccatcaatcaaggtacttcttacacggcccccatccagggtgtgtgagttctggtgctgctgctttgcactgtgtttaagtggcctttgagtcagtctcctctgtgactaatgtgtgtggactttattgcatgtacgtcatgacatatattctg

SEQ ID NO: 415917 - DNA, 336 bp, Homo sapiens
gcaggagtgaggcgcttggaggtaccttgacccaaagagcagggcagagggtggcagtggcacataggcaagtgtctttgcatgacatcttctcagagcttcacaataatgtcagggaccacatttaatgctttttaatctcccatagtgcctggctcacaggaagtgctcagatatgttaagtaataaaaagttaatgtggtgggtgcagtggctcacgcctgtaatcccagcactttgggaggctgaggtgagtggattacaaggtcaggagttccagaccagcctggctaatatggtgaaacctcgtctctactaaaaatacaaaaattagct

SEQ ID NO: 415918 - DNA, 1960 bp, Homo sapiens
gcattttattttatgagtcattttaaatgttaaatttagatacattcttcagtgacccataaatgtaacattatttttatattttcatgagttttgtaaccacttgccaaagctgcttcattagcatatgaataattacctttgtaaagaggaagttaaatagatagtgagatcctttctttataaaacttttaaatgttattgtgccaattcactaacatgaagttatttagttgcagggtatgtatgtatttttagtatttatgttgaaagaaagaagacttttaactagactttcaaactaggttaattgaagtatcacagtattcttacattttaatgccatagggttttttcccttaagatatccatgttacataccagttaaggacagataatctaatgcaaggtgtaaaaatgtaaaaattagtaatgtttaaagtactaattagcatatagcccatatgtatttgttggatgtgagtgtagcgtttgtaaacttttgaaagtagggctagaactctgctcatccctgtactctgcatagtacctagcacagacgtttgcacatagttaggtgctcaactgatacttataaaatttaattgaatttgacgcaagaatcatattaagtaaatgtttaaagtagcagcctagcaaatttttgggcatggtgtaagcactggtaaaaccagttaattttagagactatcaagttgttaaaaaatattaggacaccatcctttaattgttatcagcatcaataagacagttcagtttacaattttatacgatattgtggttaatttttattgccattatacatattactattcttatgaattgtttgagaagtaatcataatttatttacaaagataatttcttcaggttgtggtataaattattgagatatgtttgtaatttggatagtttgaatgctttaaaatacacttgatagagtttattaactttgtttattgctaaatgtattatgatatataaacaggcaattgaatttagctttttatctgctatgatctgaatgtttatatcccccacaaattcatatgttgaaatcctaaccctgaaggcgatggtcttcggaggtggggcctttgggaagtgattgggtcaagagggcaggcccttgtaaaagaggccccagagagcttgttcaccaattacaccatgtaaggacacataagaaggcaccatctacgaacaagaaggtgggccttcaccagacaccagagaccagaatctactggcatcttcatcttggactccccatcctccagaactgtaagaaataaatttctgtttttattaatgtaagctacccagtttgatattttattatagcaacccgaatggactacggtatgatcctttgaagaaacttacaaggtagtcagggcaggtaatgttattgtcattcttaacataagaaaaggaggctcagagggttaatgttctctgcatgattatagagctaaaaattggccaaaacagttcagaacgtgctgtcttctcttaatgtagagctatttgaactacttccagctgcagtttttatgttgtgttacctgtgtagagactgttaactgaagaagtacagatcacaagatttactatagaatttgaattttaaaaaatttctgatgttagcctgatttctccccagagacattttcatgtagtgatttaagaccagaggctctggattcagacttcttgagtttgaattctggctccatctggctttagggccttggacaagttacttttctattctttgttttgaaatctgtagaatgggtataagtgagattgaatgaatgcacacattttgtttttggagcagggctggatgtatagtaagctactgttactattattattacaattaccaacatttcctaaaagtgattagaataaagaacagtctttaggggctg

SEQ ID NO: 415919 - DNA, 266 bp, Homo sapiens
ttatttttcttttaatgttttgtaaccttacatgtgattaaagtgttgtccagactttttattttggaccagtctctcgtggaagttgcacaaatagcttggagggttcctgtgtatcttttgccagctctccccagtgatggtgtcttacataaccacagcacagtgatcagagccagaaaataacattggtgttattttttatttttttgacatggagtctcactccagcctaggcgacagagtaagactcctctgtctgaaga

SEQ ID NO: 415920 - DNA, 397 bp, Homo sapiens
  misc_feature (23)..(26): n is a, c, g, or t
ataccgatctacagaactaaaannnntttgaaaaccctttcacatcttgacgaaaaagaaaatgagtgagactcaaaattcaacaagccagaaagcaatggatgaggataacaaagccgcaagccaaacaatgccgaatacacaagacaagaactacgaggatgaattgactcaagtagctctagctctggttgaggatgtcatcaattatgctgttaagattgtggaagaggagcgaaaccctttgaaaaacatcaagtggatgactcacggtgaattcactgtggaaaagggtcttaaacaaattgacgaatatttttcggtaagttaggccgaccactccagcatggtacaccggtgtgaagaacaataaagagactctcagcagatcaaaagt

SEQ ID NO: 415921 - DNA, 1811 bp, Homo sapiens
  misc_feature (23)..(26): n is a, c, g, or t
ataccgatctacagaactaaaannnntttgaaaaccctttcacatcttgacgaaaaagaaaatgagtgagactcaaaattcaacaagccagaaagcaatggatgaggataacaaagccgcaagccaaacaatgccgaatacacaagacaagaactacgaggatgaattgactcaagtagctctagctctggttgaggatgtcatcaattatgctgttaagattgtggaagaggagcgaaaccctttgaaaaacatcaagtggatgactcacggtgaattcactgtggaaaagggtcttaaacaaattgacgaatatttttcggatgcacccattgttgtttcttatgtaggtgaccaccaagcattagttcacagaccaggaatggttcgctttcgagaaaactggcagaagaatcttactgatgccaaatatagtttcatggagtcattccccttcttattcaatcgtgtctgatacttacaggatgtcttaggattgtttttctcatcaggatacattaaaaatacaatacagcacgtcaaaccacagaatatttattgagtaataaacttgtggcacacaatccagctgtatttttttgcattcattcattttccattctgcaacctccatcacattagcagagtaaccagtaagttgttttctattttctaaagtatttttttctatcactatatgtatcacttctgagtcttacaggtatagagctgagtttagagagttgctaaaattcacctattggaccaaactaaggttggtacttggctgtttgttccccatctgagcctaagtctccagctcagacacatctctttatgggcacaactgggaacaacaaaatggcaacagttctacagctcataatataaccagtctgaagggttcccctactcacagaccccttcatttactgggagttaagcctcactgctaaataatatattttgaaactggaaaactgggcatgctgccttccacaatacaccactatactcatgattgcaggagggtggcttggggactaggggcaatgacacgggaaggatacaatcattgcccttacttatctttgatcttcttcccatcctcacactgaataatcacttgttcctaccttccctgtgaacctctcttgcctggctgcaaaattttaagacaccaaagacaaaattacattatgctctgagtgattacttacaagtacatcagaatatttacttacatagaaaagcactggaaaggaggaacacaaaatatgaaagacaattgatatggtactgaaatttttcttttttaactgttagatatttgtgcaataaataaaaaaggagggaaaaccatatcagagcaataggcaaggaggtggcaaactagataagtctccttggagaacaaaaaatatatttaaaatacaatagccctactacaactgatttatggctcaggtgactaaacacaatttgaagcagtaacaacactcataagctgaaaataaaatacttttagcccttttattcttcttgcctctttcccaaagaatatgccaatgaagctgttcttgatgtcacaatattcatatatcgcagaatttctgcatttaaactaccttgcctactgaaaataagataatcatttcatctctaggaaccagtaaccaaaaaaaaaatgtccttagagaatacatttttatttgtttgtttatttagagacggagtctcatttctgtctcccgaggccggagtgcagtgggcttgatctcgggctcactggaacctccacctcccaggtt

SEQ ID NO: 415922 - DNA, 2210 bp, Homo sapiens
atgctattgtgaggagtaaatgacttcagacactgaaggcttaacacagtgactggcatatcatagggatgcccaatacataccagctgtgaggcttatcaccactgttcttcctggcatggccctgtaagctcatcttcggctgaagagaagctagcacttgcaaacattccatctggcaatctgagagaagctactgagagaatcctgagacatccccagccacctaccactgctcctgttccaagcaaagaagatctgctcactccggaaaaagaaaatgagtgagactcaaaattcaacaagccagaaagcaatggatgaggataacaaagccgcaagccaaacaatgccgaatacacaagacaagaactacgaggatgaattgactcaagtagctctagctctggttgaggatgtcatcaattatgctgttaagattgtggaagaggagcgaaaccctttgaaaaacatcaagtggatgactcacggtgaattcactgtggaaaagggtcttaaacaaattgacgaatatttttcgaagtgtgtttctaaaaaatgctgggcacatggcgtagagtttgtagagaggaaagacttaattcacagcttcctctacatctactatgtacactggagtatctcaactgctgacctacccgtagcacgaatctctgctggtacctacttcaccatgaaggtctccaaaaccaaaccaccggatgcacccattgttgtttcttatgtaggtgaccaccaagcattagttcacagaccaggaatggttcgctttcgagaaaactggcagaagaatcttactgatgccaaatatagtttcatggagtcattccccttcttattcaatcgtgtctgatacttacaggatgtcttaggattgtttttctcatcaggatacattaaaaatacaatacagcacgtcaaaccacagaatatttattgagtaataaacttgtggcacacaatccagctgtatttttttgcattcattcattttccattctgcaacctccatcacattagcagagtaaccagtaagttgttttctattttctaaagtatttttttctatcactatatgtatcacttctgagtcttacaggtatagagctgagtttagagagttgctaaaattcacctattggaccaaactaaggttggtacttggctgtttgttccccatctgagcctaagtctccagctcagacacatctctttatgggcacaactgggaacaacaaaatggcaacagttctacagctcataatataaccagtctgaagggttcccctactcacagaccccttcatttactgggagttaagcctcactgctaaataatatattttgaaactggaaaactgggcatgctgccttccacaatacaccactatactcatgattgcaggagggtggcttggggactaggggcaatgacacgggaaggatacaatcattgcccttacttatctttgatcttcttcccatcctcacactgaataatcacttgttcctaccttccctgtgaacctctcttgcctggctgcaaaattttaagacaccaaagacaaaattacattatgctctgagtgattacttacaagtacatcagaatatttacttacatagaaaagcactggaaaggaggaacacaaaatatgaaagacaattgatatggtactgaaatttttcttttttaactgttagatatttgtgcaataaataaaaaaggagggaaaaccatatcagagcaataggcaaggaggtggcaaactagataagtctccttggagaacaaaaaatatatttaaaatacaatagccctactacaactgatttatggctcaggtgactaaacacaatttgaagcagtaacaacactcataagctgaaaataaaatacttttagcccttttattcttcttgcctctttcccaaagaatatgccaatgaagctgttcttgatgtcacaatattcatatatcgcagaatttctgcatttaaactaccttgcctactgaaaataagataatcatttcatctctaggaaccagtaaccaaaaaaaaaatgtccttagagaatacatttttatttgtttgtttatttagagacggagtctcatttctgtctcccgaggccggagtgcagtgggcttgatctcgggctcactggaacctccacctcccaggtt

SEQ ID NO: 415923 - DNA, 1667 bp, Homo sapiens
caaatttttttttttgagacagagtttcactcttattgcccaggctggagttgcagtgagctgagattgcaccactgcacttacacctgggagacagagcaagaagactccatcttgaaaaaaacaaaaagagttggtatgactggtctgggctaacagttgtccttctcttttttaggatgcacccattgttgtttcttatgtaggtgaccaccaagcattagttcacagaccaggaatggttcgctttcgagaaaactggcagaagaatcttactgatgccaaatatagtttcatggagtcattccccttcttattcaatcgtgtctgatacttacaggatgtcttaggattgtttttctcatcaggatacattaaaaatacaatacagcacgtcaaaccacagaatatttattgagtaataaacttgtggcacacaatccagctgtatttttttgcattcattcattttccattctgcaacctccatcacattagcagagtaaccagtaagttgttttctattttctaaagtatttttttctatcactatatgtatcacttctgagtcttacaggtatagagctgagtttagagagttgctaaaattcacctattggaccaaactaaggttggtacttggctgtttgttccccatctgagcctaagtctccagctcagacacatctctttatgggcacaactgggaacaacaaaatggcaacagttctacagctcataatataaccagtctgaagggttcccctactcacagaccccttcatttactgggagttaagcctcactgctaaataatatattttgaaactggaaaactgggcatgctgccttccacaatacaccactatactcatgattgcaggagggtggcttggggactaggggcaatgacacgggaaggatacaatcattgcccttacttatctttgatcttcttcccatcctcacactgaataatcacttgttcctaccttccctgtgaacctctcttgcctggctgcaaaattttaagacaccaaagacaaaattacattatgctctgagtgattacttacaagtacatcagaatatttacttacatagaaaagcactggaaaggaggaacacaaaatatgaaagacaattgatatggtactgaaatttttcttttttaactgttagatatttgtgcaataaataaaaaaggagggaaaaccatatcagagcaataggcaaggaggtggcaaactagataagtctccttggagaacaaaaaatatatttaaaatacaatagccctactacaactgatttatggctcaggtgactaaacacaatttgaagcagtaacaacactcataagctgaaaataaaatacttttagcccttttattcttcttgcctctttcccaaagaatatgccaatgaagctgttcttgatgtcacaatattcatatatcgcagaatttctgcatttaaactaccttgcctactgaaaataagataatcatttcatctctaggaaccagtaaccaaaaaaaaaatgtccttagagaatacatttttatttgtttgtttatttagagacggagtctcatttctgtctcccgaggccggagtgcagtgggcttgatctcgggctcactggaacctccacctcccaggtt

SEQ ID NO: 415924 - DNA, 616 bp, Homo sapiens
atgctattgtgaggagtaaatgacttcagacactgaaggcttaacacagtgactggcatatcatagggatgcccaatacataccagctgtgaggcttatcaccactgttcttcctggcatggccctgtaagctcatcttcggctgaagagaagctagcacttgcaaacattccatctggcaatctgagagaagctactgagagaatcctgagacatccccagccacctaccactgctcctgttccaagcaaagaagatctgctcactccggaaaaagaaaatgagtgagactcaaaattcaacaagccagaaagcaatggatgaggataacaaagccgcaagccaaacaatgccgaatacacaagacaagaactacgaggatgaattgactcaagtagctctagctctggttgaggatgtcatcaattatgctgttaagattgtggaagaggagcgaaaccctttgaaaaacatcaagtggatgactcacggtgaattcactgtggaaaagggtcttaaacaaattgacgaatatttttcggtaagttaggccgaccactccagcatggtacaccggtgtgaagaacaataaagagactctcagcagatcaaaagt

SEQ ID NO: 415925 - DNA, 617 bp, Homo sapiens
gccatcctgagtaaaatttgggtcctgtttctaaaagggaccaatggattttggctgggtcactggtggtctctgccctgtaggagatgtgagtttttagtttaaaaagattattttcaagttgtcaagctctttgccaggggagattccttctggcagcacatcgaaacactggttccctcagcccatgccaatcaagtaccatggaccccttatccctgggggtatattccaagacccccagtggatgcctgaagctggggatagtactgaaccctgtatagcatatactatgcttcttcctatacacacacatctatgataaagttaatttataaattaggcatagccacaattaacaataactaagaatagggtaattataacaaatactataataaaagttatgtgaacatggtctctccctcaaaatatcttattgtactgtactgagggtaagaaatggcagaaatcaaaaccatggataaggagggatgactgagattgcagaatcaaatccctcctggcctcagagcttatgatcacaggttcaaagctgtgtgatgtcaaacagccctgtgggaaaacatctcaccttgtcaactaaagaaaaaaaa

SEQ ID NO: 415926 - DNA, 2508 bp, Homo sapiens
cagcctgaggagctgctgcgagggtccgcttcgtctttcgagagtgactcccgcggtcccaaggctttccagagcgaacctgtgcggctgcaggcaccggcgtgttgagtttccggcgttccgaaggactgagctcttgtcgcggatcccgtccgccgtttccagcccccagtctcagagcggagcccacagagcagggcaccggcatggccaaagccgcggcgatcggcatcgacctgggcaccacctactcctgcgtgggggtgttccaacacggcaaggtggagatcatcgccaacgaccagggcaaccgcaccacccccagctacgtggccttcacggacaccgagcggctcatcggggatgcggccaagaaccaggtggcgctgaacccgcagaacaccgtgtttgacgcgaagcggctgatcggccgcaagttcggcgacccggtggtgcagtcggacatgaagcactggcctttccaggtgatcaacgacggagacaagcccaaggtgcaggtgagctacaagggggagaccaaggcattctaccccgaggagatctcgtccatggtgctgaccaagatgaaggagatcgccgaggcgtacctgggctacccggtgaccaacgcggtgatcaccgtgccggcctacttcaacgactcgcagcgccaggccaccaaggatgcgggtgtgatcgcggggctcaacgtgctgcggatcatcaacgagcccacggccgccgccatcgcctacggcctggacagaacgggcaagggggagcgcaacgtgctcatctttgacctgggcgggggcaccttcgacgtgtccatcctgacgatcgacgacggcatcttcgaggtgaaggccacggccggggacacccacctgggtggggaggactttgacaacaggctggtgaaccacttcgtggaggagttcaagagaaaacacaagaaggacatcagccagaacaagcgagccgtgaggcggctgcgcaccgcctgcgagagggccaagaggaccctgtcgtccagcacccaggccagcctggagatcgactccctgtttgagggcatcgacttctacacgtccatcaccagggcgaggttcgaggagctgtgctccgacctgttccgaagcaccctggagcccgtggagaaggctctgcgcgacgccaagctggacaaggcccagattcacgacctggtcctggtcgggggctccacccgcatccccaaggtgcagaagctgctgcaggacttcttcaacgggcgcgacctgaacaagagcatcaaccccgacgaggctgtggcctacggggcggcggtgcaggcggccatcctgatgggggacaagtccgagaacgtgcaggacctgctgctgctggacgtggctcccctgtcgctggggctggagacggccggaggcgtgatgactgccctgatcaagcgcaactccaccatccccaccaagcagacgcagatcttcaccacctactccgacaaccaacccggggtgctgatccaggtgtacgagggcgagagggccatgacgaaagacaacaatctgttggggcgcttcgagctgagcggcatccctccggcccccaggggcgtgccccagatcgaggtgaccttcgacatcgatgccaacggcatcctgaacgtcacggccacggacaagagcaccggcaaggccaacaagatcaccatcaccaacgacaagggccgcctgagcaaggaggagatcgagcgcatggtgcaggaggcggagaagtacaaagcggaggacgaggtgcagcgcgagagggtgtcagccaagaacgccctggagtcctacgccttcaacatgaagagcgccgtggaggatgaggggctcaagggcaagatcagcgaggcggacaagaagaaggttctggacaagtgtcaagaggtcatctcgtggctggacgccaacaccttggccgagaaggacgagtttgagcacaagaggaaggagctggagcaggtgtgtaaccccatcatcagcggactgtaccagggtgccggtggtcccgggcctgggggcttcggggctcagggtcccaagggagggtctgggtcaggccctaccattgaggaggtggattaggggcctttgttctttagtatgtttgtctttgaggtggactgttgggactcaaggactttgctgctgttttcctatgtcatttctgcttcagctctttgctgcttcacttctttgtaaagttgtaacctgatggtaattagctggcttcattatttttgtagtacaaccgatatgttcattagaattctttgcatttaatgttgatactgtaagggtgtttcgttccctttaaatgaatcaacactgccaccttctgtacgagtttgtttgttttttttttttttttttttttgcttggcgaaaacactacaaaggctgggaatgtatgtttttataatttgtttatttaaatatgaaaaataaaatgttaaacttt

SEQ ID NO: 415927 - DNA, 578 bp, Homo sapiens
ctgagatgacagtcggctaactaccatcaggttacaactttacaaagaagtgaagcagcaaaggaaggagctggagcaggtgtgtaaccccatcatcagcggactgtaccagggtgccggtggtcccgggcctgggggcttcggggctcagggtcccaagggagggtctgggtcaggccctaccattgaggaggtggattaggggcctttgttctttagtatgtttgtctttgaggtggactgttgggactcaaggactttgctgctgttttcctatgtcatttctgcttcagctctttgctgcttcacttctttgtaaagttgtaacctgatggtaattagctggcttcattatttttgtagtacaaccgatatgttcattagaattctttgcatttaatgttgatactgtaagggtgtttcgttccctttaaatgaatcaacactgccaccttctgtacgagtttgtttgttttttttttttttttttttttgcttggcgaaaacactacaaaggctgggaatgtatgtttttataatttgtttatttaaatatgaaaaataaaatgttaaacttt

SEQ ID NO: 415928 - DNA, 473 bp, Homo sapiens
atttttttttcataatgagtttattttccataatttatagcataggtaacagaatcattttgcaaagacacggactagagaagaataaaagaggcaattatgatcattagaggtggcttcggaggaccacgagacagcactatggacaaacaaaatgcactacacaacatactcctcctggggggcagtcaaaacacagaaatgtagatcgctcagtcactgaaacggattgacttggctgttctaacttccacaccgaaaggaagacagggtggtgatggggggagagtgattactcctcaaacagagagtgatttaacaccaccactggctatgtgacagataaactaatttgcccaaatcactaagcttggggtttttccacccacattaatttggttgcttgcacatgacaacagcatcatttattggtgacaggattcaaagacctgggcattgcagctagcaggaga

SEQ ID NO: 415929 - DNA, 2365 bp, Homo sapiens
  misc_feature (13)..(13): n is a, c, g, or t
  misc_feature (16)..(16): n is a, c, g, or t
  misc_feature (24)..(24): n is a, c, g, or t
tcatgctggtacnccncgcagtantcggatatcgtcgaccaggcctgcgcagcatcacgaggctgacgctgtttgaagagtttgagaagcaacgggatttactgctgcggcttgctccgcgcgcggaagagtgactgcaccggcctcccactgtccatgctgaccaacccagccacacccccggcccggggccagtaccaaatcaagatgaaggggaacatgtccttgatctgctggtacaacaaaggacacttccgcttcctgaccaacgcctactccccggtgcagcagggagtcatcatcaaaaggaagagtggggagatcccatgccccttggccgtggaggcgtttgccgctcacctgagctacatctgcagatacgatgacaaatacagcaagtatttcatttctcataaaccaaacaagacctggcagcaggtgttctggttcgccatcagcatcgccatcaacaatgcctacatcctgtacaaaatgtcagacgcctaccacgtgaagaggtacagccgggcgcagtttggagagagactcgtcagagagctgctgggcttggaggatgcctctccgacccactgatgctgggggcgcaggactcggtcaagggaggggcaagaggaggaggagagcctgccgttccaacttgcccatcagagacccggacacggcctggtgtgtggcttgctgcctgggagggatgcacagggcctctggagggacaggatggacctggtcagaggacggttgctgtcctcatttgcattccaagaagagcatgtcctccctcgagaaacagtgccgccggtgtgatgagcacttacacccacgttctcaagggcagattctctcatgacatccgtggagcttgcgaggcagcgtggactggtgactgtgaaggaaggcccccgtggtagaatgagctggagcacgctctaagagagatgcctgcttcctaaagatctacagcaatctgggacgtggttcaagttcaagacttgaaggaagcaaagacgccctgcatggttacaatggctcaggtgtcaggggaggccggagggttttccagcatttgcctcatgccagcacctttgaaccggtctcttagaagaagacacacatcctgggtgtacagtggtgaaatggggagtgggtgcccattctgaaaaacgaggcattcctgctcattccctctgcttagctggtgggcaggggagagagggaaatgccaaaaacttggagtgaaggatgatgctattttttatttttaaatatatcttcaggttattttcttactgttgcttcagatctaatgtaaaaggcagatgtcccctcctctccacccccgacgctgaccccggcctcagtcacggctctttgcatgatcacagttctgtgttctggcctgtggcagggccgggaagggccgctggcttccgaacagacgtggttgctctccacgaggcgcatggggagcccgcgggccctaagctttgtcgcagatgtcatcattggcagaattacttgtcttgaaaaataagtagcattgctgaaacacacaaccgaattctctacgatggccatttgctcattgtctttcctctgtgtgtagtgagtgaccctggcagtgtttgcctgctcagagtggcccctcagaacaacagggctggccttggaaaaaccccaaaacaggactgtggtgacaactctggtcaggtgtgatttgacatgagggccggaggcggttgctgacggcaggactggagaggctgcgtgcccggcactggcagcgaggctcgtgtgtcccccaggcagatctgggcactttcccaacccaggtttatgcgtctccagggaagcctcggtgccagagtggtgggcagatctgaccatccccacagaccagaaacaaggaatttctgggattacccagtcccccttcaacccagttgatgtaaccacctcattttttacaaatacagaatctattctactcaggctatgggcctcgtcctcactcagttattgcgagtgttgctgtccgcatgctccgggccccacgtggctcctgtgctctagatcatggtgactcccccgccctgtggttggaatcgatgccacggattgcaggccaaatttcagatcgtgtttccaaacacccttgctgtgccctttaatgggattgaaagcacttttaccacatggagaaatatatttttaatttgtgatgcttttctacaaggtccactatttctgagtttaatgtgtttccaacacttaaggagactctaatgaaagctgatgaattttcttttctgtccaaacaagtaaaataaaaataaaagtctattta

SEQ ID NO: 415930 - DNA, 2773 bp, Homo sapiens
ggcttcttcagcaaccgcagcctcgccctcgtcatgagccaggcccgcttcgagaagatcctcaagtacttccacgtcgtggccttccgctccagccagaccacgcacgggctctacaaggtccagcccttcctcgactccctgcagaacagcttcgactctgccttcaggccttcccaaacccaggtgctacatgaacccctgatcgatgaggatcctgtattcattgccacgtgcacagagcgggagctgcgaaagaggaaaaagcggaaattcagcctctgggtcagacaatgttcttccactggcttcatcatccagatttatgtccacctgaaggaaggtgggggcccagatggcctggatgcgctgaagaataagccccagctccacagcatggtggccaggagcctgtgccggaacgcggcaggcaagaactacatcattttcacggggcccagcatcaccagcctgacgctgtttgaagagtttgagaagcaagggatttactgctgcggcttgctccgcgcgcggaagagtgactgcaccggcctcccactgtccatgctgaccaacccagccacacccccggcccggggccagtaccaaatcaagatgaaggggaacatgtccttgatctgctggtacaacaaaggacacttccgcttcctgaccaacgcctactccccggtgcagcagggagtcatcatcaaaaggaagagtggggagatcccatgccccttggccgtggaggcgtttgccgctcacctgagctacatctgcagatacgatgacaaatacagcaagtatttcatttctcataaaccaaacaagacctggcagcaggtgttctggttcgccatcagcatcgccatcaacaatgcctacatcctgtacaaaatgtcagacgcctaccacgtgaagaggtacagccgggcgcagtttggagagagactcgtcagagagctgctgggcttggaggatgcctctccgacccactgatgctgggggcgcaggactcggtcaagggaggggcaagaggaggaggagagcctgccgttccaacttgcccatcagagacccggacacggcctggtgtgtggcttgctgcctgggagggatgcacagggcctctggagggacaggatggacctggtcagaggacggttgctgtcctcatttgcattccaagaagagcatgtcctccctcgagaaacagtgccgccggtgtgatgagcacttacacccacgttctcaagggcagattctctcatgacatccgtggagcttgcgaggcagcgtggactggtgactgtgaaggaaggcccccgtggtagaatgagctggagcacgctctaagagagatgcctgcttcctaaagatctacagcaatctgggacgtggttcaagttcaagacttgaaggaagcaaagacgccctgcatggttacaatggctcaggtgtcaggggaggccggagggttttccagcatttgcctcatgccagcacctttgaaccggtctcttagaagaagacacacatcctgggtgtacagtggtgaaatggggagtgggtgcccattctgaaaaacgaggcattcctgctcattccctctgcttagctggtgggcaggggagagagggaaatgccaaaaacttggagtgaaggatgatgctattttttatttttaaatatatcttcaggttattttcttactgttgcttcagatctaatgtaaaaggcagatgtcccctcctctccacccccgacgctgaccccggcctcagtcacggctctttgcatgatcacagttctgtgttctggcctgtggcagggccgggaagggccgctggcttccgaacagacgtggttgctctccacgaggcgcatggggagcccgcgggccctaagctttgtcgcagatgtcatcattggcagaattacttgtcttgaaaaataagtagcattgctgaaacacacaaccgaattctctacgatggccatttgctcattgtctttcctctgtgtgtagtgagtgaccctggcagtgtttgcctgctcagagtggcccctcagaacaacagggctggccttggaaaaaccccaaaacaggactgtggtgacaactctggtcaggtgtgatttgacatgagggccggaggcggttgctgacggcaggactggagaggctgcgtgcccggcactggcagcgaggctcgtgtgtcccccaggcagatctgggcactttcccaacccaggtttatgcgtctccagggaagcctcggtgccagagtggtgggcagatctgaccatccccacagaccagaaacaaggaatttctgggattacccagtcccccttcaacccagttgatgtaaccacctcattttttacaaatacagaatctattctactcaggctatgggcctcgtcctcactcagttattgcgagtgttgctgtccgcatgctccgggccccacgtggctcctgtgctctagatcatggtgactcccccgccctgtggttggaatcgatgccacggattgcaggccaaatttcagatcgtgtttccaaacacccttgctgtgccctttaatgggattgaaagcacttttaccacatggagaaatatatttttaatttgtgatgcttttctacaaggtccactatttctgagtttaatgtgtttccaacacttaaggagactctaatgaaagctgatgaattttcttttctgtccaaacaagtaaaataaaaataaaagtctattta

SEQ ID NO: 415931 - DNA, 2204 bp, Homo sapiens
ccggccgccgtgttgaacaccctccgcgcaccgcgaggcacagtacatgaaggggaacatgtccttgatctgctggtacaacaaaggacacttccgcttcctgaccaacgcctactccccggtgcagcagggagtcatcatcaaaaggaagagtggggagatcccatgccccttggccgtggaggcgtttgccgctcacctgagctacatctgcagatacgatgacaaatacagcaagtatttcatttctcataaaccaaacaagacctggcagcaggtgttctggttcgccatcagcatcgccatcaacaatgcctacatcctgtacaaaatgtcagacgcctaccacgtgaagaggtacagccgggcgcagtttggagagagactcgtcagagagctgctgggcttggaggatgcctctccgacccactgatgctgggggcgcaggactcggtcaagggaggggcaagaggaggaggagagcctgccgttccaacttgcccatcagagacccggacacggcctggtgtgtggcttgctgcctgggagggatgcacagggcctctggagggacaggatggacctggtcagaggacggttgctgtcctcatttgcattccaagaagagcatgtcctccctcgagaaacagtgccgccggtgtgatgagcacttacacccacgttctcaagggcagattctctcatgacatccgtggagcttgcgaggcagcgtggactggtgactgtgaaggaaggcccccgtggtagaatgagctggagcacgctctaagagagatgcctgcttcctaaagatctacagcaatctgggacgtggttcaagttcaagacttgaaggaagcaaagacgccctgcatggttacaatggctcaggtgtcaggggaggccggagggttttccagcatttgcctcatgccagcacctttgaaccggtctcttagaagaagacacacatcctgggtgtacagtggtgaaatggggagtgggtgcccattctgaaaaacgaggcattcctgctcattccctctgcttagctggtgggcaggggagagagggaaatgccaaaaacttggagtgaaggatgatgctattttttatttttaaatatatcttcaggttattttcttactgttgcttcagatctaatgtaaaaggcagatgtcccctcctctccacccccgacgctgaccccggcctcagtcacggctctttgcatgatcacagttctgtgttctggcctgtggcagggccgggaagggccgctggcttccgaacagacgtggttgctctccacgaggcgcatggggagcccgcgggccctaagctttgtcgcagatgtcatcattggcagaattacttgtcttgaaaaataagtagcattgctgaaacacacaaccgaattctctacgatggccatttgctcattgtctttcctctgtgtgtagtgagtgaccctggcagtgtttgcctgctcagagtggcccctcagaacaacagggctggccttggaaaaaccccaaaacaggactgtggtgacaactctggtcaggtgtgatttgacatgagggccggaggcggttgctgacggcaggactggagaggctgcgtgcccggcactggcagcgaggctcgtgtgtcccccaggcagatctgggcactttcccaacccaggtttatgcgtctccagggaagcctcggtgccagagtggtgggcagatctgaccatccccacagaccagaaacaaggaatttctgggattacccagtcccccttcaacccagttgatgtaaccacctcattttttacaaatacagaatctattctactcaggctatgggcctcgtcctcactcagttattgcgagtgttgctgtccgcatgctccgggccccacgtggctcctgtgctctagatcatggtgactcccccgccctgtggttggaatcgatgccacggattgcaggccaaatttcagatcgtgtttccaaacacccttgctgtgccctttaatgggattgaaagcacttttaccacatggagaaatatatttttaatttgtgatgcttttctacaaggtccactatttctgagtttaatgtgtttccaacacttaaggagactctaatgaaagctgatgaattttcttttctgtccaaacaagtaaaataaaaataaaagtctattta

SEQ ID NO: 415932 - DNA, 2013 bp, Homo sapiens
  misc_feature (13)..(13): n is a, c, g, or t
  misc_feature (16)..(16): n is a, c, g, or t
  misc_feature (24)..(24): n is a, c, g, or t
tcatgctggtacnccncgcagtantcggatatcgtcgaccaggcctgcgcagcatcacgaggctgacgctgtttgaagagtttgagaagcaacgggatttactgctgcggcttgctccgcgcgcggaagagtgactgcaccggcctcccactgtccatgctgaccaacccagccacacccccggcccggggccagtaccaaatcaagatgaaggggaacatgtccttgatctgctggtacaacaaaggacacttccgcttcctgaccaacgcctactccccggtgcagcagggagtcatcatcaaaaggaagagtggggagatcccatgccccttggccgtggaggcgtttgccgctcacctgagctacatctgcagatacgatgacaaatacagcaagtatttcatttctcataaaccaaacaagacctggcagcaggtgttctggttcgccatcagcatcgccatcaacaatgcctacatcctgtacaaaatgtcagacgcctaccacgtgaagaggtacagccgggcgcagtttggagagagactcgtcagagagctgctgggcttggaggatgcctctccgacccactgatgctgggggcgcaggactcggtcaagggaggggcaagaggaggaggagagcctgccgttccaacttgcccatcagagacccggacacggcctggtgtgtggcttgctgcctgggagggatgcacagggcctctggagggacaggatggacctggtcagaggacggttgctgtcctcatttgcattccaagaagagcatgtcctccctcgagaaacagtgccgccggtgtgatgagcacttacacccacgttctcaagggcagattctctcatgacatccgtggagcttgcgaggcagcgtggactggtgactgtgaaggaaggcccccgtggtagaatgagctggagcacgctctaagagagatgcctgcttcctaaagatctacagcaatctgggacgtggttcaagttcaagacttgaaggaagcaaagacgccctgcatggttacaatggctcaggtgtcaggggaggccggagggttttccagcatttgcctcatgccagcacctttgaaccggtctcttagaagaagacacacatcctgggtgtacagtggtgaaatggggagtgggtgcccattctgaaaaacgaggcattcctgctcattccctctgcttagctggtgggcaggggagagagggaaatgccaaaaacttggagtgaaggatgatgctattttttatttttaaatatatcttcaggttattttcttactgttgcttcagatctaatgtaaaaggcagatgtcccctcctctccacccccgacgctgaccccggcctcagtcacggctctttgcatgatcacagttctgtgttctggcctgtggcagggccgggaagggccgctggcttccgaacagacgtggttgctctccacgaggcgcatggggagcccgcgggccctaagctttgtcgcagatgtcatcattggcagaattacttgtcttgaaaaataagtagcattgctgaaacacacaaccgaattctctacgatggccatttgctcattgtctttcctctgtgtgtagtgagtgaccctggcagtgtttgcctgctcagagtggcccctcagaacaacagggctggccttggaaaaaccccaaaacaggactgtggtgacaactctggtcaggtgtgatttgacatgagggccggaggcggttgctgacggcaggactggagaggctgcgtgcccggcactggcagcgaggctcgtgtgtcccccaggcagatctgggcactttcccaacccaggtttatgcgtctccagggaagcctcggtgccagagtggtgggcagatctgaccatccccacagaccagaaacaaggaatttctgggattacccagtcccccttcaacccagttgatgtaaccacctcattttttacaaatacagaatctattctactcaggct

SEQ ID NO: 415933 - DNA, 3142 bp, Homo sapiens
  misc_feature (13)..(13): n is a, c, g, or t
  misc_feature (16)..(16): n is a, c, g, or t
  misc_feature (24)..(24): n is a, c, g, or t
tcatgctggtacnccncgcagtantcggatatcgtcgaccaggcctgcgcagcatcacgaggctgacgctgtttgaagagtttgagaagcaacgggatttactgctgcggcttgctccgcgcgcggaagagtgactgcaccggcctcccactgtccatgctgaccaacccagccacacccccggcccggggccagtaccaaatcaagatgaaggggaacatgtccttgatctgctggtacaacaaaggacacttccgcttcctgaccaacgcctactccccggtgcagcagggagtcatcatcaaaaggaagagtggggagatcccatgccccttggccgtggaggcgtttgccgctcacctgagctacatctgcagatacgatgacaaatacagcaagtatttcatttctcataaaccaaacaagacctggcagcaggtgttctggttcgccatcagcatcgccatcaacaatgcctacatcctgtacaaaatgtcagacgcctaccacgtgaagaggtacagccgggcgcagtttggagagagactcgtcagagagctgctgggcttggaggatgcctctccgacccactgatgctgggggcgcaggactcggtcaagggaggggcaagaggaggaggagagcctgccgttccaacttgcccatcagagacccggacacggcctggtgtgtggcttgctgcctgggagggatgcacagggcctctggagggacaggatggacctggtcagaggacggttgctgtcctcatttgcattccaagaagagcatgtcctccctcgagaaacagtgccgccggtgtgatgagcacttacacccacgttctcaagggcagattctctcatgacatccgtggagcttgcgaggcagcgtggactggtgactgtgaaggaaggcccccgtggtagaatgagctggagcacgctctaagagagatgcctgcttcctaaagatctacagcaatctgggacgtggttcaagttcaagacttgaaggaagcaaagacgccctgcatggttacaatggctcaggtgtcaggggaggccggagggttttccagcatttgcctcatgccagcacctttgaaccggtctcttagaagaagacacacatcctgggtgtacagtggtgaaatggggagtgggtgcccattctgaaaaacgaggcattcctgctcattccctctgcttagctggtgggcaggggagagagggaaatgccaaaaacttggagtgaaggatgatgctattttttatttttaaatatatcttcaggttattttcttactgttgcttcagatctaatgtaaaaggcagatgtcccctcctctccacccccgacgctgaccccggcctcagtcacggctctttgcatgatcacagttctgtgttctggcctgtggcagggccgggaagggccgctggcttccgaacagacgtggttgctctccacgaggcgcatggggagcccgcgggccctaagctttgtcgcagatgtcatcattggcagaattacttgtcttgaaaaataagtagcattgctgaaacacacaaccgaattctctacgatggccatttgctcattgtctttcctctgtgtgtagtgagtgaccctggcagtgtttgcctgctcagagtggcccctcagaacaacagggctggccttggaaaaaccccaaaacaggactgtggtgacaactctggtcaggtgtgatttgacatgagggccggaggcggttgctgacggcaggactggagaggctgcgtgcccggcactggcagcgaggctcgtgtgtcccccaggcagatctgggcactttcccaacccaggtttatgcgtctccagggaagcctcggtgccagagtggtgggcagatctgaccatccccacagaccagaaacaaggaatttctgggattacccagtcccccttcaacccagttgatgtaaccacctcattttttacaaatacagaatctattctactcaggctatgggcctcgtcctcactcagttattgcgagtgttgctgtccgcatgctccgggccccacgtggctcctgtgctctagatcatggtgactcccccgccctgtggttggaatcgatgccacggattgcaggccaaatttcagatcgtgtttccaaacacccttgctgtgccctttaatgggattgaaagcacttttaccacatggagaaatatatttttaatttgtgatgcttttctacaaggtccactatttctgagtttaatgtgtttccaacacttaaggagactctaatgaaagctgatgaattttcttttctgtccaaacaagtaaaataaaaataaaagtctatttaaaaaaaaaaaaaaaaaaaaaaaaaaaaaaaaaaaaaaaaaaaaaaaagagagaagaagaacaagaaaaaaaaaagaaaaaaagagaaagagaaaaagaggagagaagaaaaaaaaaagagagaggagagggagagagaaaaaaaacagcacgaagaataagagggagggggaagaggacaggaaatgacgggaagaaaaaatagtcaaggctaaggtagaagtaatcgttattaggcttcaagagattgaaaataactaaaggtacaaagaaataaatatgatactgagtgtaggttaaacatctagtaagagtagtatgtgaggacaagagtacaaaaaaaatatactaagagtaagaatacaggtataggctcatgtctggtctatgattagtgttaatatatatattgtacaatgatcaggaagtttgaactagaagaattagtaaagaagatagaaaactatgaagaaaagcgacagaaaatcaagaaagaaaaggaaggagaagaagaaagaggagaagagaaggaaaagaagaagagacagaaaacgctaaagaggcaagagagggcaagaagagcgtcaaacagaaacaaggaaagagaagcaaaggaagaaagtagaagagaaaagagccaaaggaacaagaaaaggaagcaggaagcagacacgcgacgcaggaaagcgagcaagcgagagccgagaagcgaacagagaagcaggcgagcaaagacgagggagaactaacagacagcaagacgaacaaagggcgagag

SEQ ID NO: 415934 - DNA, 2370 bp, Homo sapiens
  misc_feature (13)..(13): n is a, c, g, or t
  misc_feature (16)..(16): n is a, c, g, or t
  misc_feature (24)..(24): n is a, c, g, or t
tcatgctggtacnccncgcagtantcggatatcgtcgaccaggcctgcgcagcatcacgaggctgacgctgtttgaagagtttgagaagcaacgggatttactgctgcggcttgctccgcgcgcggaagagtgactgcaccggcctcccactgtccatgctgaccaacccagccacacccccggcccggggccagtaccaaatcaagatgaaggggaacatgtccttgatctgctggtacaacaaaggacacttccgcttcctgaccaacgcctactccccggtgcagcagggagtcatcatcaaaaggaagagtggggagatcccatgccccttggccgtggaggcgtttgccgctcacctgagctacatctgcagatacgatgacaaatacagcaagtatttcatttctcataaaccaaacaagacctggcagcaggtgttctggttcgccatcagcatcgccatcaacaatgcctacatcctgtacaaaatgtcagacgcctaccacgtgaagaggtacagccgggcgcagtttggagagagactcgtcagagagctgctgggcttggaggatgcctctccgacccactgatgctgggggcgcaggactcggtcaagggaggggcaagaggaggaggagagcctgccgttccaacttgcccatcagagacccggacacggcctggtgtgtggcttgctgcctgggagggatgcacagggcctctggagggacaggatggacctggtcagaggacggttgctgtcctcatttgcattccaagaagagcatgtcctccctcgagaaacagtgccgccggtgtgatgagcacttacacccacgttctcaagggcagattctctcatgacatccgtggagcttgcgaggcagcgtggactggtgactgtgaaggaaggcccccgtggtagaatgagctggagcacgctctaagagagatgcctgcttcctaaagatctacagcaatctgggacgtggttcaagttcaagacttgaaggaagcaaagacgccctgcatggttacaatggctcaggtgtcaggggaggccggagggttttccagcatttgcctcatgccagcacctttgaaccggtctcttagaagaagacacacatcctgggtgtacagtggtgaaatggggagtgggtgcccattctgaaaaacgaggcattcctgctcattccctctgcttagctggtgggcaggggagagagggaaatgccaaaaacttggagtgaaggatgatgctattttttatttttaaatatatcttcaggttattttcttactgttgcttcagatctaatgtaaaaggcagatgtcccctcctctccacccccgacgctgaccccggcctcagtcacggctctttgcatgatcacagttctgtgttctggcctgtggcagggccgggaagggccgctggcttccgaacagacgtggttgctctccacgaggcgcatggggagcccgcgggccctaagctttgtcgcagatgtcatcattggcagaattacttgtcttgaaaaataagtagcattgctgaaacacacaaccgaattctctacgatggccatttgctcattgtctttcctctgtgtgtagtgagtgaccctggcagtgtttgcctgctcagagtggcccctcagaacaacagggctggccttggaaaaaccccaaaacaggactgtggtgacaactctggtcaggtgtgatttgacatgagggccggaggcggttgctgacggcaggactggagaggctgcgtgcccggcactggcagcgaggctcgtgtgtcccccaggcagatctgggcactttcccaacccaggtttatgcgtctccagggaagcctcggtgccagagtggtgggcagatctgaccatccccacagaccagaaacaaggaatttctgggattacccagtcccccttcaacccagttgatgtaaccacctcattttttacaaatacagaatctattctactcaggctatgggcctcgtcctcactcagttattgcgagtgttgctgtccgcatgctccgggcccttcgctggctcctgcatacagatcacggtcaacagttcggcgcgtgggtggatataataccgcggactgcagttcaagctacaggttgtgttcccatacacccaggtagagcccgtctacggcagttcacgcacccataacacaggtagtcgtgtggttagatcttgtgacagcctgtgacatagaccggcatttattcgtcaagtgtgttcccaacccttcagtacgctacaatcatagagaacagagtttggtaggtgagccgacacctgacagcatttttagagcatgaacacaggt

SEQ ID NO: 415935 - DNA, 1286 bp, Homo sapiens
  misc_feature (13)..(13): n is a, c, g, or t
  misc_feature (16)..(16): n is a, c, g, or t
  misc_feature (24)..(24): n is a, c, g, or t
tcatgctggtacnccncgcagtantcggatatcgtcgaccaggcctgcgcagcatcacgaggctgacgctgtttgaagagtttgagaagcaacgggatttactgctgcggcttgctccgcgcgcggaagagtgactgcaccggcctcccactgtccatgctgaccaacccagccacacccccggcccggggccagtaccaaatcaagatgaaggggaacatgtccttgatctgctggtacaacaaaggacacttccgcttcctgaccaacgcctactccccggtgcagcagggagtcatcatcaaaaggaagagtggggagatcccatgccccttggccgtggaggcgtttgccgctcacctgagctacatctgcagatacgatgacaaatacagcaagtatttcatttctcataaaccaaacaagacctggcagcaggtgttctggttcgccatcagcatcgccatcaacaatgcctacatcctgtacaaaatgtcagacgcctaccacgtgaagaggtacagccgggcgcagtttggagagagactcgtcagagagctgctgggcttggaggatgcctctccgacccactgatgctgggggcgcaggactcggtcaagggaggggcaagaggaggaggagagcctgccgttccaacttgcccatcagagacccggacacggcctggtgtgtggcttgctgcctgggagggatgcacagggcctctggagggacaggatggacctggtcagaggacggttgctgtcctcatttgcattccaagaagagcatgtcctccctcgagaaacagtgccgccggtgtgatgagcacttacacccacgttctcaagggcagattctctcatgacatccgtggagcttgcgaggcagcgtggactggtgactgtgaaggaaggcccccgtggtagaatgagctggagcacgctctaagagagatgcctgcttcctaaagatctacagcaatctgggacgtggttcaagttcaagacttgaaggaagcaaagacgccctgcatggttggaatcgatgccacggattgcaggccaaatttcagatcgtgtttccaaacacccttgctgtgccctttaatgggattgaaagcacttttaccacatggagaaatatatttttaatttgtgatgcttttctacaaggtccactatttctgagtttaatgtgtttccaacacttaaggagactctaatgaaagctgatgaattttcttttctgtccaaacaagtaaaataaaaataaaagtctattta

SEQ ID NO: 415936 - DNA, 1542 bp, Homo sapiens
ggcttcttcagcaaccgcagcctcgccctcgtcatgagccaggcccgcttcgagaagatcctcaagtacttccacgtcgtggccttccgctccagccagaccacgcacgggctctacaaggtccagcccttcctcgactccctgcagaacagcttcgactctgccttcaggccttcccaaacccaggtgctacatgaacccctgatcgatgaggatcctgtattcattgccacgtgcacagagcgggagctgcgaaagaggaaaaagcggaaattcagcctctgggtcagacaatgttcttccactggcttcatcatccagatttatgtccacctgaaggaaggtgggggcccagatggcctggatgcgctgaagaataagccccagctccacagcatggtggccaggagcctgtgccggaacgcggcaggcaagaactacatcattttcacggggcccagcatcaccagcctgacgctgtttgaagagtttgagaagcaagggatttactgctgcggcttgctccgcgcgcggaagagtgactgcaccggcctcccactgtccatgctgaccaacccagccacacccccggcccggggccagtaccaaatcaagatgaaggggaacatgtccttgatctgctggtacaacaaaggacacttccgcttcctgaccaacgcctactccccggtgcagcagggagtcatcatcaaaaggaagagtggggagatcccatgccccttggccgtggaggcgtttgccgctcacctgagctacatctgcagatacgatgacaaatacagcaagtatttcatttctcataaaccaaacaagacctggcagcaggtgttctggttcgccatcagcatcgccatcaacaatgcctacatcctgtacaaaatgtcagacgcctaccacgtgaagaggtacagccgggcgcagtttggagagagactcgtcagagagctgctgggcttggaggatgcctctccgacccactgatgctgggggcgcaggactcggtcaagggaggggcaagaggaggaggagagcctgccgttccaacttgcccatcagagacccggacacggcctggtgtgtggcttgctgcctgggagggatgcacagggcctctggagggacaggatggacctggtcagaggacggttgctgtcctcatttgcattccaagaagagcatgtcctccctcgagaaacagtgccgccggtgtgatgagcacttacacccacgtggctcctgtgctctagatcatggtgactcccccgccctgtggttggaatcgatgccacggattgcaggccaaatttcagatcgtgtttccaaacacccttgctgtgccctttaatgggattgaaagcacttttaccacatggagaaatatatttttaatttgtgatgcttttctacaaggtccactatttctgagtttaatgtgtttccaacacttaaggagactctaatgaaagctgatgaattttcttttctgtccaaacaagtaaaataaaaataaaagtctattta

SEQ ID NO: 415937 - DNA, 466 bp, Homo sapiens
ttgcttttgatctactactttttgagctcccccaaagcaatcatattaagctgtgctgtgtgtgatgccttgagtctctcagctgctgtagccaaccaggtgccgcctgccacttgataattggtccactgtctgcacatggggcttgacagatccagcctcataatacggtagcacttaatttcaatgaaaaaacaaactggcagccagtttagacatgcaagggctggtctctctttggtagcagctgcttgatagagcctgtcaggaggtagatggcattggcatttgggagtgaagtcaccttctggagaagtggctgtgttttctccatatgaggccatgaaatactggcatgtagaaatggtttacagaaactactttatctttatgcatatgatatttgtgatataggaaacatttattttaccttcattggaaaaggaaaataaagtaaaagaaaaaa

SEQ ID NO: 415938 - DNA, 678 bp, Homo sapiens
agatctttcagcaaagagtgcctctgttccagacgaacttggtgcctgtggacattctagaacatcaagctatgcaagtcagcagtcaaaagtatcagggtatagcacgtgtcactcccggtcatctagtttctctgagctctgccacaggagaaatacctcagtgggaagcacatcaacaggagttgaaagtattctagagccatgtgatgaaattgagcagaaaatcgctgagccaaatcttgatacagctgataaagaagatacagcttcagaaaaactcagcagatgcccagtgaaacaagattctgtagaatctcagctgaagccgagttgatgaccccccgggtggatgcagatgacattgtagagaaaatattacaaagtcaagacttcagccctagattcccagtgcggaagaagaaggactaaggctatttgtgggtcctgggggaagtacaacctttggcagtcatcatcttccaaatagggtggggtctggagcttatgaacaagttgtgatcaaacgctagaagtcaagtcggtgaaaacatttccttgtggatttaagatgtgagtagttgatgtatcaaggcattttattcaagcacttaatagaaaatgaacctcaactatcaagaggaaagccaatgctggtttcttctctggaaggaccca

SEQ ID NO: 415939 - DNA, 670 bp, Homo sapiens
agatctttcagcaaagagtgcctctgttccagacgaacttggtgcctgtggacattctagaacatcaagctatgcaagtcagcagtcaaaagtatcagggtatagcacgtgtcactcccggtcatctagtttctctgagctctgccacaggagaaatacctcagtgggaagcacatcaacaggagttgaaagtattctagagccatgtgatgaaattgagcagaaaatcgctgagccaaatcttgatacagctgataaagaagatacagcttcagaaaaactcagcagatgcccagtgaaacaagattctgtagaatctcagctgaagccgagttgatgaccccccgggtggatgcagatgacattgtagagaaaatattacaaagtcaagacttcagccctagattcccagtgcggaaggtgtgtaggtaactgttaagcatagattcctgcaatcccaggtttttgtaatctgtgtagtcagcagtaaagaggctcagaacatcataatactgactgttgcatatttgtatagtaaatttcatgcccataaaaatatcaagataactttatagctcatttattaatgagaatgagtattgagtttagaaaaagaacaaatgttagttaaaagtgatcaattttaaataaaacatttattgtgttttta

SEQ ID NO: 415940 - DNA, 393 bp, Homo sapiens
gtcaaactccgtatttgctggaaattaaccaacatgaaatgcatgattttcccctaagaaattttgtccttttaaaaaaaaaaatttcctgcagagctggttcctacccataacagcagctgtggattatttaggactcatcccttttttcttgtcattcactgttccatgagcactactatttattaggtggagaatcgcctgattttctgaagtttggaagagaggacgcctaatgcaaatttggcctggttatagaacattcactttttggtattctcatcgttgttaacatgaatggttgactgaatgtagagctggctgtgttgttctgcacactgactggaatttgtagagttcaggtagttctaaaataaatggtttcactcagca

SEQ ID NO: 415941 - DNA, 815 bp, Homo sapiens
caattcagctcttcttttggaatgaaagtatagccaaaacaaacaaacaaaaaaatcctcagtatagcttgcaattaagacttagatcacagtatttaagtgttttgagttttgtacatgaggtcagtgctacagccacctagcatgaactaacccagcttccacctccataaagttacctagagttgttgagttggaatatgttctggcatttacctgacctgccaatcattagggagaggcaacaaggtaattcagcctttcctcctatcagcacaaagaaactcaaagctgttttttccctttctgttccaaagcagtcttatcctgacaggagcggtctatactagtgcagatttcaacacttttttttaacgttttaattactatagtgttatgtagagatttgattgagcagctaatgtttctgaactttacttactaattttcagtgtccttaagggttctgtagtgttatcaaagcaaaaagaaaatgctgcataaaaataccaaacttcagcaactgttaatactcagatcatatacctcttaataaatagcatcttatgctaattagccctgctaaactatgtacagaggaaactgttcaagtattggatttgaaagtaagtgacttatgtttaacagaactaatgatgtattgaaacactgtattatgaaaagctaaattatacatcattgtaactatgtagaaagtgtagactaatgtataatcaaaatgctaaggatttttatatggccttgtatgaggggagtttgaatgttaataaacatgttttccactttaagatcca

SEQ ID NO: 415942 - DNA, 1108 bp, Homo sapiens
  misc_feature (777)..(777): n is a, c, g, or t
  misc_feature (807)..(807): n is a, c, g, or t
caattcagctcttcttttggaatgaaagtatagccaaaacaaacaaacaaaaaaatcctcagtatagcttgcaattaagacttagatcacagtatttaagtgttttgagttttgtacatgaggtcagtgctacagccacctagcatgaactaacccagcttccacctccataaagttacctagagttgttgagttggaatatgttctggcatttacctgacctgccaatcattagggagaggcaacaaggtaattcagcctttcctcctatcagcacaaagaaactcaaagctgttttttccctttctgttccaaagcagtcttatcctgacaggagcggtctatactagtgcagatttcaacacttttttttaacgttttaattactatagtgttatgtagttatcaaagcaaaaagaaaatgctgcataaaaataccaaacttcagcaactgttaatactcagatcatatacctcttaataaatagcatcttatgctaattagccctgctaaactatgtacagaggaaactgttcaagtattggatttgaaagtaagtgacttatgtttaacagaactaatgatgtattgaaacactgtattatgaaaagctaaattatacatcattgtaactatgtagaaagtgtagactaatgtataatcaaaatgctaaggatttttatatggccttgtatgaggggagtttgaatgttaataaacatgttttccactttaagatccataagatccaaaaaaaaaaaaaaaaaaaaaaaaanaaaaaaaaaaaaaaaaaaaaaaaaaaaaanaaaaaagaaaaaaaaaaaaaaaaaaaaaaaaaaaaaaaacaaagagagagagggcgggagcggacggacagacgaaaaaacaagaaaaaaaaaacacatagggagaagagcacacaacaaaagaagaacagcaaggcacaagcgagggtgccaaacaagaaaacaaggggaaaaaaaaaaccagaagaagccacagcacaaaaaacaagacacgggcagaaacaccaggcgaccaaacaaccaaacggaacgaagagaaagacaaggagaaaacaagagacacaacgcagcacaaaaaaac

SEQ ID NO: 415943 - DNA, 866 bp, Homo sapiens
caattcagctcttcttttggaatgaaagtatagccaaaacaaacaaacaaaaaaatcctcagtatagcttgcaattaagacttagatcacagtatttaagtgttttgagttttgtacatgaggtcagtgctacagccacctagcatgaactaacccagcttccacctccataaagttacctagagttgttgagttggaatatgttctggcatttacctgacctgccaatcattagggagaggcaacaaggtaattcagcctttcctcctatcagcacaaagaaactcaaagctgttttttccctttctgttccaaagcagtcttatcctgacaggagcggtctatactagtgcagatttcaacacttttttttaacgttttaattactatagtgttatgtagagatttgattgagcagctaatgtttctgaactttacttactaattttcagtgtccttaagggttctgtagtgttatcaaagcaaaaagaaaatgctgcataaaaataccaaacttcagcaactgttaatactcagatcatatacctcttaataaatagcatcttatgctaattagccctgctaaactatgtacagaggaaactgttcaagtattggatttgaaagtaagtgacttatgtttaacagaactaatgatgtattgaaacactgtattatgaaaagctaaattatacatcattgtaactatgtagaaagtgtagactaatgtataatcaaaatgctaaggatttttatatggccttgtatgaggggagtttgaatgttaataaacatgttttccactttaagatccaaggatgcggccggttttttttcttcccacctaaaaatatatctcatcgcac

SEQ ID NO: 415944 - DNA, 777 bp, Homo sapiens
caattcagctcttcttttggaatgaaagtatagccaaaacaaacaaacaaaaaaatcctcagtatagcttgcaattaagacttagatcacagtatttaagtgttttgagttttgtacatgaggtcagtgctacagccacctagcatgaactaacccagcttccacctccataaagttacctagagttgttgagttggaatatgttctggcatttacctgacctgccaatcattagggagaggcaacaaggtaattcagcctttcctcctatcagcacaaagaaactcaaagctgttttttccctttctgttccaaagcagtcttatcctgacaggagcggtctatactagtgcagatttcaacacttttttttaacgttttaattactatagtgttatgtagagatttgattgagcagctaatgtttctgaactttacttactaattttcagtgtccttaagggttctgtagtgttatcaaagcaaaaagaaaatgctgcataaaaataccaaacttcagcaactgttaatactcagatcatatacctcttaataaatagcatcttatgctaattagccctgctaaactatgtacagaggaaactgttcaagtattggatttgaaagtaagtgacttatgtttaacagaactaatgatgtattgaaacactgtattatgaaaagctaaattatacatcattgtaactatgtagaaagtgtagactaatgtataatcaaaatgctaaggacaccggaaataagggggtaccgagctcg

SEQ ID NO: 415945 - DNA, 1464 bp, Homo sapiens
tgaaaatctggatttattttaaaaagatatcttgccatgaaggtatttgttttatagaaatatttacctccagatttctttctctaataagatggtgaatttaaaacactgtgttatttagaaacactgcatttacacttcatttattgtataaagcaaattgcattgaatcttcgccacttgacccaaaggccaaaaattggcatgagaacaatttggactacacatcaccaaacccggggttcacacctgtccactagcagttccagtgccttcccctagccctggatttggcaaagcacagaatgttaagagctaaaagttattgtagaggctactcagtcccacccgggaaactgaggatgaatgagggtaagcggttgcccagagcccgttaacccctccgtggctggggccctgcctagaacccgaatttcctgactaccctgtccaaggtattcatgtcacatcacactgaaacgctaaacctagagataggagaggccctctgggataaatccctgttccaccaaagaccagccagtcatcaaagatgagagaaggcatccctgtactgtaacaaaaagctggctttaggcgtggcttgtagaatcaatctaactactagacaagttacatctcatatatgtgtggcttctttttcttcttttggggggctacaaggaaggtttggagaaattatttccatcatacctttttgttagcctttttccatttctggccagtaagtaatcccgttcctgacaacagtccctttgttttctcaagtggtctgatgaaggactgcaaaccacagctcttgtgttttttgcaccatgggttttaaaatccgtcctctgcctcccacaaggagctactacccaagggaagggagaagattaattggtgacctttcgccgtgttaaaataggatgagtatgttgctggtcaaggcagaaacgctaacttccaactgtggtctgttaagagatctgctgggaaccttcagaagcactgccttccaaggcggggccacagcttggggtgttcagcacttgaggacgggtggagcttgttcaacccaaagatgtgtgcgatgaacggatctacacactggaaatacgtatcaaaactgcaacagcaaaatcatattttgtaaattaaaattgtgtttacttactgtgactactgttcagtctttattcagaaacctttttataggctttcttagcaaaaaaaaaatccatatctatggataatgtctcaatcttctgtatatatgttttattaatatgtaaatatttagattttttaaaattactatgttctttaaaaaagaattcaatgcaagcctggttgtgaaaatggtgtataacattgtgttgtggtatcaattcccaagatgctctttatgtctgatctggaagaatacaataaattactttaattgaacgtgaaaaaaaa

SEQ ID NO: 415946 - DNA, 3943 bp, Homo sapiens
caccggcgcaatctgcgtcccgcctcctccgctccctgcgctcccgccacctcggcaactccgcgcccgcctcccgcctccgtcggaagcctccgccgcagtaaggctcccggtctcgctgctgtctctttaaatggtggggctacgagccgcccctgcagctgctcccgggcggcacgatgaccgacacccggcggcgggtgaaggtgtacacgctcaacgaggaccggcagtgggacgaccggggcaccgggcatgtgtcgtctggctacgtggagcggctgaagggcatgtccctgcttgtcagggctgagagcgacggttctctacttttagagtcgaaaataaatcctaacactgcataccagaaacaacaggacactctgattgtgtggtctgaagcagaaaattatgacttggcccttagctttcaagaaaaagctggatgtgatgaaatttgggagaaaatatgtcaggttcaaggaaaggacccttccgtggacatcactcaggaccttgtggatgaatctgaagaggagcgttttgatgatatgtcatcgccaggcttagaattgccatcttgtgaattaagtcgccttgaagaaattgcagaacttgtggcatcatctttaccttcacctcttcgtcgtgaaaaacttgcactggcactagaaaatgagggttatattaaaaagctcctggagctttttcatgtgtgtgaagatttggaaaatattgaaggactgcaccacttgtatgaaattatcaaaggcatctttctcttgaatcgaactgctctttttgaagttatgttctctgaagaatgtataatggacgtcattggatgtttagaatatgatcctgctttatcacaaccacgaaaacacagggaatttctaacaaaaacagccaagtttaaagaagtgattcccatatcagatcctgagctgaaacaaaaaattcatcagacatacagagttcagtatatacaagatatggttctaccaactccttcggtctttgaagaaaacatgttatcaacacttcactcttttatctttttcaataaggtagagattgttggcatgttgcaggaagatgaaaaatttctgacagatttgtttgcacaactaacagatgaagcaacagatgaggaaaaaagacaggaattggttaactttttaaaagaattttgtgcgttttcccaaacgctacagcctcaaaacagagatgcttttttcaagactttgtcaaacatgggcatattaccagctttagaagtcatccttggcatggatgatacacaggtgcgaagtgctgctactgatatattctcatacttggttgaatataatccatccatggtacgagagtttgtcatgcaggaggcacaacagaatgatgatgatattttgctcatcaacctcattatagaacatatgatttgtgatacagatcctgaacttggaggagcagtccagcttatgggcctgcttcgaactttagttgacccagagaacatgctagccactgccaataaaacagaaaagactgaatttctgggtttcttctacaagcactgtatgcatgttctcactgctcctttactagcaaatacaacagaagacaaacctagtaaagatgattttcagactgcccaactattggcacttgtattggaattgttaacattttgtgtggagcaccatacctaccacataaagaactacattattaataaggatatcctccggagagtgctagttcttatggcctcgaagcatgctttcttggcattataaaccgtgtcagcatggttgcctggctacctgctcatgaaggacttgattaatagcaaattggcaatttaacgagccacttccatgatctccaaagaaaccaaaatacaaacacaatatttaatcttgccaaccgaagacgatgtgactgcatgaagtgcccttcgttttaaaagaaagattattggattaaaagatgagttttacaaccgctacataatgaaaagttttttgtttgaaccagtagtgaaagcatttctcaacaatggatcccgctacaatctgatgaactctgccataatagagatgtttgaatttattagagtggaagatataaaatcattaactgctcatgtaattgaaaattactggaaagcactggaagatgtagattatgtacagacatttaaaggattaaaactgagatttgaacaacaaagagaaaggcaagataatcccaaacttgacagtatgcgttccattttgaggaatcacagatatcgaagagatgccagaacactagaagatgaagaagagatgtggtttaacacagatgaagatgacatggaagatggagaagctgtagtgtctccatctgacaaaactaaaaatgatgatgatattatggatccaataagtaaattcatggaaaggaagaaattaaaagaaagtgaggaaaaggaagtgcttctgaaaacaaacctttctggacggcagagcccaagtttcaagctttccctgtccagtggaacgaagactaacctcaccagccagtcatctacaacaaatctgcctggttctccgggatcacctggatccccaggatctccaggctctcctggatccgtacctaaaaatacatctcagacggcagctattactacaaagggaggcctcgtgggtctggtagattatcctgatgatgatgaagatgatgatgaggatgaagataaggaagatacgttaccattgtcaaagaaagcaaaatttgattcataataatggcaacggcctaggatcagtacctgttgaaaaaaactggttctccacccctcccccatacaaaatccacaacaaagcgcagtggtctcttgtgaatgactgacacagatcagcctcttacacttgacttctgctcatcaagtgccaattcaatggagcaggaggaggggatatcatatatttaggggaaagacttaagcctttgagctctccagcttggaccacacattgcccttttctcagggaaggaaatggaaacaaaaagccaacagggcaggggttttgtaagtggaactctggattgactggtcagttgctacaatcagaatatgctttcttggaccatgtttgagactcagaagaatgggcctttctgccataattcttcactagtcaagaatgccagcagtttctttgtataaagagacctgcctttaaaatcatacattctgaacattttagtcaagctacaacaggtttggaaaacctctgtgggggaggggcgagtataaagttttcctcttttttaactgttccctttgcccttcaaactgcagatatttttttttttaagtggggacttctccctacttgattaaagattgagtggaattctagatgtggtcatttgtgtcataatttttttgttttattttgtttttgattttttttttcctcccctgagtgtatgcttagttgttgagtatatatatttgggaccattaaaactttttttgatgtaatataacctaacgttgtgctggtacctgttttaccatgtgtaatttttgttctacatcacagttcttaatttgtttagagttttatgaaagatggtatagtttttattgacaaaagcaaagtaatcttacaactatgtgcatacaaaagcaatactattttgtgactaaatattttatattaaaatttacatcagcaactgtcttgagaattcagggaaatagaatggaatttaaaacttcaacagttttgttaaatctagaaacatgaaattagtattccaaagagattctgaaatttcttttcttggggaaatgacggtacattaaatcaaaattgaggatggatgatttaaaaacatttgactttttaataataaaaagaaaagtgaagagtaagag

SEQ ID NO: 415947 - DNA, 4384 bp, Homo sapiens
caccggcgcaatctgcgtcccgcctcctccgctccctgcgctcccgccacctcggcaactccgcgcccgcctcccgcctccgtcggaagcctccgccgcagtaaggctcccggtctcgctgctgtctctttaaatggtggggctacgagccgcccctgcagctgctcccgggcggcacgatgaccgacacccggcggcgggtgaaggtgtacacgctcaacgaggaccggcagtgggacgaccggggcaccgggcatgtgtcgtctggctacgtggagcggctgaagggcatgtccctgcttgtcagggctgagagcgacggttctctacttttagagtcgaaaataaatcctaacactgcataccagaaacaacaggacactctgattgtgtggtctgaagcagaaaattatgacttggcccttagctttcaagaaaaagctggatgtgatgaaatttgggagaaaatatgtcaggttcaaggaaaggacccttccgtggacatcactcaggaccttgtggatgaatctgaagaggagcgttttgatgatatgtcatcgccaggcttagaattgccatcttgtgaattaagtcgccttgaagaaattgcagaacttgtggcatcatctttaccttcacctcttcgtcgtgaaaaacttgcactggcactagaaaatgagggttatattaaaaagctcctggagctttttcatgtgtgtgaagatttggaaaatattgaaggactgcaccacttgtatgaaattatcaaaggcatctttctcttgaatcgaactgctctttttgaagttatgttctctgaagaatgtataatggacgtcattggatgtttagaatatgatcctgctttatcacaaccacgaaaacacagggaatttctaacaaaaacagccaagtttaaagaagtgattcccatatcagatcctgagctgaaacaaaaaattcatcagacatacagagttcagtatatacaagatatggttctaccaactccttcggtctttgaagaaaacatgttatcaacacttcactcttttatctttttcaataaggtagagattgttggcatgttgcaggaagatgaaaaatttctgacagatttgtttgcacaactaacagatgaagcaacagatgaggaaaaaagacaggaattggttaactttttaaaagaattttgtgcgttttcccaaacgctacagcctcaaaacagagatgcttttttcaagactttgtcaaacatgggcatattaccagctttagaagtcatccttggcatggatgatacacaggtgcgaagtgctgctactgatatattctcatacttggttgaatataatccatccatggtacgagagtttgtcatgcaggaggcacaacagaatgatgatgatattttgctcatcaacctcattatagaacatatgatttgtgatacagatcctgaacttggaggagcagtccagcttatgggcctgcttcgaactttagttgacccagagaacatgctagccactgccaataaaacagaaaagactgaatttctgggtttcttctacaagcactgtatgcatgttctcactgctcctttactagcaaatacaacagaagacaaacctagtaaagatgattttcagactgcccaactattggcacttgtattggaattgttaacattttgtgtggagcaccatacctaccacataaagaactacattattaataaggatatcctccggagagtgctagttcttatggcctcgaagcatgctttcttggcattataaaccgtgtcagcatggttgcctggctacctgctcatgaaggacttgattaatagcaaattggcaatttaacgagccacttccatgatctccaaagaaaccaaaatacaaacacaatatttaatcttgccaaccgaagacgatgtgactgcatgaagtgcccttcgttttaaaagaaagattattggattaaaagatgagttttacaaccgctacataatgaaaagttttttgtttgaaccagtagtgaaagcatttctcaacaatggatcccgctacaatctgatgaactctgccataatagagatgtttgaatttattagagtggaagatataaaatcattaactgctcatgtaattgaaaattactggaaagcactggaagatgtagattatgtacagacatttaaaggattaaaactgagatttgaacaacaaagagaaaggcaagataatcccaaacttgacagtatgcgttccattttgaggaatcacagatatcgaagagatgccagaacactagaagatgaagaagagatgtggtttaacacagatgaagatgacatggaagatggagaagctgtagtgtctccatctgacaaaactaaaaatgatgatgatattatggatccaataagtaaattcatggaaaggaagaaatgtatgttggaaaaaaatgggcaagagaaaattaaggctttcttactctagatttattcttatttcttgacaaaatgattatttgcttggaaggtgtgatggcatacggtttaaagactctattgctttatgggatgtgactgaatagcagtgttgtgtaggcataaacttaagttttcttaatttgagttgaataaggaatatactatttcaggaagggtagggatactaaatatgattctgaaggtttcaattcttctctggggtaagatccaatgaatggaattgtggttagtattttggtaagcttcttttataaattgaacttcaatgtttctacccagcgtagtaagctagttaaatgtgttttagtgttacctcatttggggaaatttaaaaaagaagtatgggggacgactattgacagtattctcatttttagtaaaagaaagtgaggaaaaggaagtgcttctgaaaacaaacctttctggacggcagagcccaagtttcaagctttccctgtccagtggaacgaagactaacctcaccagccagtcatctacaacaaatctgcctggttctccgggatcacctggatccccaggatctccaggctctcctggatccgtacctaaaaatacatctcagacggcagctattactacaaagggaggcctcgtgggtctggtagattatcctgatgatgatgaagatgatgatgaggatgaagataaggaagatacgttaccattgtcaaagaaagcaaaatttgattcataataatggcaacggcctaggatcagtacctgttgaaaaaaactggttctccacccctcccccatacaaaatccacaacaaagcgcagtggtctcttgtgaatgactgacacagatcagcctcttacacttgacttctgctcatcaagtgccaattcaatggagcaggaggaggggatatcatatatttaggggaaagacttaagcctttgagctctccagcttggaccacacattgcccttttctcagggaaggaaatggaaacaaaaagccaacagggcaggggttttgtaagtggaactctggattgactggtcagttgctacaatcagaatatgctttcttggaccatgtttgagactcagaagaatgggcctttctgccataattcttcactagtcaagaatgccagcagtttctttgtataaagagacctgcctttaaaatcatacattctgaacattttagtcaagctacaacaggtttggaaaacctctgtgggggaggggcgagtataaagttttcctcttttttaactgttccctttgcccttcaaactgcagatatttttttttttaagtggggacttctccctacttgattaaagattgagtggaattctagatgtggtcatttgtgtcataatttttttgttttattttgtttttgattttttttttcctcccctgagtgtatgcttagttgttgagtatatatatttgggaccattaaaactttttttgatgtaatataacctaacgttgtgctggtacctgttttaccatgtgtaatttttgttctacatcacagttcttaatttgtttagagttttatgaaagatggtatagtttttattgacaaaagcaaagtaatcttacaactatgtgcatacaaaagcaatactattttgtgactaaatattttatattaaaatttacatcagcaactgtcttgagaattcagggaaatagaatggaatttaaaacttcaacagttttgttaaatctagaaacatgaaattagtattccaaagagattctgaaatttcttttcttggggaaatgacggtacattaaatcaaaattgaggatggatgatttaaaaacatttgactttttaataataaaaagaaaagtgaagagtaagag

SEQ ID NO: 415948 - DNA, 3787 bp, Homo sapiens
caccggcgcaatctgcgtcccgcctcctccgctccctgcgctcccgccacctcggcaactccgcgcccgcctcccgcctccgtcggaagcctccgccgcagtaaggctcccggtctcgctgctgtctctttaaatggtggggctacgagccgcccctgcagctgctcccgggcggcacgatgaccgacacccggcggcgggtgaaggtgtacacgctcaacgaggaccggcagtgggacgaccggggcaccgggcatgtgtcgtctggctacgtggagcggctgaagggcatgtccctgcttgtcagggctgagagcgacggttctctacttttagagtcgaaaataaatcctaacactgcataccagaaacaacaggacactctgattgtgtggtctgaagcagaaaattatgacttggcccttagctttcaagaaaaagctggatgtgatgaaatttgggagaaaatatgtcaggttcaaggaaaggacccttccgtggacatcactcaggaccttgtggatgaatctgaagaggagcgttttgatgatatgtcatcgccaggcttagaattgccatcttgtgaattaagtcgccttgaagaaattgcagaacttgtggcatcatctttaccttcacctcttcgtcgtgaaaaacttgcactggcactagaaaatgagggttatattaaaaagctcctggagctttttcatgtgtgtgaagatttggaaaatattgaaggactgcaccacttgtatgaaattatcaaaggcatctttctcttgaatcgaactgctctttttgaagttatgttctctgaagaatgtataatggacgtcattggatgtttagaatatgatcctgctttatcacaaccacgaaaacacagggaatttctaacaaaaacagccaagtttaaagaagtgattcccatatcagatcctgagctgaaacaaaaaattcatcagacatacagagttcagtatatacaagatatggttctaccaactccttcggtctttgaagaaaacatgttatcaacacttcactcttttatctttttcaataaggtagagattgttggcatgttgcaggaagatgaaaaatttctgacagatttgtttgcacaactaacagatgaagcaacagatgaggaaaaaagacaggaattggttaactttttaaaagaattttgtgcgttttcccaaacgctacagcctcaaaacagagatgcttttttcaagactttgtcaaacatgggcatattaccagctttagaagtcatccttggcatggatgatacacaggtgcgaagtgctgctactgatatattctcatacttggttgaatataatccatccatggtacgagagtttgtcatgcaggaggcacaacagaatgatgatgatattttgctcatcaacctcattatagaacatatgatttgtgatacagatcctgaacttggaggagcagtccagcttatgggcctgcttcgaactttagttgacccagagaacatgctagccactgccaataaaacagaaaagactgaatttctgggtttcttctacaagcactgtatgcatgttctcactgctcctttactagcaaatacaacagaagacaaacctagtaaagatgattttcagactgcccaactattggcacttgtattggaattgttaacattttgtgtggagcaccatacctaccacataaagaactacattattaataaggatatcctccggagagtgctagttcttatggcctcgaagcatgctttcttggcattatgtgcccttcgttttaaaagaaagattattggattaaaagatgagttttacaaccgctacataatgaaaagttttttgtttgaaccagtagtgaaagcatttctcaacaatggatcccgctacaatctgatgaactctgccataatagagatgtttgaatttattagagtggaagatataaaatcattaactgctcatgtaattgaaaattactggaaagcactggaagatgtagattatgtacagacatttaaaggattaaaactgagatttgaacaacaaagagaaaggcaagataatcccaaacttgacagtatgcgttccattttgaggaatcacagatatcgaagagatgccagaacactagaagatgaagaagagatgtggtttaacacagatgaagatgacatggaagatggagaagctgtagtgtctccatctgacaaaactaaaaatgatgatgatattatggatccaataagtaaattcatggaaaggaagaaattaaaagaaagtgaggaaaaggaagtgcttctgaaaacaaacctttctggacggcagagcccaagtttcaagctttccctgtccagtggaacgaagactaacctcaccagccagtcatctacaacaaatctgcctggttctccgggatcacctggatccccaggatctccaggctctcctggatccgtacctaaaaatacatctcagacggcagctattactacaaagggaggcctcgtgggtctggtagattatcctgatgatgatgaagatgatgatgaggatgaagataaggaagatacgttaccattgtcaaagaaagcaaaatttgattcataataatggcaacggcctaggatcagtacctgttgaaaaaaactggttctccacccctcccccatacaaaatccacaacaaagcgcagtggtctcttgtgaatgactgacacagatcagcctcttacacttgacttctgctcatcaagtgccaattcaatggagcaggaggaggggatatcatatatttaggggaaagacttaagcctttgagctctccagcttggaccacacattgcccttttctcagggaaggaaatggaaacaaaaagccaacagggcaggggttttgtaagtggaactctggattgactggtcagttgctacaatcagaatatgctttcttggaccatgtttgagactcagaagaatgggcctttctgccataattcttcactagtcaagaatgccagcagtttctttgtataaagagacctgcctttaaaatcatacattctgaacattttagtcaagctacaacaggtttggaaaacctctgtgggggaggggcgagtataaagttttcctcttttttaactgttccctttgcccttcaaactgcagatatttttttttttaagtggggacttctccctacttgattaaagattgagtggaattctagatgtggtcatttgtgtcataatttttttgttttattttgtttttgattttttttttcctcccctgagtgtatgcttagttgttgagtatatatatttgggaccattaaaactttttttgatgtaatataacctaacgttgtgctggtacctgttttaccatgtgtaatttttgttctacatcacagttcttaatttgtttagagttttatgaaagatggtatagtttttattgacaaaagcaaagtaatcttacaactatgtgcatacaaaagcaatactattttgtgactaaatattttatattaaaatttacatcagcaactgtcttgagaattcagggaaatagaatggaatttaaaacttcaacagttttgttaaatctagaaacatgaaattagtattccaaagagattctgaaatttcttttcttggggaaatgacggtacattaaatcaaaattgaggatggatgatttaaaaacatttgactttttaataataaaaagaaaagtgaagagtaagag

SEQ ID NO: 415949 - DNA, 3893 bp, Homo sapiens
caccggcgcaatctgcgtcccgcctcctccgctccctgcgctcccgccacctcggcaactccgcgcccgcctcccgcctccgtcggaagcctccgccgcagtaaggctcccggtctcgctgctgtctctttaaatggtggggctacgagccgcccctgcagctgctcccgggcggcacgatgaccgacacccggcggcgggtgaaggtgtacacgctcaacgaggaccggcagtgggacgaccggggcaccgggcatgtgtcgtctggctacgtggagcggctgaagggcatgtccctgcttgtcagggctgagagcgacggttctctacttttagagtcgaaaataaatcctaacactgcataccagaaacaacaggacactctgattgtgtggtctgaagcagaaaattatgacttggcccttagctttcaagaaaaagctggatgtgatgaaatttgggagaaaatatgtcaggttcaaggaaaggacccttccgtggacatcactcaggaccttgtggatgaatctgaagaggagcgttttgatgatatgtcatcgccaggcttagaattgccatcttgtgaattaagtcgccttgaagaaattgcagaacttgtggcatcatctttaccttcacctcttcgtcgtgaaaaacttgcactggcactagaaaatgagggttatattaaaaagctcctggagctttttcatgtgtgtgaagatttggaaaatattgaaggactgcaccacttgtatgaaattatcaaaggcatctttctcttgaatcgaactgctctttttgaagttatgttctctgaagaatgtataatggacgtcattggatgtttagaatatgatcctgctttatcacaaccacgaaaacacagggaatttctaacaaaaacagccaagtttaaagaagtgattcccatatcagatcctgagctgaaacaaaaaattcatcagacatacagagttcagtatatacaagatatggttctaccaactccttcggtctttgaagaaaacatgttatcaacacttcactcttttatctttttcaataaggtagagattgttggcatgttgcaggaagatgaaaaatttctgacagatttgtttgcacaactaacagatgaagcaacagatgaggaaaaaagacaggaattggttaactttttaaaagaattttgtgcgttttcccaaacgctacagcctcaaaacagagatgcttttttcaagactttgtcaaacatgggcatattaccagctttagaagtcatccttggcatggatgatacacaggtgcgaagtgctgctactgatatattctcatacttggttgaatataatccatccatggtacgagagtttgtcatgcaggaggcacaacagaatgatgatgatattttgctcatcaacctcattatagaacatatgatttgtgatacagatcctgaacttggaggagcagtccagcttatgggcctgcttcgaactttagttgacccagagaacatgctagccactgccaataaaacagaaaagactgaatttctgggtttcttctacaagcactgtatgcatgttctcactgctcctttactagcaaatacaacagaagacaaacctagtaaagatgattttcagactgcccaactattggcacttgtattggaattgttaacattttgtgtggagcaccatacctaccacataaagaactacattattaataaggatatcctccggagagtgctagttcttatggcctcgaagcatgctttcttggcattataaaccgtgtcagcatggttgcctggctacctgctcatgaaggacttgattaatagcaaattggcaatttaacgagccacttccatgatctccaaagaaaccaaaatacaaacacaatatttaatcttgccaaccgaagacgatgtgactgcatgaagtgcccttcgttttaaaagaaagattattggattaaaagatgagttttacaaccgctacataatgaaaagttttttgtttgaaccagtagtgaaagcatttctcaacaatggatcccgctacaatctgatgaactctgccataatagagatgtttgaatttattagagtggaagatataaaatcattaactgctcatgtaattgaaaattactggaaagcactggaagatgtagattatgtacagacatttaaaggattaaaactgagatttgaacaacaaagagaaaggcaagataatcccaaacttgacagtatgcgttccattttgaggaatcacagatatcgaagagatgccagaacactagaagatgaagaagagatgtggtttaacacagatgaagatgacatggaagatggagaagctgtagtgtctccatctgacaaaactaaaaatgatgatgatattatggatccaataagtaaattcatggaaaggaagaaattaaaagaaagtgaggaaaaggaagtgcttctgaaaacaaacctttactaacctcaccagccagtcatctacaacaaatctgcctggttctccgggatcacctggatccccaggatctccaggctctcctggatccgtacctaaaaatacatctcagacggcagctattactacaaagggaggcctcgtgggtctggtagattatcctgatgatgatgaagatgatgatgaggatgaagataaggaagatacgttaccattgtcaaagaaagcaaaatttgattcataataatggcaacggcctaggatcagtacctgttgaaaaaaactggttctccacccctcccccatacaaaatccacaacaaagcgcagtggtctcttgtgaatgactgacacagatcagcctcttacacttgacttctgctcatcaagtgccaattcaatggagcaggaggaggggatatcatatatttaggggaaagacttaagcctttgagctctccagcttggaccacacattgcccttttctcagggaaggaaatggaaacaaaaagccaacagggcaggggttttgtaagtggaactctggattgactggtcagttgctacaatcagaatatgctttcttggaccatgtttgagactcagaagaatgggcctttctgccataattcttcactagtcaagaatgccagcagtttctttgtataaagagacctgcctttaaaatcatacattctgaacattttagtcaagctacaacaggtttggaaaacctctgtgggggaggggcgagtataaagttttcctcttttttaactgttccctttgcccttcaaactgcagatatttttttttttaagtggggacttctccctacttgattaaagattgagtggaattctagatgtggtcatttgtgtcataatttttttgttttattttgtttttgattttttttttcctcccctgagtgtatgcttagttgttgagtatatatatttgggaccattaaaactttttttgatgtaatataacctaacgttgtgctggtacctgttttaccatgtgtaatttttgttctacatcacagttcttaatttgtttagagttttatgaaagatggtatagtttttattgacaaaagcaaagtaatcttacaactatgtgcatacaaaagcaatactattttgtgactaaatattttatattaaaatttacatcagcaactgtcttgagaattcagggaaatagaatggaatttaaaacttcaacagttttgttaaatctagaaacatgaaattagtattccaaagagattctgaaatttcttttcttggggaaatgacggtacattaaatcaaaattgaggatggatgatttaaaaacatttgactttttaataataaaaagaaaagtgaagagtaagag

SEQ ID NO: 415950 - DNA, 4419 bp, Homo sapiens
caccggcgcaatctgcgtcccgcctcctccgctccctgcgctcccgccacctcggcaactccgcgcccgcctcccgcctccgtcggaagcctccgccgcagtaaggctcccggtctcgctgctgtctctttaaatggtggggctacgagccgcccctgcagctgctcccgggcggcacgatgaccgacacccggcggcgggtgaaggtgtacacgctcaacgaggaccggcagtgggacgaccggggcaccgggcatgtgtcgtctggctacgtggagcggctgaagggcatgtccctgcttgtcagggctgagagcgacggttctctacttttagagtcgaaaataaatcctaacactgcataccagaaacaacaggacactctgattgtgtggtctgaagcagaaaattatgacttggcccttagctttcaagaaaaagctggatgtgatgaaatttgggagaaaatatgtcaggttcaaggaaaggacccttccgtggacatcactcaggaccttgtggatgaatctgaagaggagcgttttgatgatatgtcatcgccaggcttagaattgccatcttgtgaattaagtcgccttgaagaaattgcagaacttgtggcatcatctttaccttcacctcttcgtcgtgaaaaacttgcactggcactagaaaatgagggttatattaaaaagctcctggagctttttcatgtgtgtgaagatttggaaaatattgaaggactgcaccacttgtatgaaattatcaaaggcatctttctcttgaatcgaactgctctttttgaagttatgttctctgaagaatgtataatggacgtcattggatgtttagaatatgatcctgctttatcacaaccacgaaaacacagggaatttctaacaaaaacagccaagtttaaagaagtgattcccatatcagatcctgagctgaaacaaaaaattcatcagacatacagagttcagtatatacaagatatggttctaccaactccttcggtctttgaagaaaacatgttatcaacacttcactcttttatctttttcaataaggtagagattgttggcatgttgcaggaagatgaaaaatttctgacagatttgtttgcacaactaacagatgaagcaacagatgaggaaaaaagacaggaattggttaactttttaaaagaattttgtgcgttttcccaaacgctacagcctcaaaacagagatgcttttttcaagactttgtcaaacatgggcatattaccagctttagaagtcatccttggcatggatgatacacaggtgcgaagtgctgctactgatatattctcatacttggttgaatataatccatccatggtacgagagtttgtcatgcaggaggcacaacagaatgatgatgatattttgctcatcaacctcattatagaacatatgatttgtgatacagatcctgaacttggaggagcagtccagcttatgggcctgcttcgaactttagttgacccagagaacatgctagccactgccaataaaacagaaaagactgaatttctgggtttcttctacaagcactgtatgcatgttctcactgctcctttactagcaaatacaacagaagacaaacctagtaaagatgattttcagactgcccaactattggcacttgtattggaattgttaacattttgtgtggagcaccatacctaccacataaagaactacattattaataaggatatcctccggagagtgctagttcttatggcctcgaagcatgctttcttggcattataaaccgtgtcagcatggttgcctggctacctgctcatgaaggacttgattaatagcaaattggcaatttaacgagccacttccatgatctccaaagaaaccaaaatacaaacacaatatttaatcttgccaaccgaagacgatgtgactgcatgaagtgcccttcgttttaaaagaaagattattggattaaaagatgagttttacaaccgctacataatgaaaagttttttgtttgaaccagtagtgaaagcatttctcaacaatggatcccgctacaatctgatgaactctgccataatagagatgtttgaatttattagagtggaagatataaaatcattaactgctcatgtaattgaaaattactggaaagcactggaagatgtagattatgtacagacatttaaaggattaaaactgagatttgaacaacaaagagaaaggcaagataatcccaaacttgacagtatgcgttccattttgaggaatcacagatatcgaagagatgccagaacactagaagatgaagaagagatgtggtttaacacagatgaagatgacatggaagatggagaagctgtagtgtctccatctgacaaaactaaaaatgatgatgatattatggatccaataagtaaattcatggaaaggaagaaattaaaagaaagtgaggaaaaggaagtgcttctgaaaacaaacctttctggacggcagagcccaagtttcaagctttccctgtccagtggaacgaagactaacctcaccagccagtcatctacaacaaatctgcctggttctccgggatcacctggatccccaggatctccaggctctcctggatccgtacctaaaaatacatctcagacggcagctattactacaaagggaggcctcgtgggtctggtagattatcctgatgatgatgaagatgatgatgaggatgaagataaggaagatacgttaccattgtcaaagaaagcaaaatttgattcataataatggcaacggcctaggatcagtacctgttgaaaaaaactggttctccacccctcccccatacaaaatccacaacaaagcgcagtggtctcttgtgaatgactgacacagatcagcctcttacacttgacttctgctcatcaagtgccaattcaatggagcaggaggaggggatatcatatatttaggggaaagacttaagcctttgagctctccagcttggaccacacattgcccttttctcagggaaggaaatggaaacaaaaagccaacagggcaggggttttgtaagtggaactctggattgactggtcagttgctacaatcagaatatgctttcttggaccatgtttgagactcagaagaatgggcctttctgccataattcttcactagtcaagaatgccagcagtttctttgtataaagagacctgcctttaaaatcatacattctgaacattttagtcaagctacaacaggtttggaaaacctctgtgggggaggggcgagtataaagttttcctcttttttaactgttccctttgcccttcaaactgcagatatttttttttttaagtggggacttctccctacttgattaaagattgagtggaattctagatgtggtcatttgtgtcataatttttttgttttattttgtttttgattttttttttcctcccctgagtgtatgcttagttgttgagtatatatatttgggaccattaaaactttttttgatgtaatataacctaacgttgtgctggtacctgttttaccatgtgtaatttttgttctacatcacagttcttaatttgtttagagttttatgaaagatggtatagtttttattgacaaaagcaaagtaatcttacaactatgtgcatacaaaagcaatactattttgtgactaaatattttatattaaaatttacatcagcaactgtcttgagaattcagggaaatagaatggaatttaaaacttcaacagttttgttaaatctagaaacatgaaattagtattccaaagagattctgaaatttcttttcttggggaaatgacggtacattaaatcaaaattgaggatggatgatttaaaaacatttgactttttaataataaaaagaaaagtgaagagtaagagaaattgtattagttgtatgtttcttgtttttgtttttaactactccctttggaataccagtttgacttgtaagtggtggtttctaaataaatacctggccagaggaccatcacctgtcaccttattaaaacagtatttttaaataggttctttttgttgtcttagatgtgatcaaattatttcaaggaaaatgaaaataattctacttaccctcactttttaaagtgaagagtttagaacttaagaatatattttcaaatgtgaataaaacttcatatccaggaaaggatgctattttaagtatcatatactttaagagtatctagcaagcgctgtgtgcttctctgtcttgtcttgtttattcctcagtaaattacaatggtggtaccaaaaacaagactatactgcatagttggatagaaaaccagaaagtgtcaacttgctacagtcattaaaagttttattattggctgata

SEQ ID NO: 415951 - DNA, 3826 bp, Homo sapiens
caccggcgcaatctgcgtcccgcctcctccgctccctgcgctcccgccacctcggcaactccgcgcccgcctcccgcctccgtcggaagcctccgccgcagtaaggctcccggtctcgctgctgtctctttaaatggtggggctacgagccgcccctgcagctgctcccgggcggcacgatgaccgacacccggcggcgggtgaaggtgtacacgctcaacgaggaccggcagtgggacgaccggggcaccgggcatgtgtcgtctggctacgtggagcggctgaagggcatgtccctgcttgtcagggctgagagcgacggttctctacttttagagtcgaaaataaatcctaacactgcataccagaaacaacaggacactctgattgtgtggtctgaagcagaaaattatgacttggcccttagctttcaagaaaaagctggatgtgatgaaatttgggagaaaatatgtcaggttcaaggaaaggacccttccgtggacatcactcaggaccttgtggatgaatctgaagaggagcgttttgatgatatgtcatcgccaggcttagaattgccatcttgtgaattaagtcgccttgaagaaattgcagaacttgtggcatcatctttaccttcacctcttcgtcgtgaaaaacttgcactggcactagaaaatgagggttatattaaaaagctcctggagctttttcatgtgtgtgaagatttggaaaatattgaaggactgcaccacttgtatgaaattatcaaaggcatctttctcttgaatcgaactgctctttttgaagttatgttctctgaagaatgtataatggacgtcattggatgtttagaatatgatcctgctttatcacaaccacgaaaacacagggaatttctaacaaaaacagccaagtttaaagaagtgattcccatatcagatcctgagctgaaacaaaaaattcatcagacatacagagttcagtatatacaagatatggttctaccaactccttcggtctttgaagaaaacatgttatcaacacttcactcttttatctttttcaataaggtagagattgttggcatgttgcaggaagatgaaaaatttctgacagatttgtttgcacaactaacagatgaagcaacagatgaggaaaaaagacaggaattggttaactttttaaaagaattttgtgcgttttcccaaacgctacagcctcaaaacagagatgcttttttcaagactttgtcaaacatgggcatattaccagctttagaagtcatccttggcatggatgatacacaggtgcgaagtgctgctactgatatattctcatacttggttgaatataatccatccatggtacgagagtttgtcatgcaggaggcacaacagaatgatgatgtaagtaagaagttaacagagcaaaaaataaccagcaaggatattttgctcatcaacctcattatagaacatatgatttgtgatacagatcctgaacttggaggagcagtccagcttatgggcctgcttcgaactttagttgacccagagaacatgctagccactgccaataaaacagaaaagactgaatttctgggtttcttctacaagcactgtatgcatgttctcactgctcctttactagcaaatacaacagaagacaaacctagtaaagatgattttcagactgcccaactattggcacttgtattggaattgttaacattttgtgtggagcaccatacctaccacataaagaactacattattaataaggatatcctccggagagtgctagttcttatggcctcgaagcatgctttcttggcattatgtgcccttcgttttaaaagaaagattattggattaaaagatgagttttacaaccgctacataatgaaaagttttttgtttgaaccagtagtgaaagcatttctcaacaatggatcccgctacaatctgatgaactctgccataatagagatgtttgaatttattagagtggaagatataaaatcattaactgctcatgtaattgaaaattactggaaagcactggaagatgtagattatgtacagacatttaaaggattaaaactgagatttgaacaacaaagagaaaggcaagataatcccaaacttgacagtatgcgttccattttgaggaatcacagatatcgaagagatgccagaacactagaagatgaagaagagatgtggtttaacacagatgaagatgacatggaagatggagaagctgtagtgtctccatctgacaaaactaaaaatgatgatgatattatggatccaataagtaaattcatggaaaggaagaaattaaaagaaagtgaggaaaaggaagtgcttctgaaaacaaacctttctggacggcagagcccaagtttcaagctttccctgtccagtggaacgaagactaacctcaccagccagtcatctacaacaaatctgcctggttctccgggatcacctggatccccaggatctccaggctctcctggatccgtacctaaaaatacatctcagacggcagctattactacaaagggaggcctcgtgggtctggtagattatcctgatgatgatgaagatgatgatgaggatgaagataaggaagatacgttaccattgtcaaagaaagcaaaatttgattcataataatggcaacggcctaggatcagtacctgttgaaaaaaactggttctccacccctcccccatacaaaatccacaacaaagcgcagtggtctcttgtgaatgactgacacagatcagcctcttacacttgacttctgctcatcaagtgccaattcaatggagcaggaggaggggatatcatatatttaggggaaagacttaagcctttgagctctccagcttggaccacacattgcccttttctcagggaaggaaatggaaacaaaaagccaacagggcaggggttttgtaagtggaactctggattgactggtcagttgctacaatcagaatatgctttcttggaccatgtttgagactcagaagaatgggcctttctgccataattcttcactagtcaagaatgccagcagtttctttgtataaagagacctgcctttaaaatcatacattctgaacattttagtcaagctacaacaggtttggaaaacctctgtgggggaggggcgagtataaagttttcctcttttttaactgttccctttgcccttcaaactgcagatatttttttttttaagtggggacttctccctacttgattaaagattgagtggaattctagatgtggtcatttgtgtcataatttttttgttttattttgtttttgattttttttttcctcccctgagtgtatgcttagttgttgagtatatatatttgggaccattaaaactttttttgatgtaatataacctaacgttgtgctggtacctgttttaccatgtgtaatttttgttctacatcacagttcttaatttgtttagagttttatgaaagatggtatagtttttattgacaaaagcaaagtaatcttacaactatgtgcatacaaaagcaatactattttgtgactaaatattttatattaaaatttacatcagcaactgtcttgagaattcagggaaatagaatggaatttaaaacttcaacagttttgttaaatctagaaacatgaaattagtattccaaagagattctgaaatttcttttcttggggaaatgacggtacattaaatcaaaattgaggatggatgatttaaaaacatttgactttttaataataaaaagaaaagtgaagagtaagag

SEQ ID NO: 415952 - DNA, 3763 bp, Homo sapiens
caccggcgcaatctgcgtcccgcctcctccgctccctgcgctcccgccacctcggcaactccgcgcccgcctcccgcctccgtcggaagcctccgccgcagtaaggctcccggtctcgctgctgtctctttaaatggtggggctacgagccgcccctgcagctgctcccgggcggcacgatgaccgacacccggcggcgggtgaaggtgtacacgctcaacgaggaccggcagtgggacgaccggggcaccgggcatgtgtcgtctggctacgtggagcggctgaagggcatgtccctgcttgtcagggctgagagcgacggttctctacttttagagtcgaaaataaatcctaacactgcataccagaaacaacaggacactctgattgtgtggtctgaagcagaaaattatgacttggcccttagctttcaagaaaaagctggatgtgatgaaatttgggagaaaatatgtcaggttcaaggaaaggacccttccgtggacatcactcaggaccttgtggatgaatctgaagaggagcgttttgatgatatgtcatcgccaggcttagaattgccatcttgtgaattaagtcgccttgaagaaattgcagaacttgtggcatcatctttaccttcacctcttcgtcgtgaaaaacttgcactggcactagaaaatgagggttatattaaaaagctcctggagctttttcatgtgtgtgaagatttggaaaatattgaaggactgcaccacttgtatgaaattatcaaaggcatctttctcttgaatcgaactgctctttttgaagttatgttctctgaagaatgtataatggacgtcattggatgtttagaatatgatcctgctttatcacaaccacgaaaacacagggaatttctaacaaaaacagccaagtttaaagaagtgattcccatatcagatcctgagctgaaacaaaaaattcatcagacatacagagttcagtatatacaagatatggttctaccaactccttcggtctttgaagaaaacatgttatcaacacttcactcttttatctttttcaataaggtagagattgttggcatgttgcaggaagatgaaaaatttctgacagatttgtttgcacaactaacagatgaagcaacagatgaggaaaaaagacaggaattgtaactttttgaattttgtgcgttttccccgctacagcctctagaagtcatccttggcatggatgatacacaggtgcgaagtgctgctactgatatattctcatacttggttgaatataatccatccatggtacgagagtttgtcatgcaggaggcacaacagaatgatgatgtaagtaagaagttaacagagcaaaaaataaccagcaaggatattttgctcatcaacctcattatagaacatatgatttgtgatacagatcctgaacttggaggagcagtccagcttatgggcctgcttcgaactttagttgacccagagaacatgctagccactgccaataaaacagaaaagactgaatttctgggtttcttctacaagcactgtatgcatgttctcactgctcctttactagcaaatacaacagaagacaaacctagtaaagatgattttcagactgcccaactattggcacttgtattggaattgttaacattttgtgtggagcaccatacctaccacataaagaactacattattaataaggatatcctccggagagtgctagttcttatggcctcgaagcatgctttcttggcattatgtgcccttcgttttaaaagaaagattattggattaaaagatgagttttacaaccgctacataatgaaaagttttttgtttgaaccagtagtgaaagcatttctcaacaatggatcccgctacaatctgatgaactctgccataatagagatgtttgaatttattagagtggaagatataaaatcattaactgctcatgtaattgaaaattactggaaagcactggaagatgtagattatgtacagacatttaaaggattaaaactgagatttgaacaacaaagagaaaggcaagataatcccaaacttgacagtatgcgttccattttgaggaatcacagatatcgaagagatgccagaacactagaagatgaagaagagatgtggtttaacacagatgaagatgacatggaagatggagaagctgtagtgtctccatctgacaaaactaaaaatgatgatgatattatggatccaataagtaaattcatggaaaggaagaaattaaaagaaagtgaggaaaaggaagtgcttctgaaaacaaacctttctggacggcagagcccaagtttcaagctttccctgtccagtggaacgaagactaacctcaccagccagtcatctacaacaaatctgcctggttctccgggatcacctggatccccaggatctccaggctctcctggatccgtacctaaaaatacatctcagacggcagctattactacaaagggaggcctcgtgggtctggtagattatcctgatgatgatgaagatgatgatgaggatgaagataaggaagatacgttaccattgtcaaagaaagcaaaatttgattcataataatggcaacggcctaggatcagtacctgttgaaaaaaactggttctccacccctcccccatacaaaatccacaacaaagcgcagtggtctcttgtgaatgactgacacagatcagcctcttacacttgacttctgctcatcaagtgccaattcaatggagcaggaggaggggatatcatatatttaggggaaagacttaagcctttgagctctccagcttggaccacacattgcccttttctcagggaaggaaatggaaacaaaaagccaacagggcaggggttttgtaagtggaactctggattgactggtcagttgctacaatcagaatatgctttcttggaccatgtttgagactcagaagaatgggcctttctgccataattcttcactagtcaagaatgccagcagtttctttgtataaagagacctgcctttaaaatcatacattctgaacattttagtcaagctacaacaggtttggaaaacctctgtgggggaggggcgagtataaagttttcctcttttttaactgttccctttgcccttcaaactgcagatatttttttttttaagtggggacttctccctacttgattaaagattgagtggaattctagatgtggtcatttgtgtcataatttttttgttttattttgtttttgattttttttttcctcccctgagtgtatgcttagttgttgagtatatatatttgggaccattaaaactttttttgatgtaatataacctaacgttgtgctggtacctgttttaccatgtgtaatttttgttctacatcacagttcttaatttgtttagagttttatgaaagatggtatagtttttattgacaaaagcaaagtaatcttacaactatgtgcatacaaaagcaatactattttgtgactaaatattttatattaaaatttacatcagcaactgtcttgagaattcagggaaatagaatggaatttaaaacttcaacagttttgttaaatctagaaacatgaaattagtattccaaagagattctgaaatttcttttcttggggaaatgacggtacattaaatcaaaattgaggatggatgatttaaaaacatttgactttttaataataaaaagaaaagtgaagagtaagag

SEQ ID NO: 415953 - DNA, 3923 bp, Homo sapiens
caccggcgcaatctgcgtcccgcctcctccgctccctgcgctcccgccacctcggcaactccgcgcccgcctcccgcctccgtcggaagcctccgccgcagtaaggctcccggtctcgctgctgtctctttaaatggtggggctacgagccgcccctgcagctgctcccgggcggcacgatgaccgacacccggcggcgggtgaaggtgtacacgctcaacgaggaccggcagtgggacgaccggggcaccgggcatgtgtcgtctggctacgtggagcggctgaagggcatgtccctgcttgtcagggctgagagcgacggttctctacttttagagtcgaaaataaatcctaacactgcataccagaaacaacaggacactctgattgtgtggtctgaagcagaaaattatgacttggcccttagctttcaagaaaaagctggatgtgatgaaatttgggagaaaatatgtcaggttcaaggaaaggacccttccgtggacatcactcaggaccttgtggatgaatctgaagaggagcgttttgatgatatgtcatcgccaggcttagaattgccatcttgtgaattaagtcgccttgaagaaattgcagaacttgtggcatcatctttaccttcacctcttcgtcgtgaaaaacttgcactggcactagaaaatgagggttatattaaaaagctcctggagctttttcatgtgtgtgaagatttggaaaatattgaaggactgcaccacttgtatgaaattatcaaaggcatctttctcttgaatcgaactgctctttttgaagttatgttctctgaagaatgtataatggacgtcattggatgtttagaatatgatcctgctttatcacaaccacgaaaacacagggaatttctaacaaaaacagccaagtttaaagaagtgattcccatatcagatcctgagctgaaacaaaaaattcatcagacatacagagttcagtatatacaagatatggttctaccaactccttcggtctttgaagaaaacatgttatcaacacttcactcttttatctttttcaataaggtagagattgttggcatgttgcaggaagatgaaaaatttctgacagatttgtttgcacaactaacagatgaagcaacagatgaggaaaaaagacaggaattggttaactttttaaaagaattttgtgcgttttcccaaacgctacagcctcaaaacagagatgcttttttcaagactttgtcaaacatgggcatattaccagctttagaagtcatccttggcatggatgatacacaggtgcgaagtgctgctactgatatattctcatacttggttgaatataatccatccatggtacgagagtttgtcatgcaggaggcacaacagaatgatgatgtaagtaagaagttaacagagcaaaaaataaccagcaaggatattttgctcatcaacctcattatagaacatatgatttgtgatacagatcctgaacttggaggagcagtccagcttatgggcctgcttcgaactttagttgacccagagaacatgctagccactgccaattgctcctttactagcaaatacaacagaagacaaacctagtaaagatgattttcagactgcccaactattggcacttgtattggaattgttaacattttgtgtggagcaccatacctaccacataaagaactacattattaataaggatatcctccggagagtgctagttcttatggcctcgaagcatgctttcttggcattataaaccgtgtcagcatggttgcctggctacctgctcatgaaggacttgattaatagcaaattggcaatttaacgagccacttccatgatctccaaagaaaccaaaatacaaacacaatatttaatcttgccaaccgaagacgatgtgactgcatgaagtgcccttcgttttaaaagaaagattattggattaaaagatgagttttacaaccgctacataatgaaaagttttttgtttgaaccagtagtgaaagcatttctcaacaatggatcccgctacaatctgatgaactctgccataatagagatgtttgaatttattagagtggaagatataaaatcattaactgctcatgtaattgaaaattactggaaagcactggaagatgtagattatgtacagacatttaaaggattaaaactgagatttgaacaacaaagagaaaggcaagataatcccaaacttgacagtatgcgttccattttgaggaatcacagatatcgaagagatgccagaacactagaagatgaagaagagatgtggtttaacacagatgaagatgacatggaagatggagaagctgtagtgtctccatctgacaaaactaaaaatgatgatgatattatggatccaataagtaaattcatggaaaggaagaaattaaaagaaagtgaggaaaaggaagtgcttctgaaaacaaacctttctggacggcagagcccaagtttcaagctttccctgtccagtggaacgaagactaacctcaccagccagtcatctacaacaaatctgcctggttctccgggatcacctggatccccaggatctccaggctctcctggatccgtacctaaaaatacatctcagacggcagctattactacaaagggaggcctcgtgggtctggtagattatcctgatgatgatgaagatgatgatgaggatgaagataaggaagatacgttaccattgtcaaagaaagcaaaatttgattcataataatggcaacggcctaggatcagtacctgttgaaaaaaactggttctccacccctcccccatacaaaatccacaacaaagcgcagtggtctcttgtgaatgactgacacagatcagcctcttacacttgacttctgctcatcaagtgccaattcaatggagcaggaggaggggatatcatatatttaggggaaagacttaagcctttgagctctccagcttggaccacacattgcccttttctcagggaaggaaatggaaacaaaaagccaacagggcaggggttttgtaagtggaactctggattgactggtcagttgctacaatcagaatatgctttcttggaccatgtttgagactcagaagaatgggcctttctgccataattcttcactagtcaagaatgccagcagtttctttgtataaagagacctgcctttaaaatcatacattctgaacattttagtcaagctacaacaggtttggaaaacctctgtgggggaggggcgagtataaagttttcctcttttttaactgttccctttgcccttcaaactgcagatatttttttttttaagtggggacttctccctacttgattaaagattgagtggaattctagatgtggtcatttgtgtcataatttttttgttttattttgtttttgattttttttttcctcccctgagtgtatgcttagttgttgagtatatatatttgggaccattaaaactttttttgatgtaatataacctaacgttgtgctggtacctgttttaccatgtgtaatttttgttctacatcacagttcttaatttgtttagagttttatgaaagatggtatagtttttattgacaaaagcaaagtaatcttacaactatgtgcatacaaaagcaatactattttgtgactaaatattttatattaaaatttacatcagcaactgtcttgagaattcagggaaatagaatggaatttaaaacttcaacagttttgttaaatctagaaacatgaaattagtattccaaagagattctgaaatttcttttcttggggaaatgacggtacattaaatcaaaattgaggatggatgatttaaaaacatttgactttttaataataaaaagaaaagtgaagagtaagag

SEQ ID NO: 415954 - DNA, 3704 bp, Homo sapiens
caccggcgcaatctgcgtcccgcctcctccgctccctgcgctcccgccacctcggcaactccgcgcccgcctcccgcctccgtcggaagcctccgccgcagtaaggctcccggtctcgctgctgtctctttaaatggtggggctacgagccgcccctgcagctgctcccgggcggcacgatgaccgacacccggcggcgggtgaaggtgtacacgctcaacgaggaccggcagtgggacgaccggggcaccgggcatgtgtcgtctggctacgtggagcggctgaagggcatgtccctgcttgtcagggctgagagcgacggttctctacttttagagtcgaaaataaatcctaacactgcataccagaaacaacaggacactctgattgtgtggtctgaagcagaaaattatgacttggcccttagctttcaagaaaaagctggatgtgatgaaatttgggagaaaatatgtcaggttcaaggaaaggacccttccgtggacatcactcaggaccttgtggatgaatctgaagaggagcgttttgatgatatgtcatcgccaggcttagaattgccatcttgtgaattaagtcgccttgaagaaattgcagaacttgtggcatcatctttaccttcacctcttcgtcgtgaaaaacttgcactggcactagaaaatgagggttatattaaaaagctcctggagctttttcatgtgtgtgaagatttggaaaatattgaaggactgcaccacttgtatgaaattatcaaaggcatctttctcttgaatcgaactgctctttttgaagttatgttctctgaagaatgtataatggacgtcattggatgtttagaatatgatcctgctttatcacaaccacgaaaacacagggaatttctaacaaaaacagccaagtttaaagaagtgattcccatatcagatcctgagctgaaacaaaaaattcatcagacatacagagttcagtatatacaagatatggttctaccaactccttcggtctttgaagaaaacatgttatcaacacttcactcttttatctttttcaataaggtagagattgttggcatgttgcaggaagatgaaaaatttctgacagatttgtttgcacaactaacagatgaagcaacagatgaggaaaaaagacaggaattggttaactttttaaaagaattttgtgcgttttcccaaacgctacagcctcaaaacagagatgcttttttcaagactttgtcaaacatgggcatattaccagctttagaagtcatccttggcatggatgatacacaggtgcgaagtgctgctactgatatattctcatacttggttgaatataatccatccatggtacgagagtttgtcatgcaggaggcacaacagaatgatgatgatattttgctcatcaacctcattatagaacatatgatttgtgatacagatcctgaacttggaggagcagtccagcttatgggcctgcttcgaactttagttgacccagagaacatgctagccactgccaataaaacagaaaagactgaatttctgggtttcttctacaagcactgtatgcatgttctcactgctcctttactagcaaatacaacagaagacaaacctagtaaagatgattttcagactgcccaactattggcacttgtattggaattgttaacattttgtgtggagcaccatacctaccacataaagaactacattattaataaggatatcctccggagagtgctagttcttatggcctcgaagcatgctttcttggcattataaaccgtgtcagcatggttgcctggctacctgctcatgaaggacttgattaatagcaaattggcaatttaacgagccacttccatgatctccaaagaaaccaaaatacaaacacaatatttaatcttgccaaccgaagacgatgtgactgcatgaagtgcccttcgttttaaaagaaagattattggattaaaagatgagttttacaaccgctacataatgaaaagttttttgtttgaaccagtagtgaaagcatttctcaacaatggatcccgctacaatctgatgaactctgccataatagagatgtttgaatttattagagtggaagatataaaatcattaactgctcatgtaattgaaaattactggaaagcactggaagatgtagattatgtacagacatttaaaggattaaaactgagatttgaacaacaaagagaaaggcaagataatcccaaacttgacagtatgcgttccattttgaggaatcacagatatcgaagagatgccagaacactagaagatgaagaagagatgtggtttaacacagatgaagatgacatggaagatggagaagctgtagtgtctccatctgacaaaactaaaaatgatgatgatattatggatccaataagtaaattcatggaaaggaagaaattaaaagaaagtgaggaaaaggaagtgcttctgaaaacaaacctttctggacggcagagcccaagtttcaagctttccctgtccagtggaacgaagactaacctcaccagccagtcatctacaacaaatctgcctggttctccgggatcacctggatccccaggatctccaggctctcctggatccgtacctaaaaatacatctcagacggcagctattactacaaagggaggcctcgtgggtctggtagattatcctgatgatgatgaagatgatgatgaggatgaagataaggaagatacgttaccattgtcaaagaaagcaaaatttgattcataataatggcaacggcctaggatcagtacctgttgaaaaaaactggttctccacccctcccccatacaaaatccacaacaaagcgcagtggtctcttgtgaatgactgacacagatcagcctcttacacttgacttctgctcatcaagtgccaattcaatggagcaggaggaggggatatcatatatttaggggaaagacttaagcctttgagctctccagcttggaccacacattgcccttttctcagggaaggaaatggaaacaaaaagccaacagggcaggggttttgtaagtggaactctggattgactggtcagttgctacaatcagaatatgctttcttggaccatgtttgagactcagaagaatgggcctttctgccataattcttcactagtcaagaatgccagcagtttctttgtataaagagacctgcctttaaaatcatacattctgaacattttagtcaagctacaacaggtttggaaaacctctgtgggggaggggcgagtataaagttttcctcttttttaactgttccctttgcccttcaaactgcagatatttttttttttaagtggggacttctccctacttgattaaagattgagtggaattctaaaaaaaaaaaaaaaagaaaaaaaaaagagaaaaaaaaaaaaaaaataaagggacggccggtcataaaaagaaaattcgcaccagggtgtgcccaaacgaaaacggcaaggagcccagaaataatggaaaacaccggggggcggcacaacataaggcggccgtaaaccgacatagagagggaaagtcgcgcggggcgcacaaaaaagcggacgacacatgagaaaacacgagcaaaggggagggcacatctgaagcagcgcacccaagtcgaaggggcgacaacaat

SEQ ID NO: 415955 - DNA, 3676 bp, Homo sapiens
caccggcgcaatctgcgtcccgcctcctccgctccctgcgctcccgccacctcggcaactccgcgcccgcctcccgcctccgtcggaagcctccgccgcagtaaggctcccggtctcgctgctgtctctttaaatggtggggctacgagccgcccctgcagctgctcccgggcggcacgatgaccgacacccggcggcgggtgaaggtgtacacgctcaacgaggaccggcagtgggacgaccggggcaccgggcatgtgtcgtctggctacgtggagcggctgaagggcatgtccctgcttgtcagggctgagagcgacggttctctacttttagagtcgaaaataaatcctaacactgcataccagaaacaacaggacactctgattgtgtggtctgaagcagaaaattatgacttggcccttagctttcaagaaaaagctggatgtgatgaaatttgggagaaaatatgtcaggttcaaggaaaggacccttccgtggacatcactcaggaccttgtggatgaatctgaagaggagcgttttgatgatatgtcatcgccaggcttagaattgccatcttgtgaattaagtcgccttgaagaaattgcagaacttgtggcatcatctttaccttcacctcttcgtcgtgaaaaacttgcactggcactagaaaatgagggttatattaaaaagctcctggagctttttcatgtgtgtgaagatttggaaaatattgaaggactgcaccacttgtatgaaattatcaaaggcatctttctcttgaatcgaactgctctttttgaagttatgttctctgaagaatgtataatggacgtcattggatgtttagaatatgatcctgctttatcacaaccacgaaaacacagggaatttctaacaaaaacagccaagtttaaagaagtgattcccatatcagatcctgagctgaaacaaaaaattcatcagacatacagagttcagtatatacaagatatggttctaccaactccttcggtctttgaagaaaacatgttatcaacacttcactcttttatctttttcaataaggtagagattgttggcatgttgcaggaagatgaaaaatttctgacagatttgtttgcacaactaacagatgaagcaacagatgaggaaaaaagacaggaattggttaactttttaaaagaattttgtgcgttttcccaaacgctacagcctcaaaacagagatgcttttttcaagactttgtcaaacatgggcatattaccagctttagaagtcatccttggcatggatgatacacaggtgcgaagtgctgctactgatatattctcatacttggttgaatataatccatccatggtacgagagtttgtcatgcaggaggcacaacagaatgatgatgatattttgctcatcaacctcattatagaacatatgatttgtgatacagatcctgaacttggaggagcagtccagcttatgggcctgcttcgaactttagttgacccagagaacatgctagccactgccaataaaacagaaaagactgaatttctgggtttcttctacaagcactgtatgcatgttctcactgctcctttactagcaaatacaacagaagacaaacctagtaaagatgattttcagactgcccaactattggcacttgtattggaattgttaacattttgtgtggagcaccatacctaccacataaagaactacattattaataaggatatcctccggagagtgctagttcttatggcctcgaagcatgctttcttggcattataaaccgtgtcagcatggttgcctggctacctgctcatgaaggacttgattaatagcaaattggcaatttaacgagccacttccatgatctccaaagaaaccaaaatacaaacacaatatttaatcttgccaaccgaagacgatgtgactgcatgaagtgcccttcgttttaaaagaaagattattggattaaaagatgagttttacaaccgctacataatgaaaagttttttgtttgaaccagtagtgaaagcatttctcaacaatggatcccgctacaatctgatgaactctgccataatagagatgtttgaatttattagagtggaagatataaaatcattaactgctcatgtaattgaaaattactggaaagcactggaagatgtagattatgtacagacatttaaaggattaaaactgagatttgaacaacaaagagaaaggcaagataatcccaaacttgacagtatgcgttccattttgaggaatcacagatatcgaagagatgccagaacactagaagatgaagaagagatgtggtttaacacagatgaagatgacatggaagatggagaagctgtagtgtctccatctgacaaaactaaaaatgatgatgatattatggatccaataactaaaaatacatctcagacggcagctattactacaaagggaggcctcgtgggtctggtagattatcctgatgatgatgaagatgatgatgaggatgaagataaggaagatacgttaccattgtcaaagaaagcaaaatttgattcataataatggcaacggcctaggatcagtacctgttgaaaaaaactggttctccacccctcccccatactcttacacttgacttctgctcatcaagtgccaattcaatggagcaggaggaggggatatcatatatttaggggaaagacttaagcctttgagctctccagcttggaccacacattgcccttttctcagggaaggaaatggaaacaaaaagccaacagggcaggggttttgtaagtggaactctggattgactggtcagttgctacaatcagaatatgctttcttggaccatgtttgagactcagaagaatgggcctttctgccataattcttcactagtcaagaatgccagcagtttctttgtataaagagacctgcctttaaaatcatacattctgaacattttagtcaagctacaacaggtttggaaaacctctgtgggggaggggcgagtataaagttttcctcttttttaactgttccctttgcccttcaaactgcagatatttttttttttaagtggggacttctccctacttgattaaagattgagtggaattctagatgtggtcatttgtgtcataatttttttgttttattttgtttttgattttttttttcctcccctgagtgtatgcttagttgttgagtatatatatttgggaccattaaaactttttttgatgtaatataacctaacgttgtgctggtacctgttttaccatgtgtaatttttgttctacatcacagttcttaatttgtttagagttttatgaaagatggtatagtttttattgacaaaagcaaagtaatcttacaactatgtgcatacaaaagcaatactattttgtgactaaatattttatattaaaatttacatcagcaactgtcttgagaattcagggaaatagaatggaatttaaaacttcaacagttttgttaaatctagaaacatgaaattagtattccaaagagattctgaaatttcttttcttggggaaatgacggtacattaaatcaaaattgaggatggatgatttaaaaacatttgactttttaataataaaaagaaaagtgaagagtaagag

SEQ ID NO: 415956 - DNA, 3825 bp, Homo sapiens
caccggcgcaatctgcgtcccgcctcctccgctccctgcgctcccgccacctcggcaactccgcgcccgcctcccgcctccgtcggaagcctccgccgcagtaaggctcccggtctcgctgctgtctctttaaatggtggggctacgagccgcccctgcagctgctcccgggcggcacgatgaccgacacccggcggcgggtgaaggtgtacacgctcaacgaggaccggcagtgggacgaccggggcaccgggcatgtgtcgtctggctacgtggagcggctgaagggcatgtccctgcttgtcagggctgagagcgacggttctctacttttagagtcgaaaataaatcctaacactgcataccagaaacaacaggacactctgattgtgtggtctgaagcagaaaattatgacttggcccttagctttcaagaaaaagctggatgtgatgaaatttgggagaaaatatgtcaggttcaaggaaaggacccttccgtggacatcactcaggaccttgtggatgaatctgaagaggagcgttttgatgatatgtcatcgccaggcttagaattgccatcttgtgaattaagtcgccttgaagaaattgcagaacttgtggcatcatctttaccttcacctcttcgtcgtgaaaaacttgcactggcactagaaaatgagggttatattaaaaagctcctggagctttttcatgtgtgtgaagatttggaaaatattgaaggactgcaccacttgtatgaaattatcaaaggcatctttctcttgaatcgaactgctctttttgaagttatgttctctgaagaatgtataatggacgtcattggatgtttagaatatgatcctgctttatcacaaccacgaaaacacagggaatttctaacaaaaacagccaagtttaaagaagtgattcccatatcagatcctgagctgaaacaaaaaattcatcagacatacagagttcagtatatacaagatatggttctaccaactccttcggtctttgaagaaaacatgttatcaacacttcactcttttatctttttcaataaggtagagattgttggcatgttgcaggaagatgaaaaatttctgacagatttgtttgcacaactaacagatgaagcaacagatgaggaaaaaagacaggaattggttaactttttaaaagaattttgtgcgttttcccaaacgctacagcctcaaaacagagatgcttttttcaagactttgtcaaacatgggcatattaccagctttagaagtcatccttggcatggatgatacacaggtgcgaagtgctgctactgatatattctcatacttggttgaatataatccatccatggtacgagagtttgtcatgcaggaggcacaacagaatgatgatgatattttgctcatcaacctcattatagaacatatgatttgtgatacagatcctgaacttggaggagcagtccagcttatgggcctgcttcgaactttagttgacccagagaacatgctagccactgccaataaaacagaaaagactgaatttctgggtttcttctacaagcactgtatgcatgttctcactgctcctttactagcaaatacaacagaagacaaacctagtaaagatgattttcagactgcccaactattggcacttgtattggaattgttaacattttgtgtggagcaccatacctaccacataaagaactacattattaataaggatatcctccggagagtgctagttcttatggcctcgaagcatgctttcttggcattataaaccgtgtcagcatggttgcctggctacctgctcatgaaggacttgattaatagcaaattggcaatttaacgagccacttccatgatctccaaagaaaccaaaatacaaacacaatatttaatcttgccaaccgaagacgatgtgactgcatgaagtgcccttcgttttaaaagaaagattattggattaaaagatgagttttacaaccgctacataatgaaaagttttttgtttgaaccagtagtgaaagcatttctcaacaatggatcccgctacaatctgatgaactctgccataatagagatgtttgaatttattagagtggaagatataaaatcattaactgctcatgtaattgaaaattactggaaagcactggaagatgtagattatgtacagacatttaaaggattaaaactgagatttgaacaacaaagagaaaggcaagataatcccaaacttgacagtatgcgttccattttgaggaatcacagatatcgaagagatgccagaacactagaagatgaagaagagatgtggtttaacacagatgaagatgacatggaagatggagaagctgtagtgtctccatctgacaaaactaaaaatgatgatgatattatggatccaataagtaaattcatggaaaggaagaaattaaaagaaagtgaggaaaaggaagtgcttctgaaaacaaacctttctggacggcagagcccaagtttcaagctttccctgtccagtggaacgaagactaacctcaccagccagtcatctacaacaaatctgcctggttctccgggatcacctggatccccaggatctccaggctctcctggatccgtacctaaaaatacatctcagacggcagctattactacaaagggaggcctcgtgggtctggtagattatcctgatgatgatgaagatgatgatgaggatgaagataaggaagatacgttaccattgtcaaagaaagcaaaatttgattcataataatggcaacggcctaggatcagtacctgttgaaaaaaactggttctccacccctcccccatacaaaatccacaacaaagcgcagtggtctcttgtgaatgactgacacagatcagcctcttacacttgacttctgctcatcaagtgccaattcaatggagcaggaggaggggatatcatatatttaggggaaagacttaagcctttgagctctccagcttggaccacacattgcccttttctcagggaaggaaatggaaacaaaaagccaacagggcaggggttttgtaagtggaactctggattgactggtcagttgctacaatcagaatatgctttcttggaccatgtttgagactcagaagaatgggcctttctgccataattcttcatataaagttttcctcttttttaactgttccctttgcccttcaaactgcagatatttttttttttaagtggggacttctccctacttgattaaagattgagtggaattctagatgtggtcatttgtgtcataatttttttgttttattttgtttttgattttttttttcctcccctgagtgtatgcttagttgttgagtatatatatttgggaccattaaaactttttttgatgtaatataacctaacgttgtgctggtacctgttttaccatgtgtaatttttgttctacatcacagttcttaatttgtttagagttttatgaaagatggtatagtttttattgacaaaagcaaagtaatcttacaactatgtgcatacaaaagcaatactattttgtgactaaatattttatattaaaatttacatcagcaactgtcttgagaattcagggaaatagaatggaatttaaaacttcaacagttttgttaaatctagaaacatgaaattagtattccaaagagattctgaaatttcttttcttggggaaatgacggtacattaaatcaaaattgaggatggatgatttaaaaacatttgactttttaataataaaaagaaaagtgaagagtaagag

SEQ ID NO: 415957 - DNA, 3412 bp, Homo sapiens
caccggcgcaatctgcgtcccgcctcctccgctccctgcgctcccgccacctcggcaactccgcgcccgcctcccgcctccgtcggaagcctccgccgcagtaaggctcccggtctcgctgctgtctctttaaatggtggggctacgagccgcccctgcagctgctcccgggcggcacgatgaccgacacccggcggcgggtgaaggtgtacacgctcaacgaggaccggcagtgggacgaccggggcaccgggcatgtgtcgtctggctacgtggagcggctgaagggcatgtccctgcttgtcagggctgagagcgacggttctctacttttagagtcgaaaataaatcctaacactgcataccagaaacaacaggacactctgattgtgtggtctgaagcagaaaattatgacttggcccttagctttcaagaaaaagctggatgtgatgaaatttgggagaaaatatgtcaggttcaaggaaaggacccttccgtggacatcactcaggaccttgtggatgaatctgaagaggagcgttttgatgatatgtcatcgccaggcttagaattgccatcttgtgaattaagtcgccttgaagaaattgcagaacttgtggcatcatctttaccttcacctcttcgtcgtgaaaaacttgcactggcactagaaaatgagggttatattaaaaagctcctggagctttttcatgtgtgtgaagatttggaaaatattgaaggactgcaccacttgtatgaaattatcaaaggcatctttctcttgaatcgaactgctctttttgaagttatgttctctgaagaatgtataatggacgtcattggatgtttagaatatgatcctgctttatcacaaccacgaaaacacagggaatttctaacaaaaacagccaagtttaaagaagtgattcccatatcagatcctgagctgaaacaaaaaattcatcagacatacagagttcagtatatacaagatatggttctaccaactccttcggtctttgaagaaaacatgttatcaacacttcactcttttatctttttcaataaggtagagattgttggcatgttgcaggaagatgaaaaatttctgacagatttgtttgcacaactaacagatgaagcaacagatgaggaaaaaagacaggaattggttaactttttaaaagaattttgtgcgttttcccaaacgctacagcctcaaaacagagatgcttttttcaagactttgtcaaacatgggcatattaccagctttagaagtcatccttggcatggatgatacacaggtgcgaagtgctgctactgatatattctcatacttggttgaatataatccatccatggtacgagagtttgtcatgcaggaggcacaacagaatgatgatgatattttgctcatcaacctcattatagaacatatgatttgtgatacagatcctgaacttggaggagcagtccagcttatgggcctgcttcgaactttagttgacccagagaacatgctagccactgccaataaaacagaaaagactgaatttctgggtttcttctacaagcactgtatgcatgttctcactgctcctttactagcaaatacaacagaagacaaacctagtaaagatgattttcagactgcccaactattggcacttgtattggaattgttaacattttgtgtggagcaccatacctaccacataaagaactacattattaataaggatatcctccggagagtgctagttcttatggcctcgaagcatgctttcttggcattatgtgcccttcgttttaaaagaaagattattggattaaaagatgagttttacaaccgctacataatgaaaagttttttgtttgaaccagtagtgaaagcatttctcaacaatggatcccgctacaatctgatgaactctgccataatagagatgtttgaatttattagagtggaagatataaaatcattaactgctcatgtaattgaaaattactggaaagcactggaagatgtagattatgtacagacatttaaaggattaaaactgagatttgaacaacaaagagaaaggcaagataatcccaaacttgacagtatgcgttccattttgaggaatcacagatatcgaagagatgccagaacactagaagatgaagaagagatgtggtttaacacagatgaagatgacatggaagatggagaagctgtagtgtctccatctgacaaaactaaaaatgatgatgaggatgaagataaggaagatacgttaccattgtcaaagaaagcaaaatttgattcataataatggcaacggcctaggatcagtacctgttgaaaaaaactggttctccacccctcccccatactcttacacttgacttctgctcatcaagtgccaattcaatggagcaggaggaggggatatcatatatttaggggaaagacttaagcctttgagctctccagcttggaccacacattgcccttttctcagggaaggaaatggaaacaaaaagccaacagggcaggggttttgtaagtggaactctggattgactggtcagttgctacaatcagaatatgctttcttggaccatgtttgagactcagaagaatgggcctttctgccataattcttcactagtcaagaatgccagcagtttctttgtataaagagacctgcctttaaaatcatacattctgaacattttagtcaagctacaacaggtttggaaaacctctgtgggggaggggcgagtataaagttttcctcttttttaactgttccctttgcccttcaaactgcagatatttttttttttaagtggggacttctccctacttgattaaagattgagtggaattctagatgtggtcatttgtgtcataatttttttgttttattttgtttttgattttttttttcctcccctgagtgtatgcttagttgttgagtatatatatttgggaccattaaaactttttttgatgtaatataacctaacgttgtgctggtacctgttttaccatgtgtaatttttgttctacatcacagttcttaatttgtttagagttttatgaaagatggtatagtttttattgacaaaagcaaagtaatcttacaactatgtgcatacaaaagcaatactattttgtgactaaatattttatattaaaatttacatcagcaactgtcttgagaattcagggaaatagaatggaatttaaaacttcaacagttttgttaaatctagaaacatgaaattagtattccaaagagattctgaaatttcttttcttggggaaatgacggtacattaaatcaaaattgaggatggatgatttaaaaacatttgactttttaataataaaaagaaaagtgaagagtaagag

SEQ ID NO: 415958 - DNA, 3870 bp, Homo sapiens
caccggcgcaatctgcgtcccgcctcctccgctccctgcgctcccgccacctcggcaactccgcgcccgcctcccgcctccgtcggaagcctccgccgcagtaaggctcccggtctcgctgctgtctctttaaatggtggggctacgagccgcccctgcagctgctcccgggcggcacgatgaccgacacccggcggcgggtgaaggtgtacacgctcaacgaggaccggcagtgggacgaccggggcaccgggcatgtgtcgtctggctacgtggagcggctgaagggcatgtccctgcttgtcagggctgagagcgacggttctctacttttagagtcgaaaataaatcctaacactgcataccagaaacaacaggacactctgattgtgtggtctgaagcagaaaattatgacttggcccttagctttcaagaaaaagctggatgtgatgaaatttgggagaaaatatgtcaggttcaaggaaaggacccttccgtggacatcactcaggaccttgtggatgaatctgaagaggagcgttttgatgatatgtcatcgccaggcttagaattgccatcttgtgaattaagtcgccttgaagaaattgcagaacttgtggcatcatctttaccttcacctcttcgtcgtgaaaaacttgcactggcactagaaaatgagggttatattaaaaagctcctggagctttttcatgtgtgtgaagatttggaaaatattgaaggactgcaccacttgtatgaaattatcaaaggcatctttctcttgaatcgaactgctctttttgaagttatgttctctgaagaatgtataatggacgtcattggatgtttagaatatgatcctgctttatcacaaccacgaaaacacagggaatttctaacaaaaacagccaagtttaaagaagtgattcccatatcagatcctgagctgaaacaaaaaattcatcagacatacagagttcagtatatacaagatatggttctaccaactccttcggtctttgaagaaaacatgttatcaacacttcactcttttatctttttcaataaggtagagattgttggcatgttgcaggaagatgaaaaatttctgacagatttgtttgcacaactaacagatgaagcaacagatgaggaaaaaagacaggaattggttaactttttaaaagaattttgtgcgttttcccaaacgctacagcctcaaaacagagatgcttttttcaagactttgtcaaacatgggcatattaccagctttagaagtcatccttggcatggatgatacacaggtgcgaagtgctgctactgatatattctcatacttggttgaatataatccatccatggtacgagagtttgtcatgcaggaggcacaacagaatgatgatgtaagtaagaagttaacagagcaaaaaataaccagcaaggtaaatattatttgtactaatagtaagtatttatacataggaagctataactgtttttattattcacttttaagatttaattgttgctgtttgggaaaagtgtagccataatatcagacagcttattgttcccctaaattggttcctgtctcagtttatcaatttgtcctacagcaactatttatgttcatttaaattgccttttaaaatattcatgtcagtttttttttgttttgttttgttttaattctgaagtcaacttgctatattgtgttttttaaatcatttagtcaatcaattcttgtatctggggaattaagagtaagttacctaggaaaacattgactttagggtagattctcaaaatcgccaagaatgaagaaatgtagcacagtcccttaaaatatgaagggtgctgtttctttactgcctagccatagagaacaagctgttacgttgttcacaaacactcacgttagcatctgagatataccagattttaaagtagtagagaatatatcctggtaatgtgaagggtgcgcctggatcacatagtgcgtgacatgtgagagcactaaatgtgtgtgctctcctttattttaaaataattgaaccaatgattctgattttttcctgcttcccccataacaatttggaagcaactttttacgtaagaatgagtaagaaggacctgctctcaggtccttcttaagggaggaggggaataaagatcccctaaggaaaaaaaaaaaatctgtttagaattccagcctgtggtatttttacgaaataggaaaatagactgtcttactttttgaaaagatcctatttaatgtattgtgatgtcaaaaggaaatggaatgccatgtaactgctatgtttaagtttttatttttatagtgcaggataggtgcaaaaaagcaccagtttgaactgttgtgtcatgtttttcttttataaaatattaacatcggcctcagcaacatagcaagaccctcctttagtacaaaattaatttttaaaacttagatatggtggcatgcacccatagtcccagatactcaggaggatgagaaggaagagtctcttaagaccaggagtttgactctgcagtgagctatgattgctccactgcactccagtctgggtgacgaagccagaccccatctcaaaaaaaaaaaaattctttgagaaccaaagtatctgtattattgaaaataaaggctattgttggtcccattaacccatgagctgaacatatgaacatgtattgatatacctcaaaatacacacagtaggactctttttttttcctgttttgcaacagaataacatttcagtcactaggactcttgattcccactcttcttaatcatcatttccatctactgtctgcattttctctatcccttgtccatcctgcctttgcatacacataggcaagagcagggattttctcactgaatccctctcaatcttatttactacttaggtgaggaataccagtcataataggacctcaggaaaaccagccatctcttttctttgatatttagaatgtgtataatccatttgttctctgcactctctaaataccatagtctcattttctccaatttcagacattcagataattttttcctaaatttattttaaaaggaaattttatatcacttttacaaatggagaacatacatcactggccataaatagaaggactctataataataaaagcaatagaccaggcacggtggctcacgcctgtaatcccagcactttgggaggctgaggcaggcggatcacctgaggtagggagttcaagactagcctgacgatcatggagaaaccccgtctctactaaaaatacaaaattagccgggcatggtggtgcatgcctgtaatcccagctactagggaggctgaggcaggagaatcgcttgaacccgggaggtggaggtgtagtaagacgagatcgtgccattgcactccagcctgggcaacaagaggcaaactccgtctcaaaaaaataaaataaaaataaaagcaacgaaagtattatgatgttctaaatcctacctaaatattcttactcttaaagctatggtcataaaacccactggctttcttcaaaaggtagattacattattagaaagttgtaaagatatattatcaccaaactaaaactttgcttttgctttattcagaggaatttaaagataatagacaagaaatttctatttagggctatgtccctgtaccacactttagggaatgaaacactgtcatatgtcctgtcagataactgagttaaacatttcactttgcagttaacaaaacagctagagcctaggtataatgctgtggtatgtgtcttagtttttgctttttccgttctctcataataagtgatcctgagtatgtct

SEQ ID NO: 415959 - DNA, 2155 bp, Homo sapiens
  misc_feature (2155)..(2155): n is a, c, g, or t
caccggcgcaatctgcgtcccgcctcctccgctccctgcgctcccgccacctcggcaactccgcgcccgcctcccgcctccgtcggaagcctccgccgcagtaaggctcccggtctcgctgctgtctctttaaatggtggggctacgagccgcccctgcagctgctcccgggcggcacgatgaccgacacccggcggcgggtgaaggtgtacacgctcaacgaggaccggcagtgggacgaccggggcaccgggcatgtgtcgtctggctacgtggagcggctgaagggcatgtccctgcttgtcagggctgagagcgacggttctctacttttagagtcgaaaataaatcctaacactgcataccagaaacaacaggacactctgattgtgtggtctgaagcagaaaattatgacttggcccttagctttcaagaaaaagctggatgtgatgaaatttgggagaaaatatgtcaggttcaaggaaaggacccttccgtggacatcactcaggaccttgtggatgaatctgaagaggagcgttttgatgatatgtcatcgccaggcttagaattgccatcttgtgaattaagtcgccttgaagaaattgcagaacttgtggcatcatctttaccttcacctcttcgtcgtgaaaaacttgcactggcactagaaaatgagggttatattaaaaagctcctggagctttttcatgtgtgtgaagatttggaaaatattgaaggactgcaccacttgtatgaaattatcaaaggcatctttctcttgaatcgaactgctctttttgaagttatgttctctgaagaatgtataatggacgtcattggatgtttagaatatgatcctgctttatcacaaccacgaaaacacagggaatttctaacaaaaacagccaagtttaaagaagtgattcccatatcagatcctgagctgaaacaaaaaattcatcagacatacagagttcagtatatacaagatatggttctaccaactccttcggtctttgaagaaaacatgttatcaacacttcactcttttatctttttcaataaggtagagattgttggcatgttgcaggaagatgaaaaatttctgacagatttgtttgcacaactaacagatgaagcaacagatgaggaaaaaagacaggaattgtaactttttgaattttgtgcgttttccccgctacagcctctagaagtcatccttggcatggatgatacacaggtgcgaagtgctgctactgatatattctcatacttggttgaatataatccatccatggtacgagagtttgtcatgcaggaggcacaacagaatgatgatgatattttgctcatcaacctcattatagaacatatgatttgtgatacagatcctgaacttggaggagcagtccagcttatgggcctgcttcgaactttagttgacccagagaacatgctagccactgccaataaaacagaaaagactgaatttctgggtttcttctacaagcactgtatgcatgttctcactgctcctttactagcaaatacaacagaagacaaacctagtaaagatgattttcagactgcccaactattggcacttgtattggaattgttaacattttgtgtggagcaccatacctaccacataaagaactacattattaataaggatatcctccggagagtgctagttcttatggcctcgaagcatgctttcttggcattatgtgcccttcgttttaaaagaaagattattggattaaaagatgagttttacaaccgctacataatgaaaagttttttgtttgaaccagtagtgaaagcatttctcaacaatggatcccgctacaatctgatgaactctgccataatagagatgtttgaatttattagagtggagattttaatcttacggtcagtatgaattctgaaagcggagagtgatatgttcaaatttagggtgacgggttgacatagggaaggggaatcaatgaaggaggttccttgggatcgattggaagttcgactgaagtggaaggggtcattgagtcggatgagagggcctgtaaaagagaatgtcatgggagaaaagaagcgagatgggggggggaaaaagtgggggcaacgaggctgaaaatggcgttn

SEQ ID NO: 415960 - DNA, 234 bp, Homo sapiens
ctgcgctcccgccacctcggcaactccgcgcccgcctcccgcctccgtcggaagcctccgccgcagtaaggctcccggtctcgctgctgtctctttaaatggtggggctacgagccgcccctgcagctgctccctgggtggccccgcgcgccgcttttgaggggcgaaccaagatggcggcggttttggctgtgtgaggaagacggaagagacggcggcggagggaaaccgact

SEQ ID NO: 415961 - DNA, 310 bp, Homo sapiens
ggagtctatttaggagtatcttgtccccgaatgaggaagcgggacctgcccaccaccactaccttcaatcgaatgtgtagacctccaagaaggaatcctcctttcttttcctggccaggggaatcaagctgtagattattaaacatgcggcatagctgggaacagaccccaaggaagtaagggagggagggaggaaaggacacttctctgagcctgcaagttcagcacgggcgtcctacagttcaggaagactacctcagtgacagagtccctgggaatgaaggagttaagtttttgggacaagtgtctg

SEQ ID NO: 415962 - DNA, 541 bp, Homo sapiens
ggaaaccatggtaaattttacccagttcattgcatatcgttccgggaagcgataaagacccatggttcgagtaattatattctaaattaggcgacagatagtagccaaatggtcctataatgcccttggataagaaaaggaaacttttgagctgcaccttcagtttatcctcaaagcctgcgttgtttgtcttcatctaatccagctttgatggacatctgtgatggttgcctgtacacttgctgaaatgaaatattagaaatggctgtatattccaaagaaaccctatattatatatccacattactgctgctaggattcatagttgcacatactgtttattgcttatgtgtagaaggaatgaaactagtttccagagttgttattaatatgaatatatatcatgtgttaatattgagaaaggaaaaatacattcccggtgttagtagttcttcatttcctgtctccaacagaaaattcactcattttagaactagtgtaattcttgataataaaataagagttttgattaagaacagca

SEQ ID NO: 415963 - DNA, 1381 bp, Homo sapiens
  misc_feature (134)..(134): n is a, c, g, or t
gggattatggggtatagagctcttctcccctccccccctcaagtaaagttgtcactgataataatccgatccctttaccctattccaagctcccaatagaaagaatttcgaaggctgaggacacatgttaaggnggccagaacttgtgggaaggctgtgatgggattttgggagacactttcgggcccactcagcctcttagtgacagagtcattagagctgcatttcagtagccaaagaggacaggaacaagtctgtcttcatgaggaatggtcctataatgcccttggataagaaaaggaaacttttgagctgcaccttcagtttatcctcaaagcctgcgttgtttgtcttcatctaatccagctttgatggacatctgtgatggttgcctgtacacttgctgaaatgaaatattagaaatggctgtatattccaaagaaaccctatattatatatccacattactgctgctaggattcatagttgcacatactgtttattgcttatgtgtagaaggaatgaaactagtttccagagttgttattaatatgaatatatatcatgtgttaatattgagaaaggaaaaatacattcccggtgttagtagttcttcatttcctgtctccaacagaaaattcactcattttagaactagtgtaattcttgataataaaataagagttttgattaagaacagcatagagcttcaaaatgcaaagtgaatgattagtaaaattatgtctcattttattttttcagcacccataccacaattaatattaggctggattgccatgggaaacattttttggcattaatgcagcaacataatactcactttaggtattactacatagttgaaggatttaactgaatgtatggatcaaatttatttatttgacatattcgaagctgtggtttaataggaatttgagaaaggtgtaagaaataggataaaaagaaggtcagcaccatgtaccaggaatagctttactttccatacatagaaatataaatttagtggtatcctatattactttagtgtcgtacgctttgtaagacttaaatattttattctattgattccacttctttggtatgttaagacatttctttaaagatgaccaacaatatccttattttaggtgccactagcagatgtaagcgtatacttagttgccgttagatgtgacagaatgagataatttatgtaaagcagtagagtacctggcacaaagcaaacaataaatattattgttattgttgttataattgtaaaatgaatgacttcaaaaacatagtcccagtttggagggattttgtgatgcagaatatctaagtcatagaaatagaagacaggtggaataagtatatgttc

SEQ ID NO: 415964 - DNA, 878 bp, Homo sapiens
accggaagaggcggggccaccggagtgcctaagagctgtcttccgatgtcgctcttcctttcccgcgcgaccggcgagggaggaagaagcgcgaagagccgttagtcatgccggtgtggtggcggcggcggagactgcgggcccgtagctgggctctgcgaggtgcaagaaagcctttgaggtgaaggtgtatgaaagtcatcataacagatgttttccaaaaacttgtagaaggttgtgaaaaaactactaggatcacgcggcatgtattgaggtgtggcatgcagcattttggaaggaaaattgaagacgtgttcaagaaaacatgaacagaagcaaatgatgaaaatgagcattttacttgatgttgataacatcacaataaattatggagaaaaatacatatttggctaacttttaattgctgaacaataaagtgttttcttttaaatcaactctaaatagctccattctcatagtcactagtcagacctgttttgaacatattcgaaagattataatcttgtcaataattagcttatttatgggtggtgattctcattgaggctgacagctggggagacattgcttgtacctctaggttccctgtctggcttccccttcagagcctgctgttgtaccaggtggttgaatcttaaaactctttaataccaaatagcaatcaaattcccccttacagataaaggtttcaccttttttattcagtttgctttcatctttgtgaacaaaaaagtcatcctaatactagtacatgtaataactaagcaatatgctatgttaagagaaatgactgagcagaccagtctgtctaggactaaattggcaagaattctaaagctgaatttatatctgggtga

SEQ ID NO: 415965 - DNA, 947 bp, Homo sapiens
accggaagaggcggggccaccggagtgcctaagagctgtcttccgatgtcgctcttcctttcccgcgcgaccggcgagggaggaagaagcgcgaagagccgttagtcatgccggtgtggtggcggcggcggagactgcgggcccgtagctgggctctgcgaggtgcaagaaagcctttgaggtgaaggtgtatgaaagtcatcataacagatgttttccaaaaacttgtagaaggttgtgaaaaaactactaggatcacgcggcatgtattgagcatataggttgctgtagatgaatgttcttagctgtcatgtttaaaaatacttctgcttcgttacctcaagtgtggcatgcagcattttggaaggaaaattgaagacgtgttcaagaaaacatgaacagaagcaaatgatgaaaatgagcattttacttgatgttgataacatcacaataaattatggagaaaaatacatatttggctaacttttaattgctgaacaataaagtgttttcttttaaatcaactctaaatagctccattctcatagtcactagtcagacctgttttgaacatattcgaaagattataatcttgtcaataattagcttatttatgggtggtgattctcattgaggctgacagctggggagacattgcttgtacctctaggttccctgtctggcttccccttcagagcctgctgttgtaccaggtggttgaatcttaaaactctttaataccaaatagcaatcaaattcccccttacagataaaggtttcaccttttttattcagtttgctttcatctttgtgaacaaaaaagtcatcctaatactagtacatgtaataactaagcaatatgctatgttaagagaaatgactgagcagaccagtctgtctaggactaaattggcaagaattctaaagctgaatttatatctgggtga

SEQ ID NO: 415966 - DNA, 1077 bp, Homo sapiens
  misc_feature (536)..(536): n is a, c, g, or t
  misc_feature (539)..(539): n is a, c, g, or t
accggaagaggcggggccaccggagtgcctaagagctgtcttccgatgtcgctcttcctttcccgcgcgaccggcgagggaggaagaagcgcgaagagccgttagtcatgccggtgtggtggcggcggcggagactgcgggcccgtagctgggctctgcgaggtgcaagaaagcctttgaggtgaaggtgtatgaaagtcatcataacagatgttttccaaaaacttgtagaaggttgtgaaaaaactactaggatcacgcggcatgtattgagcatataggttgctgtagatgaatgttcttagctgtcatgtttaaaaatacttctgcttcgttacctcaagtgtggcatgcagcattttggaaggaaaattgaagacgtgttcaagaaaacatgaacagaagcaaatgatgaaaatgagcattttacttgatgttgataacatcacaataaattatggagaaaaatacatatttggctaacttttaattgctgaacaataaagtgttttcttttaaaaaacaaaaaaaaaaanaanaaacacaaccacaaacacacacaaacaaaaaaaaaccaacaacacacaagaacaacacacacaacgccgcaccgaaaacagacaccagagcagccgacacaagacagcgcggaggcgacagcagcggacaagagcacacacggagagcggcggaagggagagcaggagacaacacacagggactaagaacagaccgagacacagaccagaagaagagacggaagaaagacagacagagagcaaacagaaacaaaaaaaaaaaagatcggaggaaggaaacaagacaccgaagaaagggaagcacgagagcgagaagagagagcaaagaagcacgggggagggcgagctgacacgaaccaagacgaagagcagaccaccaacagagcaagcaaaagaaaaatcaacaagacgtgtccagatgaggtaagccatgaagcagccatcagcaagcagcagagaacgtagcggcaaaaggacacaggcgaggcaagaggagccacgactgagcaggcaggtgagctactgaagacagagaaag

SEQ ID NO: 415967 - DNA, 669 bp, Homo sapiens
  misc_feature (553)..(553): n is a, c, g, or t
  misc_feature (556)..(556): n is a, c, g, or t
  misc_feature (566)..(566): n is a, c, g, or t
  misc_feature (569)..(569): n is a, c, g, or t
accggaagaggcggggccaccggagtgcctaagagctgtcttccgatgtcgctcttcctttcccgcgcgaccggcgagggaggaagaagcgcgaagagccgttagtcatgccggtgtggtggcggcggcggagactgcgggcccgtagctgggctctgcgaggtgcaagaaagcctttgaggtgaaggtgtatgaaagtcatcataacagatgttttccaaaaacttgtagaaggttgtgaaaaaactactaggatcacgcggcatgtattgagcatataggttgctgtagatgaatgttcttagctgtcatgtttaaaaatacttctgcttcgttacctcaagtgtggcatgcagcattttggaaggaaaattgaagacgtgttcaagaaaacatgaacagaagcaaatgatgaaaatgagcattttacttgatgttgataacatcacaataaattatggagaaaaatacatatttggctaacttttaattgctgaacaataaagtgttttcttttaaaaaaaaaaacaaaaaaaaaaaaaaaacacaaaancanacaacacaanaanacaagcaacacgcaagcccaccacacccacaagacgcaccccaacagaagacagaaaccgggccccgacccagagacccacagggggcccacccaccccc

SEQ ID NO: 415968 - DNA, 657 bp, Homo sapiens
  misc_feature (541)..(541): n is a, c, g, or t
  misc_feature (544)..(544): n is a, c, g, or t
  misc_feature (554)..(554): n is a, c, g, or t
  misc_feature (557)..(557): n is a, c, g, or t
accggaagaggcggggccaccggagtgcctaagagctgtcttccgatgtcgctcttcctttcccgcgcgaccggcgagggaggaagaagcgcgaagagccgttagtcatgccggtgtggtggcggcggcggagactgcgggcccgtagctgggctctgcgaggtgcaagaaagcctttgaggtgaaggtgtatgaaagtcatcataacagatgttttccaaaaacttgtagaaggttgtgaaaaaactactaggatcacgcggcatgtattgagcatataggttgctgtagatgaatgttcttagctgtcatgtttaaaaatacttctgcttcgttacctcaagtgtggcatgcagcattttggaaggaaaattgaagacgtgttcaagaaaacatgaacagaagcaaatgatgaaaatgagcattttacttgatgttgataacatcacaataaattatggagaaaaataaaaaaaaaaaaaaaaaaaaaaaaaaaaaaaaaaaaaacaaaaaaaacaaaaaaaaaaaaaaaacacaaaancanacaacacaanaanacaagcaacacgcaagcccaccacacccacaagacgcaccccaacagaagacagaaaccgggccccgacccagagacccacagggggcccacccaccccc

SEQ ID NO: 415969 - DNA, 833 bp, Homo sapiens
  misc_feature (494)..(496): n is a, c, g, or t
  misc_feature (502)..(502): n is a, c, g, or t
  misc_feature (528)..(528): n is a, c, g, or t
  misc_feature (534)..(535): n is a, c, g, or t
  misc_feature (549)..(549): n is a, c, g, or t
  misc_feature (551)..(552): n is a, c, g, or t
  misc_feature (554)..(554): n is a, c, g, or t
  misc_feature (563)..(564): n is a, c, g, or t
accggaagaggcggggccaccggagtgcctaagagctgtcttccgatgtcgctcttcctttcccgcgcgaccggcgagggaggaagaagcgcgaagagccgttagtcatgccggtgtggtggcggcggcggagactgcgggcccgtagctgggctctgcgaggtgcaagaaagcctttgaggtgaaggtgtatgaaagtcatcataacagatgttttccaaaaacttgtagaaggttgtgaaaaaactactaggatcacgcggcatgtattgagcatataggttgctgtagatgaatgttcttagctgtcatgtttaaaaatacttctgcttcgttacctcaagtgtggcatgcagcattttggaaggaaaattgaagacgtgttcaagaaaacatgaacagaagcaaatgatgaaaatgagcattttacttgatgttgataacatcacaataaattatggagaaaaataaaaaaaaaaaaaaaaaccgggggnnncaaggngggggggggaaaagggggtatggaangggccnngggccataagcggntnncnggacccagnntttctggtcacaacagggggtagatctggccgggtcatcccaaataggagagccggattaaaattccgagaaaacgccaggggtgtaacccggggcgtatgagcacgcgggaaaacccaacgagcaaaaacacacacgacagcaaaagaagacacacaaactgggaaccaaagcggcacagcagcaaccacacaagcaacaggcaagaacaagcgagcaaggacaaacaaacagcccagacacaagcagcgacacaggacagacaagaa

SEQ ID NO: 415970 - DNA, 488 bp, Homo sapiens
accggaagaggcggggccaccggagtgcctaagagctgtcttccgatgtcgctcttcctttcccgcgcgaccggcgagggaggaagaagcgcgaagagccgttagtcatgccggtgtggtggcggcggcggagactgcgggcccgtagctgggctctgcgaggtgcaagaaagcctttgaggtgaaggtgtatgaaagtcatcataacagatgttttccaaaaacttgtagaaggttgtgaaaaaactactaggatcacgcggcatgtattgagcatataggttgctgtagatgaatgttcttagctgtcatgtttaaaaatacttctgcttcgttacctcaagtgtggcatgcagcattttggaaggaaaattgaagacgtgttcaagaaaacatgaacagaagcaaatgatgaaaatgagcattttacttgatgttgataacatcacataataggagacacactctgtcagggacctctgagttaa

SEQ ID NO: 415971 - DNA, 958 bp, Homo sapiens
  misc_feature (24)..(24): n is a, c, g, or t
  misc_feature (69)..(69): n is a, c, g, or t
  misc_feature (96)..(96): n is a, c, g, or t
  misc_feature (451)..(452): n is a, c, g, or t
  misc_feature (456)..(456): n is a, c, g, or t
  misc_feature (460)..(460): n is a, c, g, or t
  misc_feature (464)..(464): n is a, c, g, or t
  misc_feature (466)..(466): n is a, c, g, or t
  misc_feature (470)..(470): n is a, c, g, or t
  misc_feature (920)..(920): n is a, c, g, or t
caaaggaattaaaatcaaggtccnggcaacatgagccaaaaccctttttccctgggccttaagaaagancagatttctcgtgccgaattcggcacnaggaggaagaagcgcgaagagccgttagtcatgccggtgtggtggcggcggcggagactgcgggcccgtagctgggctctgcgagcatataggttgctgtagatgaatgttcttagctgtcatgtttaaaaatacttctgcttcgttacctcaagtgtggcatgcagcattttggaaggaaaattgaagacgtgttcaagaaaacatgaacagaagcaaatgatgaaaatgagcattttacttgatgttgataacatcacaataaattatggagaaaaatacatatttggctaacttttaattgctgaacaataaagtgttttcttttaaaaaaaaaaacaaaaaaaaaaactcnngagnaatnagtntnctcntctcctctctctttcttcctctcttttaagaaattgtgggtctatagagaggggtttgggggttttttaaaggggaaagggcccctctctttcattgtattgttgtggtgtggcccaatggattagatgggtgctccccctggtgcaaaattttatggggtagtttctgggggggtctttgatcgccagttcgtaacgctggggggtatgacgcggtttgggggccacgcctggggcgcatatccgggatgggcgccgaggaatggctggttcccttcccggtccccaaggggcgtgggcgacacggtgttgtcaggacgggggactctatcaatcggggagtttccaattttaacctcccgtggaacctaaaaagctttaaaaggcccatatgggtccgcctcgaaccaaaccggggggctttggagcgctgaagcagcaaggggggtnctcgcggagggaggaacaagggtctccgccgggaaaag

SEQ ID NO: 415972 - DNA, 715 bp, Homo sapiens
gtgtggtattctcaacattagttttttgaggggcacttgtgaatattgaggttatatgagaactttgagtatggaatgattttcactgtggtttctgactttgttttggaggtgtggcatgcagcattttggaaggaaaattgaagacgtgttcaagaaaacatgaacagaagcaaatgatgaaaatgagcattttacttgatgttgataacatcacaataaattatggagaaaaatacatatttggctaacttttaattgctgaacaataaagtgttttcttttaaatcaactctaaatagctccattctcatagtcactagtcagacctgttttgaacatattcgaaagattataatcttgtcaataattagcttatttatgggtggtgattctcattgaggctgacagctggggagacattgcttgtacctctaggttccctgtctggcttccccttcagagcctgctgttgtaccaggtggttgaatcttaaaactctttaataccaaatagcaatcaaattcccccttacagataaaggtttcaccttttttattcagtttgctttcatctttgtgaacaaaaaagtcatcctaatactagtacatgtaataactaagcaatatgctatgttaagagaaatgactgagcagaccagtctgtctaggactaaattggcaagaattctaaagctgaatttatatctgggtga

SEQ ID NO: 415973 - DNA, 733 bp, Homo sapiens
gctgaggtatggtggcctgcatgtattgttagcggttaggcgtacggccaggtcttgtgaatattgaggttatatgagaactttgagtatggaatgattttcactgtggtttctgactttgttttggaggtgtggcatgcagcattttggaaggaaaattgaagacgtgttcaagaaaacatgaacagaagcaaatgatgaaaatgagcattttacttgatgttgataacatcacaataaattatggagaaaaatacatatttggctaacttttaattgctgaacaataaagtgttttcttttaaatcaactctaaatagctccattctcatagtcactagtcagacctgttttgaacatattcgaaagattataatcttgtcaataattagcttatttatgggtggtgattctcattgaggctgacagctggggagacattgcttgtacctctaggttccctgtctggcttccccttcagagcctgctgttgtaccaggtggttgaatcttaaaactctttaataccaaatagcaatcaaattcccccttacagataaaggtttcaccttttttattcagtttgctttcatctttgtgaacaaaaaagtcatcctaatactagtacatgtaataactaagcaatatgctatgttaagagaaatgactgagcagaccagtctgtctaggactaaattggcaagaattctaaagctgaatttatatctgggtga

SEQ ID NO: 415974 - DNA, 401 bp, Homo sapiens
tttaatagctggcacaatgatgacttaaattactttttgccgtttacccagctgaggttgtctttgaagaaataattttaagactgagatgccagtactgtacattgattaattactgacatgtatgtaaggcaataatttaattaagggtgaatattctttgtttttagcatataggttgctgtagatgaatgttcttagctgtcatgtttaaaaatacttctgcttcgttacctcaagtaagtgatttgtcaagcaactatgtctgctgacagttcagaaagtatctgataaacttaagggtgggggcagattcttgttgaagttgcttttgcatgtgtggtattctcaacattagttttttgaggggcacttgtgaatattgaggttatatgagaact

SEQ ID NO: 415975 - DNA, 966 bp, Homo sapiens
  misc_feature (24)..(24): n is a, c, g, or t
  misc_feature (69)..(69): n is a, c, g, or t
  misc_feature (96)..(96): n is a, c, g, or t
caaaggaattaaaatcaaggtccnggcaacatgagccaaaaccctttttccctgggccttaagaaagancagatttctcgtgccgaattcggcacnaggaggaagaagcgcgaagagccgttagtcatgccggtgtggtggcggcggcggagactgcgggcccgtagctgggctctgcgaggtgcaagaaagcctttgaggtgaaggtgtatgaaagtcatcataacagatgttttccaaaaacttgtagaaggttgtgaaaaaactactaggatcacgcggcatgtattgagcatataggttgctgtagatgaatgttcttagctgtcatgtttaaaaatacttctgcttcgttacctcaagtgtggcatgcagcattttggaaggaaaattgaagacgtgttcaagaaaacatgaacagaagcaaatgatgaaaatgagcattttacttgatgttgataacatcacaataaattatggagaaaaatacatatttggctaacttttaattgctgaacaataaagtgttttcttttaaatcaactctaaatagctccattctcatagtcactagtcagacctgttttgaacatattcgaaagattataatcttgtcaataattagcttatttatgggtggtgattctcattgaggctgacagctggggagacattgcttgtacctctaggttccctgtctggcttccccttcagagcctgctgttgtaccaggtggttgaatcttaaaactctttaataccaaatagcaatcaaattcccccttacagataaaggtttcaccttttttattcagtttgctttcatctttgtgaacaaaaaagtcatcctaatactagtacatgtaataactaagcaatatgctatgttaagagaaatgactgagcagaccagtctgtctaggactaaattggcaagaattctaaagctgaatttatatctgggtga

SEQ ID NO: 415976 - DNA, 584 bp, Homo sapiens
agcgcgaagagccgttagtcatgccggtgtggtggcggcggcggagactgcgggcccgtagctgggctctgcgaggtgagagtgatcgcggtcttaggtccaactcctctacgtgccgggttcctccgccatatgggtgcccagcgcggcccctgtcccttccccgggcgcagcggagcgggcggctgctgcgtaggccaaaaggctacgctcccggtgcccccaaggcccacgagctttccccacaagccatttgcgcagtcgcgttttgtgagtaaccacctggaaggcttagctgacctttctccgtcaacaccggttcgctgtcctctgctcagaaactgggcaagggccttctgacttaaggaggtgcctgcaagggaccgtcgggaggcttcgtgctccacccggtcttggccagatctctcttgtgtccccagcaaagttgtgcgtgcggccttggcggtttcaggctcttaggcagcttgttttccttaaaagggagcgttttataaataggaaggtgattatcccttaggtgtcaggacgacccttagttaaccgtactttgtgagtggctttga

SEQ ID NO: 415977 - DNA, 1118 bp, Homo sapiens
caccattaaatttatattaacatgtaaaaatgtttggagtttagggctctttacccatatcttagtgacataggaagaaaattaagataaatcacaagcaactagaaaatagacatgttaactttattttagtacatactctggtaggatttttacataatcttacgtactagtcagccttcttagaagtgtcacatagtcaatatccttaaagagaaatggaagctaatcaggtaagtaaattgtgagctgaggcctacatcatgcttgctattcaaagagaataaagtaattggataaatgataatgcctccttgttgggaaaacagtcttcaaaaatggcactaagttacagttctaatgcaatagagtcactaattactatgaatacttgttttacttggcagattactaacaaagttaattggatacaataaatgtaaagattttcttttaaaacgacagattcttcagtgaggtgtaaacattttatagaacaattatcaaagctatattggacttaaatattggtcatgaatgtatgcacaccccataggtagctgccctccttgggcagcttttgactcctatgccaaattttaaaataaaggccgtggccaggcgtggtggctcatgcctgtaatcccaacacttcaggagtccaaagcgggcggatcgcgaggtcaggagatcgagaccgtcctggctaacacggtgaaaccctgtctctactaaaaatacaaaaaaaaaaaattagccgggcgtggttgcaggcgcctgtagttccagctcctttgggaggctgaggcaggagaaggatctgaacccgggaggcagaccttgcagtgagccaagatcgcgccactgcactccagcctgggcaagagcgagactccatctcaaaaaaataaaataaaggccatatgtttaatcacattccccaaaaggagaacttcataaggcactaatgagtaatgtttattttacgaatgattttacgggaaaaattacagaggatgtttaaattgcaaaaatactcctccccttttttctcctccaccgccccccaaaaaaaatcctttgcagttatcacctaagctttttgggtgtgtgattta

SEQ ID NO: 415978 - DNA, 1046 bp, Homo sapiens
caccattaaatttatattaacatgtaaaaatgtttggagtttagggctctttacccatatcttagtgacataggaagaaaattaagataaatcacaagcaactagaaaatagacatgttaactttattttagtacatactctggtaggatttttacataatcttacgtactagtcagccttcttagaagtgtcacatagtcaatatccttaaagagaaatggaagctaatcaggtaagtaaattgtgagctgaggcctacatcatgcttgctattcaaagagaataaagtaattggataaatgataatgcctccttgttgggaaaacagtcttcaaaaatggcactaagttacagttctaatgcaatagagtcactaattactatgaatacttgttttacttggcagattactaacaaagttaattggatacaataaatgtaaagattttcttttaaaacgacagattcttcagtgaggtgtaaacattttatagaacaattatcaaagctatattggacttaaatattggtcatgaatgtatgcacaccccataggtagctgccctccttgggcagcttttgactcctatgccaaattttaaaataaaggccgtggccaggcgtggtggctcatgcctgtaatcccaacacttcaggagtccaaagcgggcggatcgcgaggtcaggagatcgagaccgtcctggctaacacggtgaaaccctgtctctactaaaaatacaaaaaaaaaaaattagccgggcgtggttgcaggcgcctgtagttccagctcctttgggaggctgaggcaggagaaggatctgaacccgggaggcagaccttgcagtgagccaagatcgcgccactgcactccagcctgggcaagagcgagactccatctcaaaaaaaaaaggaacgtatccttaatgagagcctcctctagctggccaactatagagggcccagtcccaatatgcttttctcagggtcccaggttggtggcttcactgggcatctagcaagtctcgggcacagtcccttggtatg

SEQ ID NO: 415979 - DNA, 600 bp, Homo sapiens
gccgcccggctgcggggagcggcctggggcaggactgggagctgggtgtggtcccggggcactctggagtcagccattagagctgccctcggaacggccttgcacaaacgcctaagacctgtaaggtccctcactgctgagccggacgggaggtccccgcgcctccccacgtttgtgtgaggctgatggcgcgtcggagtccccggcgctccgcccagtcggcccagactgcagctcccggctgagatgtgtctttgccgccctcttctcccccagagggcccagtatcaagacaagctggcccggcagcgctacgaggaccaactgaagcagcaggtgagctcagcctcccctgcgaggcgcctgcgtccctgagaacgtaggtggctttgtgggaccagtcagtgggtcagaggccacggggcaagaacgatggggttgctgacggtgggtgctagagcaggggaaactactcggacagacacgcaccagcacacgtgtacaggcacacatgcagatgtgtgcacacatgtacacggagacacaggcacctgcccacacagacacacactcctcgcacacacactcccggcagacagg

SEQ ID NO: 415980 - DNA, 534 bp, Homo sapiens
cccctcactcttcttgtccagaaactcgccctgcactcaggcatggactacgccatcatgacaggcggggacgtggcccccatggggcgggaaggcgtgaccgccatgcacaagctctttgactgggccaataccagccggcgcggcctcctgctcttcatggatgaagcagacgccttccttcggaagcgagccactgaggagataagcaaggacctcagagccacactgaacgccttcctgtaccacatgggccaacacagcaacaagtgagggagcccctcgggtcctgagcccccgggcagggctgtgcagccgtcgcccttggttcccactgagggtccctggctcacagtgctgggcaccagctgtggcctcagtgtgcccacctcagatgtcccctgggaacggcccagctcgggacagcacggggtgtcattgaggaacatgcaggggcctcccgggcagagctggggtcagtcctgtcttcacggccctgtgcgccgccgccccagcttgcaggtccctctgccc

SEQ ID NO: 415981 - DNA, 460 bp, Homo sapiens
ccgcggccggacgctgctgtgggctgctcctggcgtcactctcgccttgcttggcctctctctcgttcacagcctcctgctcttcatggatgaagcagacgccttccttcggaagcgagccactgaggagataagcaaggacctcagagccacactgaacgccttcctgtaccacatgggccaacacagcaacaagtgagggagcccctcgggtcctgagcccccgggcagggctgtgcagccgtcgcccttggttcccactgagggtccctggctcacagtgctgggcaccagctgtggcctcagtgtgcccacctcagatgtcccctgggaacggcccagctcgggacagcacggggtgtcattgaggaacatgcaggggcctcccgggcagagctggggtcagtcctgtcttcacggccctgtgcgccgccgccccagcttgcaggtccctctgccc

SEQ ID NO: 415982 - DNA, 4726 bp, Homo sapiens
  misc_feature (4654)..(4654): n is a, c, g, or t
  misc_feature (4692)..(4692): n is a, c, g, or t
gtgggtgcagggggagaggggtcttcacagctgcaggggaggctcctccacagccaccctccccccaacacgcctgcaggtgggcgtgggcactggttgccttttctagaaccatttgaaagttagctgaagacagcatggcacactcccttcaataggtcccacagtgaccccgcgcaggcacagcccgggcacccttgtggcctcggctgtcctcgttggaaccacgcctggctaatgttgtattttagtagagacggggtttctccatgttggtcaggctggtctctaactcccgacctcaggtgatccacccgcctcggcctctcaaactgctgggattacaggcacgcgccaccacgcctggcctattttattttattttgagacagagtgtcactctgtcccccagtctggcgtgcaatggtttgatctcggctcactgcaacctccacctcccgggttcaacctcctgcctcaggccttccgagcagctgggactacaggagcctgccaccacatctggcgaatttttgtatttttagtagagaagggggttcagcatgttgtccaggttggtcttgaactcctgacctcaggtgatccagccactttggcctcacaaagtgctgggattataggcaagagcgatggcgcccggcccactcagcaggattcctagaatgggcacgagctctgccctcatcacagtccaaaagtgagcacctgcctggagctgcccagaaacagccttgtggggtggggttggtgtctgacctccctccccgggggccttcgcaggcttctctgctggtgcttctgtgcctgtgggtctggattcctccagggcctgatcctgggtgcagatgcagctggaagccctgaacctgctgcacacactagtctgggcacggagtctctgccgtgccggagctgtgcagacacaggagcggctgtcaggcagtgccagccctgagcaagtgccagctggtgagtgctgtgctctgcaggagtatgaggccgccgtggagcagctcaagagcgagcagatccgggcgcaggctgaggagaggaggaagaccctgagcgaggagacccggcagcaccaggccagggcccagtatcaagacaagctggcccggcagcgctacgaggaccaactgaagcagcagcaacttctcaatgaggagaatttacggaagcaggaggagtccgtgcagaagcaggaagccatgcggcgagccaccgtggagcgggagatggagctgcggcacaagaatgagatgctgcgagtggagaccgaggcccgggcgcgcgccaaggccgagcgggagaatgcagacatcatccgcgagcagatccgcctgaaggcgtccgagcaccgtcagaccgtcttggagtccatcaggacggctggcaccttgtttggggaaggattccgtgcctttgtgacagaccgggacaaagtgacagccacggtggctgggctgacgctgctggctgtcggggtctactcagccaagaatgcgacagccgtcactggccgcttcatcgaggctcggctggggaagccgtccctagtgagggagacgtcccgcatcacggtgctggaggcgctgcggcaccccatccaggtcagccggcggctcctcagtcgaccccaggacgtgctggagggtgttgtgcttagtcccagcctggaagcacgggtgcgcgacatcgccatagcaaccaggaacaccaagaagaaccggggcctgtacaggcacatcctgctgtatgggccaccaggcaccgggaagacgctgtttgccaagaaactcgccctgcactcaggcatggactacgccatcatgacaggcggggacgtggcccccatggggcgggaaggcgtgaccgccatgcacaagctctttgactgggccaataccagccggcgcggcctcctgctcttcatggatgaagcagacgccttccttcggaagcgagccactgaggagataagcaaggacctcagagccacactgaacgccttcctgtaccacatgggccaacacagcaacaaattcatgctggtcctggccagcaatctgcctgagcagttcgactgtgccatcaacagccgcattgacgtgatggtccacttcgacctgccgcagcaggaggagcgggagcgcctggtgagactgcattttgacaactgtgttcttaagccggccacagaaggaaaacggcgcctgaagctggcccagtttgactacgggaggaagtgctcggaggtcgctcggctgacggagggcatgtcgggccgggagatcgctcagctggccgtgtcctggcaggccacggcatatgcctccaaggacggggtcctcactgaggccatgatggacgcctgtgtgcaagatgctgtccagcagtaccgacagaagatgcgctggctgaaggcggaggggcctgggcgcggggtcgagcaccccctatccggagtccaaggcgagaccctcacctcatggagcctggccacggacccctcctacccctgccttgccggcccctgcacatttaggatatgctcctggatggggactgggctgtgcccagggcctctgtcccccaggatgtcttgtggtggcggtcggccgttctgccccccagggcaccccctgttgtaggcactggctagggaggggcaggcctccttcctgcccctcgagacactcttgggagatgcattttccgtctggctcacagggggagggtgaggctttgtaccccagcccctgcccaggccactgtgagggtgggtgctggctgagcccctggggcagaaggagtggggcaggcggggtctttgttctcggctcccacagcagagccaggtgagggggggcctgccaggactagacagaagtggggcggcctgaaccctgcttccagccatggccaggggccacggaacccggcaggggtgtctgaggccgccctgtcagctggccggtccaagcctgtggctggagctggtgtgtgtttatctaataaagtcccacaggtgcctcaccgccgtgtctctctattgactgacactgctcggggtttcaggggcgccctagcgtcctcctggggtcaaaggtgacataagaggcagaggctggagctttctagaatttactgatcacagagcggtgtgcttcacatcagcctcgcgccacatccgagttggggtctgaatgctgcccgggactgccgcctgcgccccaccagcccctccctcctgaaggaggggcaccccgagaagaatgaggctgcagagtgatgtgggggccagcggtgacttcatgaccacactgcgcccaggtgtaagagggcacgcttctgcccaggcatcgtccatggaagacacgcagtcggccactgcagcctcggtcctgggtgccctggggctgggtcactgggggccacaggccacactgggagaccacagtcctggcatgccatgcagctccctgtccccagaggtctgctcagatgcagagagctcaggaaccacactcgctgcctgaattctgggagcagagcgtggtacccactgcctggctggggcctactctgggactgcagcccctgtccccgctggcccaggcttccggaggcagctgcgtccctgtcttggctcaaggtcaggccggaggccaggctgtccacctgcatctggaacctgcacagtcactcctccaggtcctcgctgctggaggactctcagacaggaaacctttgctttgggggcagggtggggtgcaggggtggttgggggaatcacagcaacgagacagcacagtgccatggcgcagagcctcatattggtcgatgaaacaatgctttctgaactttgtgtccttaggaagggtgtaggctgttggttgaagtaggaaacagaagaggagcctgggcacgcaacggtcccatcggagagcagacccctcggagctgcagtgcttggaggggggcggtctacctctgctcgctctctccatttctctctctacctctgctcgctctctccatttctctctttttccttttagagatgggttcttactctgagcccaggctggagtgcagtggtgtgattatagctcactgcagcctcgacctcccaggctcaagtgatcctcctgcctcagcctgtccagtagccataccctactaggccctaattagccccagaggcgtgcaccaccacgcccgctaatgctaaaaatttgttgtagagaccgagtcttgctataatgcccaggctggtctccaactcttggcctcaggagatcctcccgcctctacaggatgagccaccaagcctggcctcaattcctctttaaaggaattgcctaaatcttaaaccagcaatcaatactttgtatttaaaattaagccaggttagactgggctaggtggctcacgcctgtaatcccagcactttgggaggccaaggcgggtgaatcatgaggtcaggagtttgagaccatcctggctaacgtggcaaaaccccgtctctactaaaaatacaaaaaaattagccggcatggtggtaggtgactgtaatcccagctactcgggaggctgaggcaggagactcgcttggacctgggagggngaggttgcagtgagccgagatcacgccactgcactccngcctgggcagcatggcaagaacctgtcgctcttt

SEQ ID NO: 415983 - DNA, 2483 bp, Homo sapiens
ggctcataaggaaaggttaaaacacagaaatgaaaactcgaaatagttctttctccaccggctcgcggcgcgtggaggctgctcccagccgcgcgcgagtcagactcgggtgggggtcccggcggcggtagcggcggcggcggtgcgagcatgtcgtggctcttcggcattaacaagggccccaagggtgaaggcgcggggccgccgccgcctttgccgcccgcgcagcccggggccgagggcggcggggaccgcggcttgggagaccggccggcgcccaaggacaaatggagcaacttcgaccccaccggcctggagcgcgccgccaaggcggcgcgcgagctggagcactcgcgttatgccaaggacgccctgaatctggcacagatgcaggagcagacgctgcagttggagcaacagtccaagctcaaagagtatgaggccgccgtggagcagctcaagagcgagcagatccgggcgcaggctgaggagaggaggaagaccctgagcgaggagacccggcagcaccaggccagggcccagtatcaagacaagctggcccggcagcgctacgaggaccaactgaagcagcagcaacttctcaatgaggagaatttacggaagcaggaggagtccgtgcagaagcaggaagccatgcggcgagccaccgtggagcgggagatggagctgcggcacaagaatgagatgctgcgagtggagaccgaggcccgggcgcgcgccaaggccgagcgggagaatgcagacatcatccgcgagcagatccgcctgaaggcgtccgagcaccgtcagaccgtcttggagtccatcaggacggctggcaccttgtttggggaaggattccgtgcctttgtgacagaccgggacaaagtgacagccacggtggctgggctgacgctgctggctgtcggggtctactcagccaagaatgcgacagccgtcactggccgcttcatcgaggctcggctggggaagccgtccctagtgagggagacgtcccgcatcacggtgctggaggcgctgcggcaccccatccaggtcagccggcggctcctcagtcgaccccaggacgtgctggagggtgttgtgcttagtcccagcctggaagcacgggtgcgcgacatcgccatagcaaccaggaacaccaagaagaaccggggcctgtacaggcacatcctgctgtatgggccaccaggcaccgggaagacgctgtttgccaagaaactcgccctgcactcaggcatggactacgccatcatgacaggcggggacgtggcccccatggggcgggaaggcgtgaccgccatgcacaagctctttgactgggccaataccagccggcgcggcctcctgctcttcatggatgaagcagacgccttccttcggaagcgagccactgaggagataagcaaggacctcagagccacactgaacgccttcctgtaccacatgggccaacacagcaacaaattcatgctggtcctggccagcaatctgcctgagcagttcgactgtgccatcaacagccgcattgacgtgatggtccacttcgacctgccgcagcaggaggagcgggagcgcctggtgagactgcattttgacaactgtgttcttaagccggccacagaaggaaaacggcgcctgaagctggcccagtttgactacgggaggaagtgctcggaggtcgctcggctgacggagggcatgtcgggccgggagatcgctcagctggccgtgtcctggcaggccacggcatatgcctccaaggacggggtcctcactgaggccatgatggacgcctgtgtgcaagatgctgtccagcagtaccgacagaagatgcgctggctgaaggcggaggggcctgggcgcggggtcgagcaccccctatccggagtccaaggcgagaccctcacctcatggagcctggccacggacccctcctacccctgccttgccggcccctgcacatttaggatatgctcctggatggggactgggctgtgcccagggcctctgtcccccaggatgtcttgtggtggcggtcggccgttctgccccccagggcaccccctgttgtaggcactggctagggaggggcaggcctccttcctgcccctcgagacactcttgggagatgcattttccgtctggctcacagggggagggtgaggctttgtaccccagcccctgcccaggccactgtgagggtgggtgctggctgagcccctggggcagaaggagtggggcaggcggggtctttgttctcggctcccacagcagagccaggtgagggggggcctgccaggactagacagaagtggggcggcctgaaccctgcttccagccatggccaggggccacggaacccggcaggggtgtctgaggccgccctgtcagctggccggtccaagcctgtggctggagctggtgtgtgtttatctaataaagtcccacaggtgcctcac

SEQ ID NO: 415984 - DNA, 1645 bp, Homo sapiens
gggtgaccggccctatgtccaggctccctcttccctcccaaatcccttaattttgagttttcttggtctcctgggcccctccagccccagtcacgtgtcacacggaggatcaagtcctgctggtcggccgtggctgactcttcaggcacgttgggctcctgggtcagctgctgccgttcgacgctccctggagccctgactcaggtccttcccagagaggcaaggctggggccctgctgagcctctgctgaacccgggcccccgaggtcctgcttctggctcgcatggccataatcttgacagggactctgggtcccgcatccctgctcccagcacagcggggctcaggtagcaggagggagtggtgttcccggcactgcctatcaggctgggcgagggtcagcggggaagtaccacacagggcaagaacagaggcccgagaagccgggcggggggcagctgggcgtggtggggcaggcaggcgggtgaccagggctgtggctgcgttctccccgtgtttcctgtgctcacaagctgccgctttagattctcccaaaaagtctccccgagggggctgaggagcccccgttgccctcggggcatctcagctggcagccccagcgtttccttccccatccctgtcctacagattcatgctggtcctggccagcaatctgcctgagcagttcgactgtgccatcaacagccgcattgacgtgatggtccacttcgacctgccgcagcaggaggagcgggagcgcctggtgagactgcattttgacaactgtgttcttaagccggccacagaaggaaaacggcgcctgaagctggcccagtttgactacgggaggaagtgctcggaggtcgctcggctgacggagggcatgtcgggccgggagatcgctcagctggccgtgtcctggcaggccacggcatatgcctccaaggacggggtcctcactgaggccatgatggacgcctgtgtgcaagatgctgtccagcagtaccgacagaagatgcgctggctgaaggcggaggggcctgggcgcggggtcgagcaccccctatccggagtccaaggcgagaccctcacctcatggagcctggccacggacccctcctacccctgccttgccggcccctgcacatttaggatatgctcctggatggggactgggctgtgcccagggcctctgtcccccaggatgtcttgtggtggcggtcggccgttctgccccccagggcaccccctgttgtaggcactggctagggaggggcaggcctccttcctgcccctcgagacactcttgggagatgcattttccgtctggctcacagggggagggtgaggctttgtaccccagcccctgcccaggccactgtgagggtgggtgctggctgagcccctggggcagaaggagtggggcaggcggggtctttgttctcggctcccacagcagagccaggtgagggggggcctgccaggactagacagaagtggggcggcctgaaccctgcttccagccatggccaggggccacggaacccggcaggggtgtctgaggccgccctgtcagctggccggtccaagcctgtggctggagctggtgtgtgtttatctaataaagtcccacaggtgcctcac

SEQ ID NO: 415985 - DNA, 1547 bp, Homo sapiens
ggagcttttgggtcctgagatgcaactgcttggactgtgccggggatagataggctgcccacgagctgggcggcttcctgaggagcagagtccgcacccgggcattcccgcagcccctgtcaccgaggcttccgtgggtgcagagtgtctcccccaaacccccgtcttccccggcagcccagcctggaagcacgggtgcgcgacatcgccatagcaaccaggaacaccaagaagaaccggggcctgtacaggcacatcctgctgtatgggccaccaggcaccgggaagacgctgtttgccaagaaactcgccctgcactcaggcatggactacgccatcatgacaggcggggacgtggcccccatggggcgggaaggcgtgaccgccatgcacaagctctttgactgggccaataccagccggcgcggcctcctgctcttcatggatgaagcagacgccttccttcggaagcgagccactgaggagataagcaaggacctcagagccacactgaacgccttcctgtaccacatgggccaacacagcaacaaattcatgctggtcctggccagcaatctgcctgagcagttcgactgtgccatcaacagccgcattgacgtgatggtccacttcgacctgccgcagcaggaggagcgggagcgcctggtgagactgcattttgacaactgtgttcttaagccggccacagaaggaaaacggcgcctgaagctggcccagtttgactacgggaggaagtgctcggaggtcgctcggctgacggagggcatgtcgggccgggagatcgctcagctggccgtgtcctggcaggccacggcatatgcctccaaggacggggtcctcactgaggccatgatggacgcctgtgtgcaagatgctgtccagcagtaccgacagaagatgcgctggctgaaggcggaggggcctgggcgcggggtcgagcaccccctatccggagtccaaggcgagaccctcacctcatggagcctggccacggacccctcctacccctgccttgccggcccctgcacatttaggatatgctcctggatggggactgggctgtgcccagggcctctgtcccccaggatgtcttgtggtggcggtcggccgttctgccccccagggcaccccctgttgtaggcactggctagggaggggcaggcctccttcctgcccctcgagacactcttgggagatgcattttccgtctggctcacagggggagggtgaggctttgtaccccagcccctgcccaggccactgtgagggtgggtgctggctgagcccctggggcagaaggagtggggcaggcggggtctttgttctcggctcccacagcagagccaggtgagggggggcctgccaggactagacagaagtggggcggcctgaaccctgcttccagccatggccaggggccacggaacccggcaggggtgtctgaggccgccctgtcagctggccggtccaagcctgtggctggagctggtgtgtgtttatctaataaagtcccacaggtgcctcac

SEQ ID NO: 415986 - DNA, 2358 bp, Homo sapiens
ggctcataaggaaaggttaaaacacagaaatgaaaactcgaaatagttctttctccaccggctcgcggcgcgtggaggctgctcccagccgcgcgcgagtcagactcgggtgggggtcccggcggcggtagcggcggcggcggtgcgagcatgtcgtggctcttcggcattaacaagggccccaagggtgaaggcgcggggccgccgccgcctttgccgcccgcgcagcccggggccgagggcggcggggaccgcggcttgggagaccggccggcgcccaaggacaaatggagcaacttcgaccccaccggcctggagcgcgccgccaaggcggcgcgcgagctggagcactcgcgttatgccaaggacgccctgaatctggcacagatgcaggagcagacgctgcagttggagcaacagtccaagctcaaagagtatgaggccgccgtggagcagctcaagagcgagcagatccgggcgcaggctgaggagaggaggaagaccctgagcgaggagacccggcagcaccaggccagggcccagtatcaagacaagctggcccggcagcgctacgaggaccaactgaagcagcagcaacttctcaatgaggagaatttacggaagcaggaggagtccgtgcagaagcaggaagccatgcggcgagccaccgtggagcgggagatggagctgcggcacaagaatgagatgctgcgagtggagaccgaggcccgggcgcgcgccaaggccgagcgggagaatgcagacatcatccgcgagcagatccgcctgaaggcgtccgagcaccgtcagaccgtcttggagtccatcaggacggctggcaccttgtttggggaaggattccgtgcctttgtgacagaccgggacaaagtgacagccacggtggctgggctgacgctgctggctgtcggggtctactcagccaagaatgcgacagccgtcactggccgcttcatcgaggctcggctggggaagccgtccctagtgagggagacgtcccgcatcacggtgctggaggcgctgcggcaccccatccaggtcagccggcggctcctcagtcgaccccaggacgtgctggagggtgttgtgcttagtcccagcctggaagcacgggtgcgcgacatcgccatagcaaccaggaacaccaagaagaaccggggcctgtacaggcacatcctgctgtatgggccaccaggcaccgggaagacgctgtttgccaagaaactcgccctgcactcaggcatggactacgccatcatgacaggcggggacgtggcccccatggggcgggaaggcgtgaccgccatgcacaagctctttgactgggccaataccagccggcgcggcctcctgctcttcatggatgaagcagacgccttccttcggaagcgagccactgaggagataagcaaggacctcagagccacactgaacgccttcctgtaccacatgggccaacacagcaacaaattcatgctggtcctggccagcaatctgcctgagcagttcgactgtgccatcaacagccgcattggactacgggaggaagtgctcggaggtcgctcggctgacggagggcatgtcgggccgggagatcgctcagctggccgtgtcctggcaggccacggcatatgcctccaaggacggggtcctcactgaggccatgatggacgcctgtgtgcaagatgctgtccagcagtaccgacagaagatgcgctggctgaaggcggaggggcctgggcgcggggtcgagcaccccctatccggagtccaaggcgagaccctcacctcatggagcctggccacggacccctcctacccctgccttgccggcccctgcacatttaggatatgctcctggatggggactgggctgtgcccagggcctctgtcccccaggatgtcttgtggtggcggtcggccgttctgccccccagggcaccccctgttgtaggcactggctagggaggggcaggcctccttcctgcccctcgagacactcttgggagatgcattttccgtctggctcacagggggagggtgaggctttgtaccccagcccctgcccaggccactgtgagggtgggtgctggctgagcccctggggcagaaggagtggggcaggcggggtctttgttctcggctcccacagcagagccaggtgagggggggcctgccaggactagacagaagtggggcggcctgaaccctgcttccagccatggccaggggccacggaacccggcaggggtgtctgaggccgccctgtcagctggccggtccaagcctgtggctggagctggtgtgtgtttatctaataaagtcccacaggtgcctcac

SEQ ID NO: 415987 - DNA, 2507 bp, Homo sapiens
ggctcataaggaaaggttaaaacacagaaatgaaaactcgaaatagttctttctccaccggctcgcggcgcgtggaggctgctcccagccgcgcgcgagtcagactcgggtgggggtcccggcggcggtagcggcggcggcggtgcgagcatgtcgtggctcttcggcattaacaagggccccaagggtgaaggcgcggggccgccgccgcctttgccgcccgcgcagcccggggccgagggcggcggggaccgcggcttgggagaccggccggcgcccaaggacaaatggagcaacttcgaccccaccggcctggagcgcgccgccaaggcggcgcgcgagctggagcactcgcgttatgccaaggacgccctgaatctggcacagatgcaggagcagacgctgcagttggagcaacagtccaagctcaaagagtatgaggccgccgtggagcagctcaagagcgagcagatccgggcgcaggctgaggagaggaggaagaccctgagcgaggagacccggcagcaccaggccagggcccagtatcaagacaagctggcccggcagcgctacgaggaccaactgaagcagcagcaacttctcaatgaggagaatttacggaagcaggaggagtccgtgcagaagcaggaagccatgcggcgagccaccgtggagcgggagatggagctgcggcacaagaatgagatgctgcgagtggagaccgaggcccgggcgcgcgccaaggccgagcgggagaatgcagacatcatccgcgagcagatccgcctgaaggcgtccgagcaccgtcagaccgtcttggagtccatcaggacggctggcaccttgtttggggaaggattccgtgcctttgtgacagaccgggacaaagtgacagccacggtggctgggctgacgctgctggctgtcggggtctactcagccaagaatgcgacagccgtcactggccgcttcatcgaggctcggctggggaagccgtccctagtgagggagacgtcccgcatcacggtgctggaggcgctgcggcaccccatccaggtcagccggcggctcctcagtcgaccccaggacgtgctggagggtgttgtgcttagtcccagcctggaagcacgggtgcgcgacatcgccatagcaaccaggaacaccaagaagaaccggggcctgtacaggcacatcctgctgtatgggccaccaggcaccgggaagacgctgtttgccaagaaactcgccctgcactcaggcatggactacgccatcatgacaggcggggacgtggcccccatggggcgggaaggcgtgaccgccatgcacaagctctttgactgggccaataccagccggcgcggcctcctgctcttcatggatgaagcagacgccttccttcggaagcgagccactgaggagataagcaaggacctcagagccacactgaacgccttcctgtaccacatgggccaacacagcaacaaattcatgctggtcctggccagcaatctgcctgagcagttcgactgtgccatcaacagccgcattgacgtgatggtccacttcgacctgccgcagcaggaggagcgggagcgcctggtgagactgcattttgacaactgtgttcttaagccggccacagaaggaaaacggcgcctgaagctggcccagtttgactacgggaggaagtgctcggaggtcgctcggctgacggagggcatgtcgggccgggagatcgctcagctggccgtgtcctggcaggccacggcatatgcctccaaggacggggtcctcactgaggccatgatggacgcctgtgtgcaagatgctgtccagcagtaccgacagaagatgcgctggctgaaggcggaggggcctgggcgcggggtcgagcaccccctatccggagtccaaggcgagaccctcacctcatggagcctggccacggacccctcctacccctgccttgccggcccctgcacatttaggatatgctcctggatggggactgggctgtgcccagggcctctgtcccccaggatgtcttgtggtggcggtcggccgttctgccccccagggcaccccctgttgtaggcactggctagggaggggcaggcctccttcctgcccctcgagacactcttgggagatgcattttccgtctggctcacagggggagggtgaggctttgtaccccagcccctgcccaggccactgtgagggtgggtgctggctgagcccctggggcagaaggagtggggcaggcggggtctttgttctcggctcccacagcagagccaggtgagggggggcctgccaggactagacagaagtggggcggcctgaaccctgcttccagccatggccaggggccacggaacccggcaggggtgtctgaggccgccctgtcagctggccggtccaagcctgtggctggagctggtgtgtgtttatctaataaagtcccacaggtgcctcacaaaaaaaaacaaaaaagcaaaaag

SEQ ID NO: 415988 - DNA, 2472 bp, Homo sapiens
ggctcataaggaaaggttaaaacacagaaatgaaaactcgaaatagttctttctccaccggctcgcggcgcgtggaggctgctcccagccgcgcgcgagtcagactcgggtgggggtcccggcggcggtagcggcggcggcggtgcgagcatgtcgtggctcttcggcattaacaagggccccaagggtgaaggcgcggggccgccgccgcctttgccgcccgcgcagcccggggccgagggcggcggggaccgcggcttgggagaccggccggcgcccaaggacaaatggagcaacttcgaccccaccggcctggagcgcgccgccaaggcggcgcgcgagctggagcactcgcgttatgccaaggacgccctgaatctggcacagatgcaggagcagacgctgcagttggagcaacagtccaagctcaaagagtatgaggccgccgtggagcagctcaagagcgagcagatccgggcgcaggctgaggagaggaggaagaccctgagcgaggagacccggcagcaccaggccagggcccagtatcaagacaagctggcccggcagcgctacgaggaccaactgaagcagcagcaacttctcaatgaggagaatttacggaagcaggaggagtccgtgcagaagcaggaagccatgcggcgagccaccgtggagcgggagatggagctgcggcacaagaatgagatgctgcgagtggagaccgaggcccgggcgcgcgccaaggccgagcgggagaatgcagacatcatccgcgagcagatccgcctgaaggcgtccgagcaccgtcagaccgtcttggagtccatcaggacggctggcaccttgtttggggaaggattccgtgcctttgtgacagaccgggacaaagtgacagccacggtggctgggctgacgctgctggctgtcggggtctactcagccaagaatgcgacagccgtcactggccgcttcatcgaggctcggctggggaagccgtccctagtgagggagacgtcccgcatcacggtgctggaggcgctgcggcaccccatccaggtcagccggcggctcctcagtcgaccccaggacgtgctggagggtgttgtgcttagtcccagcctggaagcacgggtgcgcgacatcgccatagcaaccaggaacaccaagaagaaccggggcctgtacaggcacatcctgctgtatgggccaccaggcaccgggaagacgctgtttgccaagaaactcgccctgcactcaggcatggactacgccatcatgacaggcggggacgtggcccccatggggcgggaaggcgtgaccgccatgcacaagctctttgactgggccaataccagccggcgcggcctcctgctcttcatggatgaagcagacgccttccttcggaagcgagccactgaggagataagcaaggacctcagagccacactgaacgccttcctgtaccacatgggccaacacagcaacaaattcatgctggtcctggccagcaatctgcctgagcagttcgactgtgccatcaacagccgcattgacgtgatggtccacttcgacctgccgcagcaggaggagcgggagcgcctggtgagactgcattttgacaactgtgttcttaagccggccacagaaggaaaacggcgcctgaagctggcccagtttgactacgggaggaagtgctcggaggtcgctcggctgacggagggcatgtcgggccgggagatcgctcagctggccgtgtcctggcaggccacggcatatgcctccaaggacggggtcctcactgaggccatgatggacgcctgtgtgcaagatgctgtccagcagtaccgacagaagatgcgctggctgaaggcggaggggcctgggcgcggggtcgagcaccccctatccggagtccaaggcgagaccctcacctcatggagcctggccacggacccctcctacccctgccttgccggcccctgcacatttaggatatgctcctggatggggactgggctgtgcccagggcctctgtcccccaggatgtcttgtggtggcggtcggccgttctgccccccagggcaccccctgttgtaggcactggctagggaggggcaggcctccttcctgcccctcgagacactcttgggagatgcattttccgtctggctcacagggggagggtgaggctttgtaccccagcccctgcccaggccaattgcaactctgctactagtctagccactagggccttggaaattgcccggcgttctctatatcggctccagaaccacttcaagcaagagactctctccagctctagccactgtgcggctctcatccattgcaatctatccttacccactattcctagccttccaactttagccaatctcgcatttgtcattctctcgctcgctctctacctacagggtcgccctgtaccaacccttaacacgctcttgtgctccc

SEQ ID NO: 415989 - DNA, 1416 bp, Homo sapiens
ggctcataaggaaaggttaaaacacagaaatgaaaactcgaaatagttctttctccaccggctcgcggcgcgtggaggctgctcccagccgcgcgcgagtcagactcgggtgggggtcccggcggcggtagcggcggcggcggtgcgagcatgtcgtggctcttcggcattaacaagggccccaagggtgaaggcgcggggccgccgccgcctttgccgcccgcgcagcccggggccgagggcggcggggaccgcggcttgggagaccggccggcgcccaaggacaaatggagcaacttcgaccccaccggcctggagcgcgccgccaaggcggcgcgcgagctggagcactcgcgttatgccaaggacgccctgaatctggcacagatgcaggagcagacgctgcagttggagcaacagtccaagctcaaagagtatgaggccgccgtggagcagctcaagagcgagcagatccgggcgcaggctgaggagaggaggaagaccctgagcgaggagacccggcagcaccaggccagggcccagtatcaagacaagctggcccggcagcgctacgaggaccaactgaagcagcagcaacttctcaatgaggagaatttacggaagcaggaggagtccgtgcagaagcaggaagccatgcggcgagccaccgtggagcgggagatggagctgcggcacaagaatgagatgctgcgagtggagaccgaggcccgggcgcgcgccaaggccgagcgggagaatgcagacatcatccgcgagcagatccgcctgaaggcgtccgagcaccgtcagaccgtcttggagtccatcaggacggctggcaccttgtttggggaaggattccgtgcctttgtgacagaccgggacaaagtgacagccacggtaaacatattcataaaacagggctggcaggtggctgagaggcagcatgtgggggcctcctggagccccaggtcctgtccctgccggctctgcacagccctgtagctctcccagcacagagcaaacccacgttgtacctgctgggctcggctgctcctccctccttgagctgggagaaaaaaatgcagttgccagcctgggccacacggtgagaccccatctctacgaagaataaaacattagctgggtgtgatggtggcgcctgtggtcctgctactcgagaggctgaggtaggaggatcacttaagcccaggaggtttgggctgcagtgagccaacattgcaccactgcactccattcttggcgagagaataagaccttgtctcaagaaaaaaatggccaggcggtagtggctcaggcctgtaatcccagcattttcggaggcggaggtgggcggatcacgaggtccggagatcgagatcatcctggtaagagtgaaaccctgtctctactaaa

SEQ ID NO: 415990 - DNA, 1028 bp, Homo sapiens
ggctcataaggaaaggttaaaacacagaaatgaaaactcgaaatagttctttctccaccggctcgcggcgcgtggaggctgctcccagccgcgcgcgagtcagactcgggtgggggtcccggcggcggtagcggcggcggcggtgcgagcatgtcgtggctcttcggcattaacaagggccccaagggtgaaggcgcggggccgccgccgcctttgccgcccgcgcagcccggggccgagggcggcggggaccgcggcttgggagaccggccggcgcccaaggacaaatggagcaacttcgaccccaccggcctggagcgcgccgccaaggcggcgcgcgagctggagcactcgcgttatgccaaggacgccctgaatctggcacagatgcaggagcagacgctgcagttggagcaacagtccaagctcaaagagtatgaggccgccgtggagcagctcaagagcgagcagatccgggcgcaggctgaggagaggaggaagaccctgagcgaggagacccggcagcaccaggccagggcccagtatcaagacaagctggcccggcagcgctacgaggaccaactgaagcagcagcaacttctcaatgaggagaatttacggaagcaggaggagtccgtgcagaagcaggaagccatgcggcgagccaccgtggagcgggagatggagctgcggcacaagaatgagatgctgcgagtggagaccgaggcccgggcgcgcgccaaggccgagcgggagaatgcagacatcatccgcgagcagatccgcctgaaggcgtccgagcaccgtcagaccgtcttggagtccatcaggacggctggcaccttgtttggggaaggattccgtgcctttgtgacagaccgggacaaagtgacagccacggtaaacatattcataaaacagggctggcaggtggctgagaggcacattttcggaggcggaggtgggcggatcacgaggtccggagatcgagatcatcctggtaagagtgaaaccctgtctctactaaa

SEQ ID NO: 415991 - DNA, 1762 bp, Homo sapiens
agcgggacgtgtgctttagttgcagtggaaaggaaatgtgtcatctgtggtttggttttaaaagtggaaaactagctgcacatatccttttttactgcagatttactttaaggctcatattctccaagtctattctgctttaaaaagaagacaagaaaagaagtggtttatcaaaatcacgttataatcagattttgaccaagcattttgtaagattgccaagtatgcccacggacatggaacacacaggacattacctacatcttgcctttctgatgacaacagttttttctttgtctcctggaacaaaagcaaactatacccgtctgtgggctaacagtacttcttcctgggattcagttattcaaaacaagacaggcagaaaccaaaatgaaaacattaacacaaaccctataactcctgaagtagattataaaggtaattctacaaacatgcctgaaacatctcacatcgtagctttaacttctaaatctgaacaggagctttatataccttctgtcgtcagcaacagtccttcaacagtacagagcattgaaaacacaagcaaaagtcatggtgaaattttcaaaaaggatgtctgtgcggaaaacaacaacaacatggctatgctaatttgcttaattataattgcagtgctttttcttatctgtacctttctatttctatcaactgtggttttggcaaacaaagtctcttctctcagacgatcaaaacaagtaggcaagcgtcagcctagaagcaatggcgattttctggcaagcggtctatggcccgctgaatcagacacttggaaaagaacaaaacagctcacaggacccaacctagtgatgcaatctactggagtgctcacagctacaagggaaagaaaagatgaagaaggaactgaaaaacttactaacaaacagataggttagtgaagaaaaatgcaaagtagcaatgagaaggcttatggagtaaaaatgaagtcagttggtatttaatcccaaagtgttgttctgattatctaaaatttgacatggtagaccttgcaatttagaatcaagcaggtgagacagggagaagtatgcctgcttaattatttaaactgtgtacttttgttttgacactgaatattttaaaaagcaaataataaaataactaagcatttgaggaaaattttaaggataaattgaggaaactgattaatagagatagcaagggataattaaataaatattccctatgtagcaacagtggttagatgatctttgtctgaatgtaattaaactttgaatagttttagtgtgtccttaaagccaagtatatgctttaacatcaaatggaagtcaaattcctaatgcatagatagagagagctaaactgtgtaatttaatggtatcttctttgctggatgtggcagaatccacaccagcttatcaaccaacacagctaattttagaatagatcctttatctttccatatggcacacgtaagaaagtgtttttctactattaatattaaattaaaacctttacttttgtataataaattaaaactcagaataaacctgtgaccacgtatatttgcattcactttattactttagagaacacattgtaaagatcaataagaaatagagcacaactaaaataaataagatttatagccacaccaataggctaagtgtaaacgcaaagtatgtttcactgtttatgattaataatattcatcttttctataaatactacttactggaacatt

SEQ ID NO: 415992 - DNA, 1711 bp, Homo sapiens
agcgggacgtgtgctttagttgcagtggaaaggaaatgtgtcatctgtggtttggttttaaaagtggaaaactagctgcacatatccttttttactgcagatttactttaaggctcatattctccaagtctattctgctttaaaaagaagacaagaaaagaagtggtttatcaaaatcacgttataatcagattttgaccaagcattttgtaagtatacaaatgtcagccaatgacatataacaaccatttcttataaaaccttgatgttcaaaagcctgactagcagtggcatccatgttgcttaggagttggtttggaaacaaagactttcaggccctacctatactagctagattgccaagtatgcccacggacatggaacacacaggacattacctacatcttgcctttctgatgacaacagttttttctttgtctcctggaacaaaagcaaactatacccgtctgtgggctaacagtacttcttcctgggattcagttattcaaaacaagacaggcagaaaccaaaatgaaaacattaacacaaaccctataactcctgaagtagattataaaggtaattctacaaacatgcctgaaacatctcacatcgtagctttaacttctaaatctgaacaggagctttatataccttctgtcgtcagcaacagtccttcaacagtacagagcattgaaaacacaagcaaaagtcatggtgaaattttcaaaaaggatgtctgtgcggaaaacaacaacaacatggctatgctaatttgcttaattataattgcagtgctttttcttatctgtacctttctatttctatcaactgtggttttggcaaacaaagtctcttctctcagacgatcaaaacaagtaggcaagcgtcagcctagaagcaatggcgattttctggcaagcggtctatggcccgctgaatcagacacttggaaaagaacaaaacagctcacaggacccaacctagtgatgcaatctactggagtgctcacagctacaagggaaagaaaagatgaagaaggaactgaaaaacttactaacaaacagataggttagtgaagaaaaatgcaaagtagcaatgagaaggcttatggagtaaaaatgaagtcagttggtatttaatcccaaagtgttgttctgattatctaaaatttgacatggtagaccttgcaatttagaatcaagcaggtgagacagggagaagtatgcctgcttaattatttaaactgtgtacttttgttttgacactgaatattttaaaaagcaaataataaaataactaagcatttgaggaaaattttaaggataaattgaggaaactgattaatagagatagcaagggataattaaataaatattccctatgtagcaacagtggttagatgatctttgtctgaatgtaattaaactttgaatagttttagtgtgtccttaaagccaagtatatgctttaacatcaaatggaagtcaaattcctaatgcatagatagagagagctaaactgtgtaatttaatggtatcttctttgctggatgtggcagaatccacaccagcttatcaaccaacacagctaattttagaatagatcctttatctttccatatggcacacgtaagaaagtgtttttctactattaatattaaattaaaacctttacttttgtataataaattaaaactcagaataaacct

SEQ ID NO: 415993 - DNA, 1516 bp, Homo sapiens
agcgggacgtgtgctttagttgcagtggaaaggaaatgtgtcatctgtggtttggttttaaaagtggaaaactagctgcacatatccttttttactgcagatttactttaaggctcatattctccaagtctattctgctttaaaaagaagacaagaaaagaagtggtttatcaaaatcacgttataatcagattttgaccaagcattttgtaagattgccaagtatgcccacggacatggaacacacaggacattacctacatcttgcctttctgatgacaacagttttttctttgtctcctggaacaaaagcaaactatacccgtctgtgggctaacagtacttcttcctgggattcagttattcaaaacaagacaggcagaaaccaaaatgaaaacattaacacaaaccctataactcctgaagtagattataaaggtaattctacaaacatgcctgaaacatctcacatcgtagctttaacttctaaatctgaacaggagctttatataccttctgtcgtcagcaacagtccttcaacagtacagagcattgaaaacacaagcaaaagtcatggtgaaattttcaaaaaggatgtctgtgcggttcttatctgtacctttctatttctatcaactgtggttttggcaaacaaagtctcttctctcagacgatcaaaacaagtaggcaagcgtcagcctagaagcaatggcgattttctggcaagcggtctatggcccgctgaatcagacacttggaaaagaacaaaacagctcacaggacccaacctagtgatgcaatctactggagtgctcacagctacaagggaaagaaaagatgaagaaggaactgaaaaacttactaacaaacagataggttagtgaagaaaaatgcaaagtagcaatgagaaggcttatggagtaaaaatgaagtcagttggtatttaatcccaaagtgttgttctgattatctaaaatttgacatggtagaccttgcaatttagaatcaagcaggtgagacagggagaagtatgcctgcttaattatttaaactgtgtacttttgttttgacactgaatattttaaaaagcaaataataaaataactaagcatttgaggaaaattttaaggataaattgaggaaactgattaatagagatagcaagggataattaaataaatattccctatgtagcaacagtggttagatgatctttgtctgaatgtaattaaactttgaatagttttagtgtgtccttaaagccaagtatatgctttaacatcaaatggaagtcaaattcctaatgcatagatagagagagctaaactgtgtaatttaatggtatcttctttgctggatgtggcagaatccacaccagcttatcaaccaacacagctaattttagaatagatcctttatctttccatatggcacacgtaagaaagtgtttttctactattaatattaaattaaaacctttacttttgtataataaattaaaactcagaataaacct

SEQ ID NO: 415994 - DNA, 1025 bp, Homo sapiens
gcccaacaactccggcacgaagagctcgcaaaatttccggctccgagcaggcggagctgtggtttggttttaaaagtggaaaactagctgcacatatccttttttactgcagatttactttaaggctcatattctccaagtctattctgctttaaaaagaagacaagaaaagctctcagacgatcaaaacaagtaggcaagcgtcagcctagaagcaatggcgattttctggcaagcggtctatggcccgctgaatcagacacttggaaaagaacaaaacagctcacaggacccaacctagtgatgcaatctactggagtgctcacagctacaagggaaagaaaagatgaagaaggaactgaaaaacttactaacaaacagataggttagtgaagaaaaatgcaaagtagcaatgagaaggcttatggagtaaaaatgaagtcagttggtatttaatcccaaagtgttgttctgattatctaaaatttgacatggtagaccttgcaatttagaatcaagcaggtgagacagggagaagtatgcctgcttaattatttaaactgtgtacttttgttttgacactgaatattttaaaaagcaaataataaaataactaagcatttgaggaaaattttaaggataaattgaggaaactgattaatagagatagcaagggataattaaataaatattccctatgtagcaacagtggttagatgatctttgtctgaatgtaattaaactttgaatagttttagtgtgtccttaaagccaagtatatgctttaacatcaaatggaagtcaaattcctaatgcatagatagagagagctaaactgtgtaatttaatggtatcttctttgctggatgtggcagaatccacaccagcttatcaaccaacacagctaattttagaatagatcctttatctttccatatggcacacgtaagaaagtgtttttctactattaatattaaattaaaacctttacttttgtataataaattaaaactcagaataaacct

SEQ ID NO: 415995 - DNA, 1570 bp, Homo sapiens
agcgggacgtgtgctttagttgcagtggaaaggaaatgtgtcatctgtggtttggttttaaaagtggaaaactagctgcacatatccttttttactgcagatttactttaaggctcatattctccaagtctattctgctttaaaaagaagacaagaaaagaagtggtttatcaaaatcacgttataatcagattttgaccaagcattttgtaagattgccaagtatgcccacggacatggaacacacaggacattacctacatcttgcctttctgatgacaacagttttttctttgtctcctggaacaaaagcaaactatacccgtctgtgggctaacagtacttcttcctgggattcagttattcaaaacaagacaggcagaaaccaaaatgaaaacattaacacaaaccctataactcctgaagtagattataaaggtaattctacaaacatgcctgaaacatctcacatcgtagctttaacttctaaatctgaacaggagctttatataccttctgtcgtcagcaacagtccttcaacagtacagagcattgaaaacacaagcaaaagtcatggtgaaattttcaaaaaggatgtctgtgcggaaaacaacaacaacatggctatgctaatttgcttaattataattgcagtgctttttcttatctgtacctttctatttctatcaactgtggttttggcaaacaaagtctcttctctcagacgatcaaaacaagtaggcaagcgtcagcctagaagcaatggcgattttctggcaagcggtctatggcccgctgaatcagacacttggaaaagaacaaaacagctcacaggacccaacctagtgatgcaatctactggagtgctcacagctacaagggaaagaaaagatgaagaaggaactgaaaaacttactaacaaacagataggttagtgaagaaaaatgcaaagtagcaatgagaaggcttatggagtaaaaatgaagtcagttggtatttaatcccaaagtgttgttctgattatctaaaatttgacatggtagaccttgcaatttagaatcaagcaggtgagacagggagaagtatgcctgcttaattatttaaactgtgtacttttgttttgacactgaatattttaaaaagcaaataataaaataactaagcatttgaggaaaattttaaggataaattgaggaaactgattaatagagatagcaagggataattaaataaatattccctatgtagcaacagtggttagatgatctttgtctgaatgtaattaaactttgaatagttttagtgtgtccttaaagccaagtatatgctttaacatcaaatggaagtcaaattcctaatgcatagatagagagagctaaactgtgtaatttaatggtatcttctttgctggatgtggcagaatccacaccagcttatcaaccaacacagctaattttagaatagatcctttatctttccatatggcacacgtaagaaagtgtttttctactattaatattaaattaaaacctttacttttgtataataaattaaaactcagaataaacct

SEQ ID NO: 415996 - DNA, 1582 bp, Homo sapiens
gcccaacaactccggcacgaagagctcgcaaaatttccggctccgagcaggcggagctgtggtttggttttaaaagtggaaaactagctgcacatatccttttttactgcagatttactttaaggctcatattctccaagtctattctgctttaaaaagaagacaagaaaagaagtggtttatcaaaatcacgttataatcagattttgaccaagcattttgtaagattgccaagtatgcccacggacatggaacacacaggacattacctacatcttgcctttctgatgacaacagttttttctttgtctcctggaacaaaagcaaactatacccgtctgtgggctaacagtacttcttcctgggattcagttattcaaaacaagacaggcagaaaccaaaatgaaaacattaacacaaaccctataactcctgaagtagattataaaggtaattctacaaacatgcctgaaacatctcacatcgtagctttaacttctaaatctgaacaggagctttatataccttctgtcgtcagcaacagtccttcaacagtacagagcattgaaaacacaagcaaaagtcatggtgaaattttcaaaaaggatgtctgtgcggaaaacaacaacaacatggctatgctaatttgcttaattataattgcagtgctttttcttatctgtacctttctatttctatcaactgtggttttggcaaacaaagtctcttctctcagacgatcaaaacaagtaggcaagcgtcagcctagaagcaatggcgattttctggcaagcggtctatggcccgctgaatcagacacttggaaaagaacaaaacagctcacaggacccaacctagtgatgcaatctactggagtgctcacagctacaagggaaagaaaagatgaagaaggaactgaaaaacttactaacaaacagataggttagtgaagaaaaatgcaaagtagcaatgagaaggcttatggagtaaaaatgaagtcagttggtatttaatcccaaagtgttgttctgattatctaaaatttgacatggtagaccttgcaatttagaatcaagcaggtgagacagggagaagtatgcctgcttaattatttaaactgtgtacttttgttttgacactgaatattttaaaaagcaaataataaaataactaagcatttgaggaaaattttaaggataaattgaggaaactgattaatagagatagcaagggataattaaataaatattccctatgtagcaacagtggttagatgatctttgtctgaatgtaattaaactttgaatagttttagtgtgtccttaaagccaagtatatgctttaacatcaaatggaagtcaaattcctaatgcatagatagagagagctaaactgtgtaatttaatggtatcttctttgctggatgtggcagaatccacaccagcttatcaaccaacacagctaattttagaatagatcctttatctttccatatggcacacgtaagaaagtgtttttctactattaatattaaattaaaacctttacttttgtataataaattaaaactcagaataaacct

SEQ ID NO: 415997 - DNA, 2088 bp, Homo sapiens
cttcagatttttaggttgagaaaactggtatgcctttgccttcagaaagacacagtcagtccagggaaatataaatgaaaagagacaaccaccacagtaaaattgcgttcacaaatacacttacaaatgtatttctaagtaccagctttattctaagcttcaagatgaacacccaagaaaaaaaaagaacaccttgaatttctatttgaagttcagtttcttttggttgctaccaaacttcccctctttccaccaaaaaaatttgcatttatttcatacatgaagcaagaagctcaaggccacatttcttctgtaaagattggtgacaggttagagggtgggtagtttctgtaagaatgatccttaatttttttttttttttaaagaaggaatcagaaaagtaaaagcagaactaactgactcaaagcagaagtctagcacgcttcaaaggaagaaaactatataaagccatgatagtccacttaaaatgattaatatttatttgtaatgctaacttctagcatctaaaagtgttaatagaaattaaaatgcttcttcatacatagctgaatagaaaagaaatttagttgagaaggaattcagggtagcgaatattaggcataagcttgtagtttacttgtaacatctcaacactatcttttaactacaattaccaaaactaggatccattattctttcacaaactaacaaattatattgctatcccaacagattgccaagtatgcccacggacatggaacacacaggacattacctacatcttgcctttctgatgacaacagttttttctttgtctcctggaacaaaagcaaactatacccgtctgtgggctaacagtacttcttcctgggattcagttattcaaaacaagacaggcagaaaccaaaatgaaaacattaacacaaaccctataactcctgaagtagattataaaggtaattctacaaacatgcctgaaacatctcacatcgtagctttaacttctaaatctgaacaggagctttatataccttctgtcgtcagcaacagtccttcaacagtacagagcattgaaaacacaagcaaaagtcatggtgaaattttcaaaaaggatgtctgtgcggaaaacaacaacaacatggctatgctaatttgcttaattataattgcagtgctttttcttatctgtacctttctatttctatcaactgtggttttggcaaacaaagtctcttctctcagacgatcaaaacaagtaggcaagcgtcagcctagaagcaatggcgattttctggcaagcggtctatggcccgctgaatcagacacttggaaaagaacaaaacagctcacaggacccaacctagtgatgcaatctactggagtgctcacagctacaagggaaagaaaagatgaagaaggaactgaaaaacttactaacaaacagataggttagtgaagaaaaatgcaaagtagcaatgagaaggcttatggagtaaaaatgaagtcagttggtatttaatcccaaagtgttgttctgattatctaaaatttgacatggtagaccttgcaatttagaatcaagcaggtgagacagggagaagtatgcctgcttaattatttaaactgtgtacttttgttttgacactgaatattttaaaaagcaaataataaaataactaagcatttgaggaaaattttaaggataaattgaggaaactgattaatagagatagcaagggataattaaataaatattccctatgtagcaacagtggttagatgatctttgtctgaatgtaattaaactttgaatagttttagtgtgtccttaaagccaagtatatgctttaacatcaaatggaagtcaaattcctaatgcatagatagagagagctaaactgtgtaatttaatggtatcttctttgctggatgtggcagaatccacaccagcttatcaaccaacacagctaattttagaatagatcctttatctttccatatggcacacgtaagaaagtgtttttctactattaatattaaattaaaacctttacttttgtataataaattaaaactcagaataaacct

SEQ ID NO: 415998 - DNA, 296 bp, Homo sapiens
tccgccctcagcagccaatcaccatctacagtctgcactgccaaatgcgtagccctttattctctcatgccccgtgatccccatgaacattcagtagagatcactagagagcagtttgcacgtgagcgcagttttccataagaagcactctgaactgttgtttttctctaagcttttacatgaaatattgggaagaacttactgcatttctagaatggtaggaatctgttcttttggtgtttgtttgttttctcatgttcatctgtgtacaaataaaaaaaagagaatggtcgtaa

SEQ ID NO: 415999 - DNA, 422 bp, Homo sapiens
gctattgttctaatttgtatatattttaagtccctataatttaattgagcaaatatgtcttgagtatctatcatgtaccaggcactcctctagagcactgaggattcagctgtgatcaaaacagataattattgctctcacaattcctacattctagtagaggcagacaattaacatgaaaataacaatgatagcttcagataacgatctttaaaaataaaatgtaacagtttgcccagtgtatgactggaatgcgggatcaagtttagattggataatcaaggtaggaatgcgggatcaagtttagattggataatcaaggtagggatatctcagagcagggctttgaggtgagacttaaatgatgaggggccttttaagtaaatgtctggaagaagtgaatttttcaggaagagtcctgg

SEQ ID NO: 416000 - DNA, 2235 bp, Homo sapiens
  misc_feature (794)..(794): n is a, c, g, or t
  misc_feature (802)..(802): n is a, c, g, or t
  misc_feature (810)..(810): n is a, c, g, or t
  misc_feature (817)..(819): n is a, c, g, or t
  misc_feature (821)..(821): n is a, c, g, or t
  misc_feature (824)..(824): n is a, c, g, or t
  misc_feature (832)..(832): n is a, c, g, or t
  misc_feature (846)..(846): n is a, c, g, or t
  misc_feature (848)..(848): n is a, c, g, or t
  misc_feature (852)..(852): n is a, c, g, or t
  misc_feature (860)..(860): n is a, c, g, or t
  misc_feature (1531)..(1531): n is a, c, g, or t
  misc_feature (1533)..(1533): n is a, c, g, or t
  misc_feature (1537)..(1537): n is a, c, g, or t
tgactgtacctacattaaggtgttggtgttcaacacaagtgtacaatgtgctgggggcaaggggacacagaaaagaggcagtcaatggaagtccctagaaggggggagataaggttaggacaagccttcccaagagtagaaaaggatgatagttgtgttgggccctgaaagatgaataggatattgataagctgataacaaaggaagagagaaacgtaacagttactgagattctacaattgaccgggcactgtgctagggtcttttaccaaagggccatacagacagaggatgacatgagcaaagttacgcagacatgagagtacatgcccaatgcacttgaaaaccaaggtgcaaaccagcatggcagcattcaaccaataggtgaatggttcggtgtggcaggaaatgggcctagaaagttaaggcagggccaggtcatatgtcatcctgaacatcaagctagggcgtttgcaattatcctataatttggaaatatcctatagactctgttctaaggatgtggttcccagtggggaccactagagggttttaagccaagaataatctgcccagatgtaacctttagaaagaaataattgggagcagaatggaggattgcgggagaaaggctagtggtatggcaaactgctagacagctatgagtaaagtccaggacaaagatgagccagccctaaaacagagtcaagtgccattttgaagctgtgggtagacatcatggcaagatggtagcataactatgggtggccagataaagccctctgtaattcccntttaaatnactgcagnatatacnnngnccnttgcaccnctgttgatgattgngntaantaggcttncaatgtctgaaaaaaaatgtaggtcaaccactagtaaaattaaaagcaatgtctattttccaaatcactgctgaaaataatagcaaatcatttccacacacacaaacacacaaaagcataatctacaggaaacataaaatgcatagggcataaaacaaagtaataggaataaaaccagatcgaatggttatgaggtgaatgtaactagagagcccgtgagcctggatcatacacagctatcatttgttgagtgcatgctctatgccaggtgctcctctgtgtgtttcataaagacaaatatggcaatgggaggatgagatgggatgcttccagtctaggatccacttggggctccaaatgaacagataccacattccaaagtgaagtgggatacacctcttggaaaagaggtggcgaaaacctgggtccatgccattagctgacacccatctctaatgcatacaaaatgggagagaggttgaaaaaaggttgttggaggtttagaatgaatttcagagacagcctttggggtccagtgatcccaaataaatgggaggggtacagggtgctatcaccttcacctcaaagccagacagtggggccttgaggagacccctaagtcagttgatatgtggccaaaatggtcttggtgccacagtggagaaatccananagcngcaagagtctgctgcttcaggatcagcctgtgctccctggtttgcagggcaaagcacacatgagtgtctcttgtggacagaggtaggacccagcaagagagccagatgtgactgtcttagatccaggacaagagggctcctccaagggaggaggtgacactgagggagaccaggtttcccagagcctgagaaagaaaccataggatcggctacggggagaaagtatcaccctcatcaagggaggtgcagggtgagactccagcgatggggtggtctccaccaacccacaaaaacagcccagtgagagaaagggcccagagaacaacgggacagcaactcatcagagtacagtcattgaagacctttcccaaccatctcctctcctacctacctgcccctccaccttggaccctggaaagggtcaggactgtcatgtgcaaggtccccacaggcagctggcctacagcagactgtgctgggaaagaggtggtgtaactctgacgtttcaagattttttttttattacagcagacaggatgcattaattactgacaagacaacctctggttacctgaaaatggtcagaaaagtcatgggacttaccctaaatttaatataattttagaagggaaaacagccctatagaataaatttaaagagactgtgggagacaaaaataaagtttgctttatgattac

SEQ ID NO: 416001 - DNA, 310 bp, Homo sapiens
cccctcatcctgaaactacctaagggtttccaggcttcagtcaactcattagcatgcaaaaagacatcactttttggagattctaaggattctaggacatgtatgccaggaaaaaggatcaaagaccaagtatacacttcataatatcacagctccccatttccctaagataatttctagaggtcatggcctgacactcaaggttcttcaagagccaccccttcctacccttttaggcaatgtccagtcattctatcccttggtcactgaattccagccaccctagactttccacagttcctttgggtca

SEQ ID NO: 416002 - DNA, 1645 bp, Homo sapiens
tagcagttttaacattgcatatccttaagattttaatattccaagctgtgtacaattttagtacattcaaattctaaaggttatctctttatcttatagttctctaattacacattctccaactaataattttacatggaccacaaagtttaaaagcgatcttattagcctacaaatctccactgtcctcttattcctatagtgctgagcatgttaaaaaaaaaaaaaaaccttattgatcaaaaataaaacttgaattttgaaacatgcttaaaatgacatcagtagtcttccttaagaagtataggcttaactggggaatagtcaatattttaaaatttatttactatatgcatgttatatatacttgctttatgtgtattataaagcataatctatatttacaaaactgtaaaatacacacctctaataatgagttttaaagctttttttcttttgagacagtctcactctgttgcccgggctagtgtgcagtcatgcgatcttggctcactgcaacctccgcctcccgggttcaagcgattctactgcctcagcctcccaagtagctgggtgtggcacctgccaccatgcctggctaattttttgtatttttagtagagacagggtttctccatgttagccaggctggtctcaaactcctgacctcaagtgatccagccgcctcggcctcccaaaatgctgggattacaggcatgagccactgttcccagctggatttcttactctaagttacttatcttaaaaaaaaaatagtctaagattacaaattatcagttccagaagagatatacctaacacaaaaattaacctactaaattgaactatatgagtatcaatacaagcaacatgagtaagccttaaatttcatgtttttaaagcttacaaagggtgtaactaatttattcaactccaacactttattcttattacagaatcaaagcttttagacattaagaggaacaagggaggatctgaactattttaggtttaaaagcccatgatcagggatattaattgcagccataaataaactgctgaggccaaataaacaactgcattcctataatcgctgccaaaaacactgcatacatcctcaaacattgagacaaaggatggcagacaggtttcaactctaattgttatgtggctgcctccaacagtatattgagactggggaacaacgtggggcaggtttcaactctaattgttacgtggctgcctccaacagtatattgagactggggaacaacgtggggcaggtttcaactctaattgttacgtggctgcctccaacagaatattgagactggggaacaacgtggggcttgatgtcaaagagaactcagaaggattataaaagcctgtcgtgggcacaagaatgtggtaccttgtgctactcttggcttcagcattaagctgacaaagacttcctactgcaatacctgactttcgtttctattatgaacacgatatttcactgttgtttctcatcaaaagcacctgatgtcaatgtaacaaaatacagagatcatgaaattcttttttgctatgtccgacaaaatgaacaagaaactgaataccagttttctagatgcactaataaataacttcagttaaaata

SEQ ID NO: 416003 - DNA, 1415 bp, Homo sapiens
tagcagttttaacattgcatatccttaagattttaatattccaagctgtgtacaattttagtacattcaaattctaaaggttatctctttatcttatagttctctaattacacattctccaactaataattttacatggaccacaaagtttaaaagcgatcttattagcctacaaatctccactgtcctcttattcctatagtgctgagcatgttaaaaaaaaaaaaaaaccttattgatcaaaaataaaacttgaattttgaaacatgcttaaaatgacatcagtagtcttccttaagaagtataggcttaactggggaatagtcaatattttaaaatttatttactatatgcatgttatatatacttgctttatgtgtattataaagcataatctatatttacaaaactgtaaaatacacacctctaataatgagttttaaagctttttttcttttgagacagtctcactctgttgcccgggctagtgtgcagtcatgcgatcttggctcactgcaacctccgcctcccgggttcaagcgattctactgcctcagcctcccaagtagctgggtgtggcacctgccaccatgcctggctaattttttgtatttttagtagagacagggtttctccatgttagccaggctggtctcaaactcctgacctcaagtgatccagccgcctcggcctcccaaaatgctgggattacaggcatgagccactgttcccagctggatttcttactctaagttacttatcttaaaaaaaaaatagtctaagattacaaattatcagttccagaagagatatacctaacacaaaaattaacctactaaattgaactatatgagtatcaatacaagcaacatgagtaagccttaaatttcatgtttttaaagcttacaaagggtgtaactaatttattcaactccaacactttattcttattacagaatcaaagcttttagacattaagaggaacaagggaggatctgaactattttaggtttaaaagcccatgatcagggatattaattgcagccataaataaactgctgaggccaaataaacaactgcattcctataatcgctgccaaaaacactgcatacatcctcaaacattgagacaaaggatggcagacaggtttcaactctaattgttaagtggctgcctccaacagaatattgagactggggaacaatgtggggcaggtttcaactctaattgttacgtggctgcctccaacagaatattgagactggggaacaaagtggggcaggtttcaactctaattgttacgtggctgcctccaacagaatattgagactggggaacaatgtggggcaggtttcaactctaattgttacgtggctgcctccaacagaatattgagactggggaacaacgtggg

SEQ ID NO: 416004 - DNA, 400 bp, Homo sapiens
ctaattacacattctccaactaataattttacatggaccacaaagtttaaaagcgatcttattagcctacaaatctccactgtcctcttattcctatagtgctgagcatgttaaaaaaaaaaaaaaaccttattgatcaaaaataaaacttgaattttgaaacatgcttaaaatgacatcagtagtcttccttaagaagtataggcttaactggggaatagtcaatattttaaaatttatttactatatgcatgttatatatacttgctttatgtgtattataaagcataatctatatttacaaaactgtaaaatacacacctctaataatgagttttaaagctaaatgagcaaaatattcctctagtttttctttagcagttctgtgaatggatttttt

SEQ ID NO: 416005 - DNA, 2015 bp, Homo sapiens
ctcgcctgcgggtggtttgacaaggctggcggcgccacaccagcgaccaggcctggagctcacacttctgagaggcatcgcaagcgagggccttcacgttactgagaccccagccccgcacagaggctcatggagctcgaagcacgcagggctggcctctccagagctagcagattccttctggacctgtagggtgccgccctagcccagccgccatggcgcagggtttcgcagtgggcttcgacccactgggcctaggagacctgagctccggctctctgagctccctctcctcccgaggccacctaggcagcgactcaggctccaccgcaacgcgatacctgctaaggaagcaacaacggctgctgaacgggcccccccgcggaatccgagcctcatcgcccatgggacgcgtcatcctcatcaactcccccatcgaagccaacagtgatgaaagtgacatcatccattcagtccgggtggagaagagtccagcagggaggctgggcttcagcgtgcgcgggggctcagagcatggcctgggcatcttcgtcagcaaagtggaggaaggcagcagtgcagagcgggctggcctgtgcgtgggggacaagatcacggaggtgaatgggctgagcctggagagcaccaccatgggtagcgccgtaaaggtgctgaccagcagcagccgcctgcacatgatggttcggcgcatgggccgtgtgccgggcatcaagttctccaaggagaagaccacgtgggtggatgtggtgaatcggcgcctggtagtggagaagtgcggttcaacaccctccgacaccagctcagaagatggtgtccggcgcatcgtccacctatacacaacctccgacgacttctgcctgggcttcaacatccgtgggggcaaggagtttggcctgggcatctatgtgtccaaagtggaccatggtgggctggccgaggagaatggcatcaaggtgggggaccaggtcctggcagccaacggtgtcaggtttgacgacatcagccacagccaggccgtggaggtgctgaagggccaaacgcacatcatgctgaccatcaaggagaccggccggtatcctgcctacaaggagatggtttctgagtactgctggctggaccgactgagcaacggggtgctgcagcagctgtccccggcctctgagagcagctccagcgtctcttcgtgcgcctccagcgccccctacagctcgggctccctgccgtcggaccgcatggacatctgcctcgggcaggaggagcccggcagccgcggcccaggctgggggcgggcggacacagccatgcagacggagcccgatgcgggaggccgggtggagacctggtgcagcgtgcggcccacagtcatcctcagggacaccgccatccgctcggacggcccccatcccggccgccgccttgactctgcgctctctgagtctcccaagacggctttgctgctggccctcagccgaccccggccccccatcacgcgctcccagagctatctgaccttgtgggaggagaagcagcagcggaagaaggagaagtcggggtcccctggggagaagggtgccctgcagcgctccaagacgctgatgaacctcttcttcaagggagggcggcaggggaggctagcgcgggacgggcgcagagaggcctggacactggacagcgggagcctggccaaaacttaccctcgcctggacatagagaaagagatgggggtttcaccctgttgcccaggctagtctcaaattcctggactgaagctatctacccgccttagtctcccaaagtgctaggattacagcgtgatctaccacacctggccaatcccaactactctggaagctgaagcagcaagatcacttgagcccaggagtttaagaccagcctgggcaacatagcaagaccctgtctctaaagaaaaaaaaaaagtaaaagaaaaataaagcacgtcttggctcagctgctgatttaagctgggtctaaac

SEQ ID NO: 416006 - DNA, 4461 bp, Homo sapiens
ctcgcctgcgggtggtttgacaaggctggcggcgccacaccagcgaccaggcctggagctcacacttctgagaggcatcgcaagcgagggccttcacgttactgagaccccagccccgcacagaggctcatggagctcgaagcacgcagggctggcctctccagagctagcagattccttctggacctgtagggtgccgccctagcccagccgccatggcgcagggtttcgcagtgggcttcgacccactgggcctaggagacctgagctccggctctctgagctccctctcctcccgaggccacctaggcagcgactcaggctccaccgcaacgcgatacctgctaaggaagcaacaacggctgctgaacgggcccccccgcggaatccgagcctcatcgcccatgggacgcgtcatcctcatcaactcccccatcgaagccaacagtgatgaaagtgacatcatccattcagtccgggtggagaagagtccagcagggaggctgggcttcagcgtgcgcgggggctcagagcatggcctgggcatcttcgtcagcaaagtggaggaaggcagcagtgcaggtaagcagaacccccaggctgaagtccacgcttaggatgtgactccaatctcagtgaatggcaggggatgctgctgtcagggacagacggaagagtccccagctctggagggcctgattgatggggagacagggccaaccctcaagtcagaatggtttaagggacagatccctaggcactgggaacactcagcccctgctctgacaatcctcactctgattgagaagctcagtttgaccccagggagctccatctgatgggggaggctcagccccaccctggggacccatgccagccactcccatcctgtggtgcagagcgggctggcctgtgcgtgggggacaagatcacggaggtgaatgggctgagcctggagagcaccaccatgggtagcgccgtaaaggtgctgaccagcagcagccgcctgcacatgatggttcggcgcatgggccgtgtgccgggcatcaagttctccaaggagaagaccacgtgggtggatgtggtgaatcggcgcctggtagtggagaagtgcggttcaacaccctccgacaccagctcagaagatggtgtccggcgcatcgtccacctatacacaacctccgacgacttctgcctgggcttcaacatccgtgggggcaaggagtttggcctgggcatctatgtgtccaagtgagggctgaggcaggaagtgtcttcgggtagaactgagaatggggtctggagtggggcctaggctgggatgtggggatggtcagcaagtgaggcctggccaaccacctgtctcagtgagggcctgggagggggcgggaggccccagtaggagggtcaaggaccttgactggtgcagtcttgtgtccaagagaagggggtctggagtggggtaacggagggcaggccaggggcctatcagactgacgcctgtctggcctcagagtggaccatggtgggctggccgaggagaatggcatcaaggtgggggaccaggtcctggcagccaacggtgtcaggtttgacgacatcagccacagccaggccgtggaggtgctgaagggccaaacgcacatcatgctgaccatcaaggagaccggccggtatcctgcctacaaggagatggtttctgagtactgctggctggaccgactgagcaacggggtgctgcagcagctgtccccggcctctgagagcagctccagcgtctcttcgtgcgcctccagcgccccctacagctcgggctccctgccgtcggaccgcatggacatctgcctcgggcaggaggagcccggcagccgcggcccaggctgggggcgggcggacacagccatgcagacggagcccgatgcgggaggccgggtggagacctggtgcagcgtgcggcccacagtcatcctcagggacaccgccatccgctcggacggcccccatcccggccgccgccttgactctgcgctctctgagtctcccaagacggctttgctgctggccctcagccgaccccggccccccatcacgcgctcccagagctatctgaccttgtgggaggagaagcagcagcggaagaaggagaagtcggggtcccctggggagaagggtgccctgcagcgctccaagacgctgatgaacctcttcttcaagggagggcggcaggggaggctagcgcgggacgggcgcagagaggcctggacactggacagcgggagcctggccaaaacttaccctcgcctggacatagagaaagtatgtgcacgagggaggcatagaggacctggtgaggcccctgctggccatcctcgacaggccggagaagctgctactgctgcaggacatcaggagtgtggtggcccccacagacctgggccgcttcgacagcatggtgatgcttgtggagctggaggcttttgaggccctcaagagcagggcagtccggcctcctgctttgagaccagcccggcaggacacgccacccaagcgtcaccttatcacccccgtgcctgccgcggaggcttctacctgctgccggtgaacggcttcccggaagaggaagataatggggagctgagggagcggctgggggccctcaaggtctccccaagtgcctctgcccctcgccacccccataaagggatcccccctctacaagacgtgccagtagatgccttcacccccctccgaattgcctgcacaccccctccccagctaccccccgtggctccccggcccctgcggcctaactggctgctgacagaacccctgagccgagagcaccctccgcagagccagatccggggccgggctcagagccgtagccgcagccgtagccgcagccgcagccgcagcagccggggtcaaggcaagtctccaggtagacgctccccatccccggtgcctacccctgcccccagcatgaccaatgggcgctaccacaagcctcggaaggccagaccccctctgccacgacctctggatggggaggcagccaaggtgggggccaagcaagggccctcggagagtggaactgaggggacggccaaggaggcagccatgaagaaccccagtggcgagctgaagacagtgacactgtccaagatgaagcagtccttaggtatcagcatttctgggggcattgagtccaaggtgcagcccatggtgaagatagagaagatcttccctgggggggccgctttcctcagtggggccctgcaggctggcttcgagcttgtggcagtggacggagagaatctagagcaggtgacccaccagcgtgcagtagacaccatccgtcgggcttatcgaaacaaggcccgggagcccatggagcttgtggtcagggtccccgggcccagcccacggccctcaccctctgactcatcagcccttactgatgggggccttcctgctgaccacttgcctgcccaccaaccccttgatgctgctccagttcctgcccactggctcccagaacctcccaccaatccccagactcctcccactgatgccaggctcctccagccaactcccagcccagccccctccccagccctccagactcctgattctaagcccgcaccctccccacgcatcccatgaccctccccctaacctcagattcacccactgactccagcatcccgttatccccaggacctctcctaccaacttcttcaggactctccagctcctgcccaccctgcctcctcccagtgccacactggtggctcacatctttccactttcttccctcctcagctgtcattaaggctctgccttagtgtccaaggacaaggtgctagtgggcagcctgtgtcacctgcactcactgctccccaacctcccaagccaggatagggggtgagaaagccaaggtctggagcttgggattggtgggcactttctcacatgctgtcccttatgagtcgcccaagcctccagggacacagactctcagacagggccctgaaggggtcaatgcatccattcctcaaccccaagcagcattctgtgcaaggaaacggatgaaaggcttttctagtccctgaaatcctgagagatcatttcacgttggggtccactaagacctcagacattctactggatttgtccttcctccatcaccttttctccccaagagagctctatgagggggaggagaatagccagcaaatggtgggggggggggggggtcaaacaagttcctgtactctttatccagcacattcacattatttttaaacaaaaaaattttttttaattttttctttgggtttgtacaagaaatttacagtgtgaaaaatatacaagtgaaaacgaggccataaacctgggtgaagggagaggctgcttggtcacaaacacaaataaacaagacatttctgagttcttcct

SEQ ID NO: 416007 - DNA, 2046 bp, Homo sapiens
ctcgcctgcgggtggtttgacaaggctggcggcgccacaccagcgaccaggcctggagctcacacttctgagaggcatcgcaagcgagggccttcacgttactgagaccccagccccgcacagaggctcatggagctcgaagcacgcagggctggcctctccagagctagcagattccttctggacctgtagggtgccgccctagcccagccgccatggcgcagggtttcgcagtgggcttcgacccactgggcctaggagacctgagctccggctctctgagctccctctcctcccgaggccacctaggcagcgactcaggctccaccgcaacgcgatacctgctaaggaagcaacaacggctgctgaacgggcccccccgcggaatccgagcctcatcgcccatgggacgcgtcatcctcatcaactcccccatcgaagccaacagtgatgaaagtgacatcatccattcagtccgggtggagaagagtccagcagggaggctgggcttcagcgtgcgcgggggctcagagcatggcctgggcatcttcgtcagcaaagtggaggaaggcagcagtgcagagcgggctggcctgtgcgtgggggacaagatcacggaggtgaatgggctgagcctggagagcaccaccatgggtagcgccgtaaaggtgctgaccagcagcagccgcctgcacatgatggttcggcgcatgggccgtgtgccgggcatcaagttctccaaggagaagaccacgtgggtggatgtggtgaatcggcgcctggtagtggagaagtgcggttcaacaccctccgacaccagctcagaagatggtgtccggcgcatcgtccacctatacacaacctccgacgacttctgcctgggcttcaacatccgtgggggcaaggagtttggcctgggcatctatgtgtccaagtgagggctgaggcaggaagtgtcttcgggtagaactgagaatggggtctggagtggggcctaggctgggatgtggggatggtcagcaagtgaggcctggccaaccacctgtctcagtgagggcctgggagggggcgggaggccccagtaggagggtcaaggaccttgactggtgcagtcttgtgtccaagagaagggggtctggagtggggtaacggagggcaggccaggggcctatcagactgacgcctgtctggcctcagagtggaccatggtgggctggccgaggagaatggcatcaaggtgggggaccaggtcctggcagccaacggtgtcaggtttgacgacatcagccacagccaggccgtggaggtgctgaagggccaaacgcacatcatgctgaccatcaaggagaccggccggtatcctgcctacaaggagatggtttctgagtactgctggctggaccgactgagcaacggggtgctgcagcagctgtccccggcctctgagagcagctccagcgtctcttcgtgcgcctccagcgccccctacagctcgggctccctgccgtcggaccgcatggacatctgcctcgggcaggaggagcccggcagccgcggcccaggctgggggcgggcggacacagccatgcagacggagcccgatgcgggaggccgggtggagacctggtgcagcgtgcggcccacagtcatcctcagggacaccgccatccgctcggacggcccccatcccggccgccgccttgactctgcgctctctgagtctcccaagacggctttgctgctggccctcagccgaccccggccccccatcacgcgctcccagagctatctgaccttgtgggaggagaagcagcagcggaagaaggagaagtcggggtcccctggggagaagggtgccctgcagcgctccaagacgctgatgaacctcttcttcaagggagggcggcaggggaggctagcgcgggacgggcgcagagaggcctggacactggacagcgggagcctggccaaaacttaccctcgcctggacatagagaaagcagggggcgtgggcccggtacagaagtttgtcacctggagactgag

SEQ ID NO: 416008 - DNA, 1579 bp, Homo sapiens
ctcgcctgcgggtggtttgacaaggctggcggcgccacaccagcgaccaggcctggagctcacacttctgagaggcatcgcaagcgagggccttcacgttactgagaccccagccccgcacagaggctcatggagctcgaagcacgcagggctggcctctccagagctagcagattccttctggacctgtagggtgccgccctagcccagccgccatggcgcagggtttcgcagtgggcttcgacccactgggcctaggagacctgagctccggctctctgagctccctctcctcccgaggccacctaggcagcgactcaggctccaccgcaacgcgatacctgctaaggaagcaacaacggctgctgaacgggcccccccgcggaatccgagcctcatcgcccatgggacgcgtcatcctcatcaactcccccatcgaagccaacagtgatgaaagtgacatcatccattcagtccgggtggagaagagtccagcagggaggctgggcttcagcgtgcgcgggggctcagagcatggcctgggcatcttcgtcagcaaagtggaggaaggcagcagtgcagagcgggctggcctgtgcgtgggggacaagatcacggaggtgaatgggctgagcctggagagcaccaccatgggtagcgccgtaaaggtgctgaccagcagcagccgcctgcacatgatggttcggcgcatgggccgtgtgccgggcatcaagttctccaaggagaagaccacgtgggtggatgtggtgaatcggcgcctggtagtggagaagtgcggttcaacaccctccgacaccagctcagaagatggtgtccggcgcatcgtccacctatacacaacctccgacgacttctgcctgggcttcaacatccgtgggggcaaggagtttggcctgggcatctatgtgtccaagtgagggctgaggcaggaagtgtcttcgggtagaactgagaatggggtctggagtggggcctaggctgggatgtggggatggtcagcaagtgaggcctggccaaccacctgtctcagtgagggcctgggagggggcgggaggccccagtaggagggtcaaggaccttgactggtgcagtcttgtgtccaagagaagggggtctggagtggggtaacggagggcaggccaggggcctatcagactgacgcctgtctggcctcagagtggaccatggtgggctggccgaggagaatggcatcaaggtgggggaccaggtcctggcagccaacggtgtcaggtttgacgacatcagccacagccaggccgtggaggtgctgaagggccaaacgcacatcatgctgaccatcaaggagaccggccggtatcctgcctacaaggagatggtttctgagtactgctggctggaccgactgagcaacggggtgctgcagcagctgtccccggcctctgagagcagctccagcgtctcttcgtgcgcctccagcctgggccgcggctgccgggctcctcctgcccgaggcagatgtccatgcggtccgacggcagggagcccgagctgtagggggcgggcggacacaacgacg

SEQ ID NO: 416009 - DNA, 391 bp, Homo sapiens
gcatgggccgtgtgccgggcatcaagttctccaaggagaagaccacgtggtgagcagcaactccctcatcctagccctggccttgccccagcccaccccaaccctaccaacacccaaaacccactggcaggagaggcttctgttcctcctgctcgctggctcaggaaacgcaggggatccaaaggcctgacctcaaaataaggagaggctgcatctttcccctgccctcctccaatagctctgctctcccagatcccagtggttctgctgccacattgccgctgctcctgctgtgaaacccagaggcaaaacaccacctctctacaggggtgctgtaaggattagaaatggggcctagcctgggcaacatagcaagaccccttctctaaaa

SEQ ID NO: 416010 - DNA, 339 bp, Homo sapiens
tccggcctcctgctttgagaccagcccggcaggacacgccacccaagcgtcaccttatcacccccgtgcctggtcagtcagagtcccagagcccagggaggggcacagccctggggagattagggaaaggaggatgggccttctacttctttccccactaggggcagttgtggcttccaggcacattgtggttccctgaaggaaagctcttgtccaccagagccattttatcacatctgctggtcaccacctgtactattacttaatagttggtttgaaacccactcacttttaaaatctagtctcattctatgcagtaacctctgagaaattacgttt

SEQ ID NO: 416011 - DNA, 710 bp, Homo sapiens
catgctcaaatcagctgtgctttttagccacaggaagatccaattccacatcttcactgaagactctctgaagcccgagtttgataagcagttacgccagtggcctgactcatatacaaagaagtttgagcacagaatctaccccatcacattttctgttggaaaccctcaggagtggaagaaattgttcaaaccctgtgctgcccagagactctttcttccggtgattttaaaggatgtggactcacttctctacgtggacaccgatgtcctctttctgagacctgttgatgacatctggaagcttctgaggctgtttaattccacccagcttgcagccatggcccctgagcacgaaatccccaagattggctggtacagccgctttgctaggcatcctttctatggctctgcaggagttaattcaggagtcatgttaatgaatttaactcggataagaagtacccagttcaagaacagcatgattccaacaggcctggcttgggaggacatgttgtaccctctgtaccagaagtacaagaatgccatcacgtggggagaccaggatttattaaatattattttttatttcaacccagagggtttctatgtatttcccgggccagtggactatcgtgcgataacgggtgtgcggaagcactgggggggagcttgggtgctggctgctggcgggggttacccgacgttag

SEQ ID NO: 416012 - DNA, 452 bp, Homo sapiens
atggcaaaaccccgtctctactaaaaataaaaaaaatagctgcgcatggcatcacacgtctgtcatcccagctacttgggaggctgaggcatgagaattgcttgaacctgggaagtggaggttgcagtgagctgagattgcaccactgcactccattccaccttgggtgacagagccagactccatctaaaaaaaaattaagtcatccacaagtgtattttcttttcttataggaaaaacaattccaatagtttaaatcgaatgaatggtgttatgtttcctggaaattcaccaagctatactgagaggtgagattctagatttttaataacctacagagtttgcattgtcctgattttgagtagcaggcttagtgtactttttaaaaattgggcattttatgcaccccataggatgaactacatagaattagttcatttggtaaggcatgg

SEQ ID NO: 416013 - DNA, 283 bp, Homo sapiens
gtgattttagaaacaaaaatgatgaaactttatgttgtagtacttttcttcatactaaatcactgatttttgttattgcagaatgtgatggttgttagctgtgtttatccttcttcagataagtatattttttctatttctagtatattatttactatatttaatcattttattgcttctaatatattattcttaaaatagactgaatttatttaatatgtaattaagtgtgataacatacttgtgaacctaccattcagtccccaaagtagaatattactaa

SEQ ID NO: 416014 - DNA, 3376 bp, Homo sapiens
actgtacaaatgctttatttctattcaatatttagaagacagttataaacaagatgcattcaatagcatggtggcagatgaacatcaggaaggaacatccatgagcttccatccacggaacctcaccatggatacgcttgtgatcaagggcctggtctcccctcaagacacggtcacagatcagaggccacaccatcctagcagtggagcagtaccagctgggacagggtccttctgtgacacctgctgcatcaccaggctgggtgaacggacacaattgccagaactcacagaatagaagtatcagcaccgaaacctcacaggaaaaatggtaagttctaagtttctccattaatagtaactctcagattaatctctgtcatccatcgcttctccaagaaatgactttttagggtgatgtgccaggcgccatgttggagggctggtggtagcggcttggggaggtgctcgctctgtcggtcttgctctctcgcacgcttcccccggctcccttcgtttcccccccccggtcgcctgcgtgccggagtgtgtgcgagggagggggagggcgtcgggggggtggggggaggcgttccggtccccaagagacccgcggagggaggcggaggctgtgagggactccgggaagccatggacgtcgagaggctccaggaggcgctgaaagattttgagaagagggggaaaaaggaagtttgtcctgtcctggatcagtttctttgtcatgtagccaagactggagaaacaatgattcagtggtcccaatttaaaggctattttattttcaaactggagaaagtgatggatgatttcagaacttcagctcctgagccaagaggtcctcccaaccctaatgtcgaatatattccctttgatgaaatgaaggaaagaatactgaaaattgtcactggatttaatggtatcccttttactattcagcgactatgtgaattgttaacagatccaaggagaaactatacaggaacagacaaatttctcagaggagtagaaaagaatgtgatggttgttagctgtgtttatccttcttcagagaaaaacaattccaatagtttaaatcgaatgaatggtgttatgtttcctggaaattcaccaagctatactgagaggtctaatataaatgggcctgggacacccaggccacttaatcgaccaaaggtttctttgtcagcccccatgacaacaaatgggttgcctgagagcacagacagcaaagaggcaaatttgcagcaaaatgaggagaaaaatcacagtgactcttcgacctctgaatcagaagtttcctcagtgagccctttgaaaaataaacatccagatgaagatgctgtggaagctgaggggcatgaggtaaaaagactcaggtttgacaaagaaggtgaagtcagagaaacagccagtcaaacgacttccagcgaaatttcttcagttatggtaggagaaacagaagcatcatcttcatctcaggataaagacaaagatagccgttgtacccggcagcactgtacagaagaggatgaagaagaggatgaagaggaagaagaagagtcttttatgacatcaagagaaatgatcccagaaagaaaaaatcaagaaaaagaatctgatgatgccttaactgtgaatgaagagacttctgaggaaaataatcaaatggaggaatctgatgtgtctcaagctgagaaagatttgctacattctgaaggtagtgaaaacgaaggccctgtaagtagtagttcttctgactgccgtgaaacagaagaattagtaggatccaattccagtaaaactggagagattctttcagaatcatccatggaaaatgatgacgaagccacagaagtcaccgatgaaccaatggaacaagactaactatttagaaacatttagatgcagtattttacatacagttctggttttaacactgtataaaacttttgtgtaataaaatggacctttagttttacaagagaagcaggttgtaaaataaagtactttatggataattcctgaaagagttgtacatgtaagaactgtgaatatcagctcctctgggtcctgcttaccttaccgctgacttttctttctttctttttttggtctgggcaaatcagtggtttgtgtatagatttttttttttttttaatttaggattgaagtttttaaactggaaagtaattacaattttgaaaagttttttgagattatcacatttagtttatacatatgcaagaagctttttgtcttgtctctttctgatagctctagcagttttcatattttggtcatagtttcaacattttaacatgtgaattatagggtttcatgctggtttccagattttattgtttggctacgtacaatggaactttaagtcatatatacatacatatatatatatatatatatataattctaaggggggaaatgttatatttttctgtttctataagagatgaatacagtggatactttttctattggtaatgattgagttcacctctttcagaagacattttctttctcttctgagtaattgaaataaaatctggcccttgtgaaaccctggaaatcttaagtctgttgaaataccaggttaaacacattccaagagatctgttcaaactcaaattcttttgtatacttctgaggtgcctgagaaaaagacttcattatttatgagaaaatatgctttatcttggaaattgtgttcaaatgttagcttactattttgtagaatgaatgtttatgaagctgatatgagaccatctcagaagaaccaagcaggttccttgaccttttgcttgcttttctgaacattgtgaatattacacatgtctttctaaattattctagggtatgcaaatgtcaatggtatgaaacaccactgtactggaagaattaatatattactttagtatgtacctgagctaaatgactgaagctttaggggtgcatagaaaccaccataatttgtatgacattttgaagtgaattaaatatttttgaacatgcttcttcgacagccagtgttatatttttcagatcaacacaaagcacaatgattactcgaaattcagtattttcaaatttacatatttaaagtcatgcaagctgtaacttccctgtcaaaattactggctgccaaatttatacctgtttcttcagctgtaccttttgatatttaaagtttttaaatttctgtaaagtagattttgtagaatgtaatgtgttcactgcctttgtgaagcggtatataattgtataatttctgtgtgtaaactgaatgcttgggctttcaatacagtattcatataaagcaataaatattaatgttatgaaa

SEQ ID NO: 416015 - DNA, 5722 bp, Homo sapiens
catgctcaaatcagctgtgctttttagccacaggaagatccaattccacatcttcactgaagactctctgaagcccgagtttgataagcagttacgccagtggcctgactcatatacaaagaagtttgagcacagaatctaccccatcacattttctgttggaaaccctcaggagtggaagaaattgttcaaaccctgtgctgcccagagactctttcttccggtgattttaaaggatgtggactcacttctctacgtggacaccgatgtcctctttctgagacctgttgatgacatctggaagcttctgaggctgtttaattccacccagcttgcagccatggcccctgagcacgaaatccccaagattggctggtacagccgctttgctaggcatcctttctatggctctgcaggagttaattcaggagtcatgttaatgaatttaactcggataagaagtacccagttcaagaacagcatgattccaacaggcctggcttgggaggacatgttgtaccctctgtaccagaagtacaagaatgccatcacgtggggagaccaggatttattaaatattattttttatttcaacccagagtgtctctatgtattcccctgccagtggaactaccgtcccgatcactgcatgtacggaagcaactgcagagaggctgagcatgaaggtgtgtctgttctgcatggaaaccgaggcgtctaccatgacgataagcaaccaacgttcagagcactctatgaagcaatacgggatattttgagaagagggggaaaaaggaagtttgtcctgtcctggatcagtttctttgtcatgtagccaagactggagaaacaatgattcagtggtcccaatttaaaggctattttattttcaaactggagaaagtgatggatgatttcagaacttcagctcctgagccaagaggtcctcccaaccctaatgtcgaatatattccctttgatgaaatgaaggaaagaatactgaaaattgtcactggatttaatggtatcccttttactattcagcgactatgtgaattgttaacagatccaaggagaaactatacaggaacagacaaatttctcagaggagtagaaaagaatgtgatggttgttagctgtgtttatccttcttcagagaaaaacaattccaatagtttaaatcgaatgaatggtgttatgtttcctggaaattcaccaagctatactgagaggtctaatataaatgggcctgggacacccaggccacttaatcgaccaaaggtttctttgtcagcccccatgacaacaaatgggttgcctgagagcacagacagcaaagaggcaaatttgcagcaaaatgaggagaaaaatcacagtgactcttcgacctctgaatcagaagtttcctcagtgagccctttgaaaaataaacatccagatgaagatgctgtggaagctgaggggcatgaggtaaaaagactcaggtttgacaaagaaggtgaagtcagagaaacagccagtcaaacgacttccagcgaaatttcttcagttatggtaggagaaacagaagcatcatcttcatctcaggataaagacaaagatagccgttgtacccggcagcactgtacagaagaggatgaagaagaggatgaagaggaagaagaaggtatttagagaccatctgtaaaagggtggagtaaggagatcctcaaattcttgtacttcatttttttcgtgaaagaattttacgtaatggaactccttataatgctgatgttgggcttttctcccacctgtatgtagttgctgctgaatttcaggggatgtgatttgaactatagaatatcagaattcatgaaacttaactgtggaggtattttgaaaatacaatttaactacaacaacatttgcttatttttagagtcttttatgacatcaagagaaatgatcccagaaagaaaaaatcaagaaaaagaatctgatgatgccttaactgtgaatgaagagacttctgaggaaaataatcaaatggaggaatctgatgtgtctcaagctgagaaagatttgctacattctgaaggtagtgaaaacgaaggccctgtaagtagtagttcttctgactgccgtgaaacagaagaattagtaggatccaattccagtaaaactggagagattctttcagaatcatccatggaaaatgatgacgaagccacagaagtcaccgatgaaccaatggaacaagactaactatttagaaacatttagatgcagtattttacatacagttctggttttaacactgtataaaacttttgtgtaataaaatggacctttagttttacaagagaagcaggttgtaaaataaagtactttatggataattcctgaaagagttgtacatgtaagaactgtgaatatcagctcctctgggtcctgcttaccttaccgctgacttttctttctttctttttttggtctgggcaaatcagtggtttgtgtatagatttttttttttttttaatttaggattgaagtttttaaactggaaagtaattacaattttgaaaagttttttgagattatcacatttagtttatacatatgcaagaagctttttgtcttgtctctttctgatagctctagcagttttcatattttggtcatagtttcaacattttaacatgtgaattatagggtttcatgctggtttccagattttattgtttggctacgtacaatggaactttaagtcatatatacatacatatatatatatatatatatataattctaaggggggaaatgttatatttttctgtttctataagagatgaatacagtggatactttttctattggtaatgattgagttcacctctttcagaagacattttctttctcttctgagtaattgaaataaaatctggcccttgtgaaaccctggaaatcttaagtctgttgaaataccaggttaaacacattccaagagatctgttcaaactcaaattcttttgtatacttctgaggtgcctgagaaaaagacttcattatttatgagaaaatatgctttatcttggaaattgtgttcaaatgttagcttactattttgtagaatgaatgtttatgaagctgatatgagaccatctcagaagaaccaagcaggttccttgaccttttgcttgcttttctgaacattgtgaatattacacatgtctttctaaattattctagggtatgcaaatgtcaatggtatgaaacaccactgtactggaagaattaatatattactttagtatgtacctgagctaaatgactgaagctttaggggtgcatagaaaccaccataatttgtatgacattttgaagtgaattaaatatttttgaacatgcttcttcgacagccagtgttatatttttcagatcaacacaaagcacaatgattactcgaaattcagtattttcaaatttacatatttaaagtcatgcaagctgtaacttccctgtcaaaattactggctgccaaatttatacctgtttcttcagctgtaccttttgatatttaaagtttttaaatttctgtaaagtagattttgtagaatgtaatgtgttcactgcctttgtgaagcggtatataattgtataatttctgtgtgtaaactgaatgcttgggctttcaatacagtattcatataaagcaataaatattaatgttatgaaatatttgactacatttttatcaaaatatgaaagaatccccccttttttagtttcagatacctgaactacacagatgagcttctaaaactgatgcaaacagtttctgacactgtataatatgcttttgggtgatttggggggcaaccacaagttttgcgttttgactacttaaatcatcatggctataaataccaaaacgatttggatccatttatgtttgtaggataatatactactgactgacttgactgtcaggttcacaacagctagatgatatatttatgactatgtctaatagttgaaataaaatctgaatattgatttactatacccaagaggggagaaaaattaaccattgtaaatttttaaaaattttttcaaaaatgttaaaatgaggcaaatttaagtttacaaattttgaaattttcttttgaatatttatgaaattgtcagtaaacttacctaagatcctgtgaccttttgatattttttattttaattgtagtgccatggaccatttgtaaacaaattgatttacttttgttggttgtaagttgaagatttagcattatgactttgaggtctgtggttttatttgtaaacttgcaattgctatatttgcaagggcaaatgtatttctttattaaataaagtacaataatggtgaatgtaccaaaatgacatcacttaactctatgagagatctgcattttaatctatagtttaatagttttaatatttattagatattcatatgttgatcatagatcaaacttgttgctgtttatacagataattgtagaatgctcatggaatatctttagggtaggtggaatacttctgtagttaaattgggaaaccttgttcagctggttttagatattgatggccatttggaagtaaatttccgcaggtattcataggtgcacttaacacagactttgcttaatgaaaatgtcagttctaatagtaactgattcacttctgaacagaagtgattttaggcatatttcttaacatatatcaagcaaagtcctgttaaaagatctaaatgaagaatggagacctcagtgattaaagatattttgtttctgaccttgagcagattgcttacctgttctctagactataacccaacatgtaaaaaaaatttgaagatggtgatgaggaaagtgagatatatatatatatatgtattatgtttctagcacttttcccttttaaaaagtgaaaatatccttgtacatttttgaaaaatatattttcagttctgaaaaatgtagcagaagtagtgaaaatgtcatattttaaatgttgattattagataaatttaacctgcttagggtttattgtaactacacctttcagacgtgtgttttggagtagtggaattgccagccaggccctgtggcttggaaaggcatcccagaaatcctcggccagaaggtgtggcttgttaaagcattgagattcagagtattttgttttgccggtgtagataggcatgtatttatgcatttttgcatttgtaaaatcaacttttcaaataatgtaaatgtaatatactagtttacttaaaggtacttgggcagaatctaaagctgctacaatgtttgattatgaaaaaaatgtaacatggtaaggatgaaaatgcaacttacaaaaccaaaggaattaaaaattttcggtagtgtttcaaattgtcttctgaacaggaatttaacattggttttgatgaagtgagggtcagttctcaagatttgtgctaatcataaaatgaatgaatgcaaaacaccttgtaatttcatatggaattataaaaattaggtttgctgggttttggcctaataagagtgctagtatgtattggttagaatacatcttactatttcacattttaaaaatcagtacactcttcaggattttcttttatttcaacttggagcctagattactttgccaaatgtattattttcataatgcaataaaatataaattagaata

SEQ ID NO: 416016 - DNA, 5753 bp, Homo sapiens
catgctcaaatcagctgtgctttttagccacaggaagatccaattccacatcttcactgaagactctctgaagcccgagtttgataagcagttacgccagtggcctgactcatatacaaagaagtttgagcacagaatctaccccatcacattttctgttggaaaccctcaggagtggaagaaattgttcaaaccctgtgctgcccagagactctttcttccggtgattttaaaggatgtggactcacttctctacgtggacaccgatgtcctctttctgagacctgttgatgacatctggaagcttctgaggctgtttaattccacccagcttgcagccatggcccctgagcacgaaatccccaagattggctggtacagccgctttgctaggcatcctttctatggctctgcaggagttaattcaggagtcatgttaatgaatttaactcggataagaagtacccagttcaagaacagcatgattccaacaggcctggcttgggaggacatgttgtaccctctgtaccagaagtacaagaatgccatcacgtggggagaccaggatttattaaatattattttttatttcaacccagagtgtctctatgtattcccctgccagtggaactaccgtcccgatcactgcatgtacggaagcaactgcagagaggctgagcatgaaggtgtgtctgttctgcatggaaaccgaggcgtctaccatgacgataagcaaccaacgttcagagcactctatgaagcaatacgggatattttgagaagagggggaaaaaggaagtttgtcctgtcctggatcagtttctttgtcatgtagccaagactggagaaacaatgattcagtggtcccaatttaaaggctattttattttcaaactggagaaagtgatggatgatttcagaacttcagctcctgagccaagaggtcctcccaaccctaatgtcgaatatattccctttgatgaaatgaaggaaagaatactgaaaattgtcactggatttaatggtatcccttttactattcagcgactatgtgaattgttaacagatccaaggagaaactatacaggaacagacaaatttctcagaggagtagaaaagaatgtgatggttgttagctgtgtttatccttcttcagagaaaaacaattccaatagtttaaatcgaatgaatggtgttatgtttcctggaaattcaccaagctatactgagaggtctaatataaatgggcctgggacacccaggccacttaatcgaccaaaggtttctttgtcagcccccatgacaacaaatgggttgcctgagagcacagacagcaaagaggaaggccaaaaaatttttgcccccaggccaaaaaaaattggaagggaagaaaaaaaaaatcacagttgactcttcgacctctgaatcagaagtttcctcagtgagccctttgaaaaataaacatccagatgaagatgctgtggaagctgaggggcatgaggtaaaaagactcaggtttgacaaagaaggtgaagtcagagaaacagccagtcaaacgacttccagcgaaatttcttcagttatggtaggagaaacagaagcatcatcttcatctcaggataaagacaaagatagccgttgtacccggcagcactgtacagaagaggatgaagaagaggatgaagaggaagaagaaggtatttagagaccatctgtaaaagggtggagtaaggagatcctcaaattcttgtacttcatttttttcgtgaaagaattttacgtaatggaactccttataatgctgatgttgggcttttctcccacctgtatgtagttgctgctgaatttcaggggatgtgatttgaactatagaatatcagaattcatgaaacttaactgtggaggtattttgaaaatacaatttaactacaacaacatttgcttatttttagagtcttttatgacatcaagagaaatgatcccagaaagaaaaaatcaagaaaaagaatctgatgatgccttaactgtgaatgaagagacttctgaggaaaataatcaaatggaggaatctgatgtgtctcaagctgagaaagatttgctacattctgaaggtagtgaaaacgaaggccctgtaagtagtagttcttctgactgccgtgaaacagaagaattagtaggatccaattccagtaaaactggagagattctttcagaatcatccatggaaaatgatgacgaagccacagaagtcaccgatgaaccaatggaacaagactaactatttagaaacatttagatgcagtattttacatacagttctggttttaacactgtataaaacttttgtgtaataaaatggacctttagttttacaagagaagcaggttgtaaaataaagtactttatggataattcctgaaagagttgtacatgtaagaactgtgaatatcagctcctctgggtcctgcttaccttaccgctgacttttctttctttctttttttggtctgggcaaatcagtggtttgtgtatagatttttttttttttttaatttaggattgaagtttttaaactggaaagtaattacaattttgaaaagttttttgagattatcacatttagtttatacatatgcaagaagctttttgtcttgtctctttctgatagctctagcagttttcatattttggtcatagtttcaacattttaacatgtgaattatagggtttcatgctggtttccagattttattgtttggctacgtacaatggaactttaagtcatatatacatacatatatatatatatatatatataattctaaggggggaaatgttatatttttctgtttctataagagatgaatacagtggatactttttctattggtaatgattgagttcacctctttcagaagacattttctttctcttctgagtaattgaaataaaatctggcccttgtgaaaccctggaaatcttaagtctgttgaaataccaggttaaacacattccaagagatctgttcaaactcaaattcttttgtatacttctgaggtgcctgagaaaaagacttcattatttatgagaaaatatgctttatcttggaaattgtgttcaaatgttagcttactattttgtagaatgaatgtttatgaagctgatatgagaccatctcagaagaaccaagcaggttccttgaccttttgcttgcttttctgaacattgtgaatattacacatgtctttctaaattattctagggtatgcaaatgtcaatggtatgaaacaccactgtactggaagaattaatatattactttagtatgtacctgagctaaatgactgaagctttaggggtgcatagaaaccaccataatttgtatgacattttgaagtgaattaaatatttttgaacatgcttcttcgacagccagtgttatatttttcagatcaacacaaagcacaatgattactcgaaattcagtattttcaaatttacatatttaaagtcatgcaagctgtaacttccctgtcaaaattactggctgccaaatttatacctgtttcttcagctgtaccttttgatatttaaagtttttaaatttctgtaaagtagattttgtagaatgtaatgtgttcactgcctttgtgaagcggtatataattgtataatttctgtgtgtaaactgaatgcttgggctttcaatacagtattcatataaagcaataaatattaatgttatgaaatatttgactacatttttatcaaaatatgaaagaatccccccttttttagtttcagatacctgaactacacagatgagcttctaaaactgatgcaaacagtttctgacactgtataatatgcttttgggtgatttggggggcaaccacaagttttgcgttttgactacttaaatcatcatggctataaataccaaaacgatttggatccatttatgtttgtaggataatatactactgactgacttgactgtcaggttcacaacagctagatgatatatttatgactatgtctaatagttgaaataaaatctgaatattgatttactatacccaagaggggagaaaaattaaccattgtaaatttttaaaaattttttcaaaaatgttaaaatgaggcaaatttaagtttacaaattttgaaattttcttttgaatatttatgaaattgtcagtaaacttacctaagatcctgtgaccttttgatattttttattttaattgtagtgccatggaccatttgtaaacaaattgatttacttttgttggttgtaagttgaagatttagcattatgactttgaggtctgtggttttatttgtaaacttgcaattgctatatttgcaagggcaaatgtatttctttattaaataaagtacaataatggtgaatgtaccaaaatgacatcacttaactctatgagagatctgcattttaatctatagtttaatagttttaatatttattagatattcatatgttgatcatagatcaaacttgttgctgtttatacagataattgtagaatgctcatggaatatctttagggtaggtggaatacttctgtagttaaattgggaaaccttgttcagctggttttagatattgatggccatttggaagtaaatttccgcaggtattcataggtgcacttaacacagactttgcttaatgaaaatgtcagttctaatagtaactgattcacttctgaacagaagtgattttaggcatatttcttaacatatatcaagcaaagtcctgttaaaagatctaaatgaagaatggagacctcagtgattaaagatattttgtttctgaccttgagcagattgcttacctgttctctagactataacccaacatgtaaaaaaaatttgaagatggtgatgaggaaagtgagatatatatatatatatgtattatgtttctagcacttttcccttttaaaaagtgaaaatatccttgtacatttttgaaaaatatattttcagttctgaaaaatgtagcagaagtagtgaaaatgtcatattttaaatgttgattattagataaatttaacctgcttagggtttattgtaactacacctttcagacgtgtgttttggagtagtggaattgccagccaggccctgtggcttggaaaggcatcccagaaatcctcggccagaaggtgtggcttgttaaagcattgagattcagagtattttgttttgccggtgtagataggcatgtatttatgcatttttgcatttgtaaaatcaacttttcaaataatgtaaatgtaatatactagtttacttaaaggtacttgggcagaatctaaagctgctacaatgtttgattatgaaaaaaatgtaacatggtaaggatgaaaatgcaacttacaaaaccaaaggaattaaaaattttcggtagtgtttcaaattgtcttctgaacaggaatttaacattggttttgatgaagtgagggtcagttctcaagatttgtgctaatcataaaatgaatgaatgcaaaacaccttgtaatttcatatggaattataaaaattaggtttgctgggttttggcctaataagagtgctagtatgtattggttagaatacatcttactatttcacattttaaaaatcagtacactcttcaggattttcttttatttcaacttggagcctagattactttgccaaatgtattattttcataatgcaataaaatataaattagaata

SEQ ID NO: 416017 - DNA, 3696 bp, Homo sapiens
actgtacaaatgctttatttctattcaatatttagaagacagttataaacaagatgcattcaatagcatggtggcagatgaacatcaggaaggaacatccatgagcttccatccacggaacctcaccatggatacgcttgtgatcaagggcctggtctcccctcaagacacggtcacagatcagaggccacaccatcctagcagtggagcagtaccagctgggacagggtccttctgtgacacctgctgcatcaccaggctgggtgaacggacacaattgccagaactcacagaatagaagtatcagcaccgaaacctcacaggaaaaatggtaagttctaagtttctccattaatagtaactctcagattaatctctgtcatccatcgcttctccaagaaatgactttttagggtgatgtgccaggcgccatgttggagggctggtggtagcggcttggggaggtgctcgctctgtcggtcttgctctctcgcacgcttcccccggctcccttcgtttcccccccccggtcgcctgcgtgccggagtgtgtgcgagggagggggagggcgtcgggggggtggggggaggcgttccggtccccaagagacccgcggagggaggcggaggctgtgagggactccgggaagccatggacgtcgagaggctccaggaggcgctgaaagattttgagaagagggggaaaaaggaagtttgtcctgtcctggatcagtttctttgtcatgtagccaagactggagaaacaatgattcagtggtcccaatttaaaggctattttattttcaaactggagaaagtgatggatgatttcagaacttcagctcctgagccaagaggtcctcccaaccctaatgtcgaatatattccctttgatgaaatgaaggaaagaatactgaaaattgtcactggatttaatggtatcccttttactattcagcgactatgtgaattgttaacagatccaaggagaaactatacaggaacagacaaatttctcagaggagtagaaaagaatgtgatggttgttagctgtgtttatccttcttcagagaaaaacaattccaatagtttaaatcgaatgaatggtgttatgtttcctggaaattcaccaagctatactgagaggtctaatataaatgggcctgggacacccaggccacttaatcgaccaaaggtttctttgtcagcccccatgacaacaaatgggttgcctgagagcacagacagcaaagaggcaaatttgcagcaaaatgaggagaaaaatcacagtgactcttcgacctctgaatcagaagtttcctcagtgagccctttgaaaaataaacatccagatgaagatgctgtggaagctgaggggcatgaggtaaaaagactcaggtttgacaaagaaggtgaagtcagagaaacagccagtcaaacgacttccagcgaaatttcttcagttatggtaggagaaacagaagcatcatcttcatctcaggataaagacaaagatagccgttgtacccggcagcactgtacagaagaggatgaagaagaggatgaagaggaagaagaagagtcttttatgacatcaagagaaatgatcccagaaagaaaaaatcaagaaaaagaatctgatgatgccttaactgtgaatgaagagacttctgaggaaaataatcaaatggaggaatctgatgtgtctcaagctgagaaagatttgctacattctgaaggtagtgaaaacgaaggccctgtaagtagtagttcttctgactgccgtgaaacagaagaattagtaggatccaattccagtaaaactggagagattctttcagaatcatccatggaaaatgatgacgaagccacagaagtcaccgatgaaccaatggaacaagactaactatttagaaacatttagatgcagtattttacatacagttctggttttaacactgtataaaacttttgtgtaataaaatggacctttagttttacaagagaagcaggttgtaaaataaagtactttatggataattcctgaaagagttgtacatgtaagaactgtgaatatcagctcctctgggtcctgcttaccttaccgctgacttttctttctttctttttttggtctgggcaaatcagtggtttgtgtatagatttttttttttttttaatttaggattgaagtttttaaactggaaagtaattacaattttgaaaagttttttgagattatcacatttagtttatacatatgcaagaagctttttgtcttgtctctttctgatagctctagcagttttcatattttggtcatagtttcaacattttaacatgtgaattatagggtttcatgctggtttccagattttattgtttggctacgtacaatggaactttaagtcatatatacatacatatatatatatatatatatataattctaaggggggaaatgttatatttttctgtttctataagagatgaatacagtggatactttttctattggtaatgattgagttcacctctttcagaagacattttctttctcttctgagtaattgaaataaaatctggcccttgtgaaaccctggaaatcttaagtctgttgaaataccaggttaaacacattccaagagatctgttcaaactcaaattcttttgtatacttctgaggtgcctgagaaaaagacttcattatttatgagaaaatatgctttatcttggaaattgtgttcaaatgttagcttactattttgtagaatgaatgtttatgaagctgatatgagaccatctcagaagaaccaagcaggttccttgaccttttgcttgcttttctgaacattgtgaatattacacatgtctttctaaattattctagggtatgcaaatgtcaatggtatgaaacaccactgtactggaagaattaatatattactttagtatgtacctgagctaaatgactgaagctttaggggtgcatagaaaccaccataatttgtatgacattttgaagtgaattaaatatttttgaacatgcttcttcgacagccagtgttatatttttcagatcaacacaaagcacaatgattactcgaaattcagtattttcaaatttacatatttaaagtcatgcaagctgtaacttccctgtcaaaattactggctgccaaatttatacctgtttcttcagctgtaccttttgatatttaaagtttttaaatttctgtaaagtagattttgtagaatgtaatgtgttcactgcctttgtgaagcggtatataattgtataatttctgtgtgtaaactgaatgcttgggctttcaatacagtattcatataaagcaataaatattaatgttatgaaaaaaaaaaaaaaaaaaaaaaaaaaaaaaaaaaaaaaaaaaaaaaaagaaaaaaaaaaaacaagaaaacccacacaaaaaaccaaccagtcaacagcagccaccacaaatgcactaaagacacccacgagctgcgccctacagatcggccgacctccacatgaacctccgcccctgacccaccacacacacctccgtccacccggccaaacccggcacgccgagcaaccggccccagacccctgatccaggcacctcatcccactcggccccaaaacacatctcccaactcaacagcccacacacacccccggcgacacgca

SEQ ID NO: 416018 - DNA, 1171 bp, Homo sapiens
gactgcctcggtgttgtagaagctggcgatcatccccaccatgtacgacaggctggcggtcaggaccgacagtgcaacaaggttccagggtgctttcgccggaagtccccacaacagctgaggtcagttctaatagtaactgattcacttctgaacagaagtgattttaggcatatttcttaacatatatcaagcaaagtcctgttaaaagatctaaatgaagaatggagacctcagtgattaaagatattttgtttctgaccttgagcagattgcttacctgttctctagactataacccaacatgtaaaaaaaatttgaagatggtgatgaggaaagtgagatatatatatatatatgtattatgtttctagcacttttcccttttaaaaagtgaaaatatccttgtacatttttgaaaaatatattttcagttctgaaaaatgtagcagaagtagtgaaaatgtcatattttaaatgttgattattagataaatttaacctgcttagggtttattgtaactacacctttcagacgtgtgttttggagtagtggaattgccagccaggccctgtggcttggaaaggcatcccagaaatcctcggccagaaggtgtggcttgttaaagcattgagattcagagtattttgttttgccggtgtagataggcatgtatttatgcatttttgcatttgtaaaatcaacttttcaaataatgtaaatgtaatatactagtttacttaaaggtacttgggcagaatctaaagctgctacaatgtttgattatgaaaaaaatgtaacatggtaaggatgaaaatgcaacttacaaaaccaaaggaattaaaaattttcggtagtgtttcaaattgtcttctgaacaggaatttaacattggttttgatgaagtgagggtcagttctcaagatttgtgctaatcataaaatgaatgaatgcaaaacaccttgtaatttcatatggaattataaaaattaggtttgctgggttttggcctaataagagtgctagtatgtattggttagaatacatcttactatttcacattttaaaaatcagtacactcttcaggattttcttttatttcaacttggagcctagattactttgccaaatgtattattttcataatgcaataaaatataaattagaata

SEQ ID NO: 416019 - DNA, 1133 bp, Homo sapiens
tataacttgaatcctctagacgaaccgccaatataaacaaaatttaaggcccgcgtgcgacccatacttttgcttaatgaaaatgtcagttctaatagtaactgattcacttctgaacagaagtgattttaggcatatttcttaacatatatcaagcaaagtcctgttaaaagatctaaatgaagaatggagacctcagtgattaaagatattttgtttctgaccttgagcagattgcttacctgttctctagactataacccaacatgtaaaaaaaatttgaagatggtgatgaggaaagtgagatatatatatatatatgtattatgtttctagcacttttcccttttaaaaagtgaaaatatccttgtacatttttgaaaaatatattttcagttctgaaaaatgtagcagaagtagtgaaaatgtcatattttaaatgttgattattagataaatttaacctgcttagggtttattgtaactacacctttcagacgtgtgttttggagtagtggaattgccagccaggccctgtggcttggaaaggcatcccagaaatcctcggccagaaggtgtggcttgttaaagcattgagattcagagtattttgttttgccggtgtagataggcatgtatttatgcatttttgcatttgtaaaatcaacttttcaaataatgtaaatgtaatatactagtttacttaaaggtacttgggcagaatctaaagctgctacaatgtttgattatgaaaaaaatgtaacatggtaaggatgaaaatgcaacttacaaaaccaaaggaattaaaaattttcggtagtgtttcaaattgtcttctgaacaggaatttaacattggttttgatgaagtgagggtcagttctcaagatttgtgctaatcataaaatgaatgaatgcaaaacaccttgtaatttcatatggaattataaaaattaggtttgctgggttttggcctaataagagtgctagtatgtattggttagaatacatcttactatttcacattttaaaaatcagtacactcttcaggattttcttttatttcaacttggagcctagattactttgccaaatgtattattttcataatgcaataaaatataaattagaata

SEQ ID NO: 416020 - DNA, 1268 bp, Homo sapiens
catgctcaaatcagctgtgctttttagccacaggaagatccaattccacatcttcactgaagactctctgaagcccgagtttgataagcagttacgccagtggcctgactcatatacaaagaagtttgagcacagaatctaccccatcacattttctgttggaaaccctcaggagtggaagaaattgttcaaaccctgtgctgcccagagactctttcttccggtgattttaaaggatgtggactcacttctctacgtggacaccgatgtcctctttctgagacctgttgatgacatctggaagcttctgaggctgtttaattccacccagcttgcagccatggcccctgagcacgaaatccccaagattggctggtacagccgctttgctaggcatcctttctatggctctgcaggagttaattcaggagtcatgttaatgaatttaactcggataagaagtacccagttcaagaacagcatgattccaacaggcctggcttgggaggacatgttgtaccctctgtaccagaagtacaagaatgccatcacgtggggagaccaggatttattaaatattattttttatttcaacccagagtgtctctatgtattcccctgccagtggaactaccgtcccgatcactgcatgtacggaagcaactgcagagaggctgagcatgaaggtgtgtctgttctgcatggaaaccgaggcgtctaccatgacgataagcaaccaacgttcagagcactctatgaagcaatacgggattttccctttcaagacaatctctttcaatccatgtattacccccttcagctgaagtttttggagactgtgcacactttatgtggacgaatcccgcaagtttttctgaagcaaattgagaaaacaatgaaaagggcttatgagaaacacgtcatcatccatgttggccccaaccagatgcactgaatattttgtcttgttgcaagtcaattaggtgtcttgtgaacaaggaaatactaatctctaagctgcctgggtctttttgtgtgaatatttaatggtgctccatgactgttgagttttaaaaacctcgttaaattttgccaaatcagttgcccccaaaagggaatatgcttttccttatttttttttctaaaatgctatttatctctaaggaaaaaaaaaaaagactattactcatttaacattgtttaagcaggttgagctagctgtgaaaatagcttttgtgagccttctaattccttaacgtctgagacca

SEQ ID NO: 416021 - DNA, 995 bp, Homo sapiens
  misc_feature (915)..(915): n is a, c, g, or t
  misc_feature (920)..(920): n is a, c, g, or t
  misc_feature (937)..(937): n is a, c, g, or t
actgtacaaatgctttatttctattcaatatttagaagacagttataaacaagatgcattcaatagcatggtggcagatgaacatcaggaaggaacatccatgagcttccatccacggaacctcaccatggatacgcttgtgatcaagggcctggtctcccctcaagacacggtcacagatcagaggccacaccatcctagcagtggagcagtaccagctgggacagggtccttctgtgacacctgctgcatcaccaggctgggtgaacggacacaattgccagaactcacagaatagaagtatcagcaccgaaacctcacaggaaaaatggtaagttctaagtttctccattaatagtaactctcagattaatctctgtcatccatcgcttctccaagaaatgactttttagggtgatgtgccaggcgccatgttggagggctggtggtagcggcttggggaggtgctcgctctgtcggtcttgctctctcgcacgcttcccccggctcccttcgtttcccccccccggtcgcctgcgtgccggagtgtgtgcgagggagggggagggcgtcgggggggtggggggaggcgttccggtccccaagagacccgcggagggaggcggaggctgtgagggactccgggaagccatggacgtcgagaggctccaggaggcgctgaaagattttgagaagagggggaaaaaggaagtttgtcctgtcctggatcagtttctttgtcatgtagccaagactggagaaacaattatcccttttactattcagcgactatgtgaattgttaacagatccaaggagaaactatacaggaacagacaaatttctcagaggagtagaaaagaatgtgatggttgttagctgtgtttatccttcttcagaaaaaacatttccattngtttnaaatcgatgaatggtgntatgtttcctggaaattcaccagcctttcttataggcctaaatataatgggccctgga

SEQ ID NO: 416022 - DNA, 638 bp, Homo sapiens
agcatcgcaacttttaagtgtctcagtatgcctttttcagggctttgaagtcatctttccgcgccctaatttcgaggtggttgccttcactgttctgatgcacgccttccacgcaacaggcttgagaacagtgggcttacatacttagagtagagagatttcagcgttgtgagaattattctttgacattcagaatcatttggggacggcaacttggggtagttggtgcttcttagaaaggcagatttatggacttagatgaacaattggtgggagtcggggcctggggatttttattttcactggattcccagcttaatataatgctggtgttcccccggaccacacttcgagaagcactgcgttaaaaatggtttgtgaagttgagtgccccctttaggaggattcttgttatctgtaaagagggtgacatgttggaagtagaacttggaggattgaggtggtaatttggttgagaggccttatttttttaattttgtatttaattgatttttaataaggtaaaggactaggaggaaagtttgtttttagagcgcttttgagaaaactgataacgtttttttttcttccttcatctagattttgagaagagggggaaaaaggaagtttgtcctgtc

SEQ ID NO: 416023 - DNA, 438 bp, Homo sapiens
catttccgttactaaataaactttttttttgtcatctttcagtttccctttcaagacaatctctttcaatccatgtattacccccttcagctgaagtttttggagactgtgcacactttatgtggacgaatcccgcaagtttttctgaagcaaattgagaaaacaatgaaaagggcttatgagaaacacgtcatcatccatgttggccccaaccagatgcactgaatattttgtcttgttgcaagtcaattaggtgtcttgtgaacaaggaaatactaatctctaagctgcctgggtctttttgtgtgaatatttaatggtgctccatgactgttgagttttaaaaacctcgttaaattttgccaaatcagttgcccccaaaagggaatatgcttttccttatttttttttctaaaatgctatttatctctaaggaaa

SEQ ID NO: 416024 - DNA, 5380 bp, Homo sapiens
actgtacaaatgctttatttctattcaatatttagaagacagttataaacaagatgcattcaatagcatggtggcagatgaacatcaggaaggaacatccatgagcttccatccacggaacctcaccatggatacgcttgtgatcaagggcctggtctcccctcaagacacggtcacagatcagaggccacaccatcctagcagtggagcagtaccagctgggacagggtccttctgtgacacctgctgcatcaccaggctgggtgaacggacacaattgccagaactcacagaatagaagtatcagcaccgaaacctcacaggaaaaatggtaagttctaagtttctccattaatagtaactctcagattaatctctgtcatccatcgcttctccaagaaatgactttttagggtgatgtgccaggcgccatgttggagggctggtggtagcggcttggggaggtgctcgctctgtcggtcttgctctctcgcacgcttcccccggctcccttcgtttcccccccccggtcgcctgcgtgccggagtgtgtgcgagggagggggagggcgtcgggggggtggggggaggcgttccggtccccaagagacccgcggagggaggcggaggctgtgagggactccgggaagccatggacgtcgagaggctccaggaggcgctgaaagattttgagaagagggggaaaaaggaagtttgtcctgtcctggatcagtttctttgtcatgtagccaagactggagaaacaatgattcagtggtcccaatttaaaggctattttattttcaaactggagaaagtgatggatgatttcagaacttcagctcctgagccaagaggtcctcccaaccctaatgtcgaatatattccctttgatgaaatgaaggaaagaatactgaaaattgtcactggatttaatggtatcccttttactattcagcgactatgtgaattgttaacagatccaaggagaaactatacaggaacagacaaatttctcagaggagtagaaaagaatgtgatggttgttagctgtgtttatccttcttcagagaaaaacaattccaatagtttaaatcgaatgaatggtgttatgtttcctggaaattcaccaagctatactgagaggtctaatataaatgggcctgggacacccaggccacttaatcgaccaaaggtttctttgtcagcccccatgacaacaaatgggttgcctgagagcacagacagcaaagaggcaaatttgcagcaaaatgaggagaaaaatcacagtgactcttcgacctctgaatcagaagtttcctcagtgagccctttgaaaaataaacatccagatgaagatgctgtggaagctgaggggcatgaggtaaaaagactcaggtttgacaaagaaggtgaagtcagagaaacagccagtcaaacgacttccagcgaaatttcttcagttatggtaggagaaacagaagcatcatcttcatctcaggataaagacaaagatagccgttgtacccggcagcactgtacagaagaggatgaagaagaggatgaagaggaagaagaagagtcttttatgacatcaagagaaatgatcccagaaagaaaaaatcaagaaaaagaatctgatgatgccttaactgtgaatgaagagacttctgaggaaaataatcaaatggaggaatctgatgtgtctcaagctgagaaagatttgctacattctgaaggtagtgaaaacgaaggccctgtaagtagtagttcttctgactgccgtgaaacagaagaattagtaggatccaattccagtaaaactggagagattctttcagaatcatccatggaaaatgatgacgaagccacagaagtcaccgatgaaccaatggaacaagactaactatttagaaacatttagatgcagtattttacatacagttctggttttaacactgtataaaacttttgtgtaataaaatggacctttagttttacaagagaagcaggttgtaaaataaagtactttatggataattcctgaaagagttgtacatgtaagaactgtgaatatcagctcctctgggtcctgcttaccttaccgctgacttttctttctttctttttttggtctgggcaaatcagtggtttgtgtatagatttttttttttttttaatttaggattgaagtttttaaactggaaagtaattacaattttgaaaagttttttgagattatcacatttagtttatacatatgcaagaagctttttgtcttgtctctttctgatagctctagcagttttcatattttggtcatagtttcaacattttaacatgtgaattatagggtttcatgctggtttccagattttattgtttggctacgtacaatggaactttaagtcatatatacatacatatatatatatatatatatataattctaaggggggaaatgttatatttttctgtttctataagagatgaatacagtggatactttttctattggtaatgattgagttcacctctttcagaagacattttctttctcttctgagtaattgaaataaaatctggcccttgtgaaaccctggaaatcttaagtctgttgaaataccaggttaaacacattccaagagatctgttcaaactcaaattcttttgtatacttctgaggtgcctgagaaaaagacttcattatttatgagaaaatatgctttatcttggaaattgtgttcaaatgttagcttactattttgtagaatgaatgtttatgaagctgatatgagaccatctcagaagaaccaagcaggttccttgaccttttgcttgcttttctgaacattgtgaatattacacatgtctttctaaattattctagggtatgcaaatgtcaatggtatgaaacaccactgtactggaagaattaatatattactttagtatgtacctgagctaaatgactgaagctttaggggtgcatagaaaccaccataatttgtatgacattttgaagtgaattaaatatttttgaacatgcttcttcgacagccagtgttatatttttcagatcaacacaaagcacaatgattactcgaaattcagtattttcaaatttacatatttaaagtcatgcaagctgtaacttccctgtcaaaattactggctgccaaatttatacctgtttcttcagctgtaccttttgatatttaaagtttttaaatttctgtaaagtagattttgtagaatgtaatgtgttcactgcctttgtgaagcggtatataattgtataatttctgtgtgtaaactgaatgcttgggctttcaatacagtattcatataaagcaataaatattaatgttatgaaatatttgactacatttttatcaaaatatgaaagaatccccccttttttagtttcagatacctgaactacacagatgagcttctaaaactgatgcaaacagtttctgacactgtataatatgcttttgggtgatttggggggcaaccacaagttttgcgttttgactacttaaatcatcatggctataaataccaaaacgatttggatccatttatgtttgtaggataatatactactgactgacttgactgtcaggttcacaacagctagatgatatatttatgactatgtctaatagttgaaataaaatctgaatattgatttactatacccaagaggggagaaaaattaaccattgtaaatttttaaaaattttttcaaaaatgttaaaatgaggcaaatttaagtttacaaattttgaaattttcttttgaatatttatgaaattgtcagtaaacttacctaagatcctgtgaccttttgatattttttattttaattgtagtgccatggaccatttgtaaacaaattgatttacttttgttggttgtaagttgaagatttagcattatgactttgaggtctgtggttttatttgtaaacttgcaattgctatatttgcaagggcaaatgtatttctttattaaataaagtacaataatggtgaatgtaccaaaatgacatcacttaactctatgagagatctgcattttaatctatagtttaatagttttaatatttattagatattcatatgttgatcatagatcaaacttgttgctgtttatacagataattgtagaatgctcatggaatatctttagggtaggtggaatacttctgtagttaaattgggaaaccttgttcagctggttttagatattgatggccatttggaagtaaatttccgcaggtattcataggtgcacttaacacagactttgcttaatgaaaatgtcagttctaatagtaactgattcacttctgaacagaagtgattttaggcatatttcttaacatatatcaagcaaagtcctgttaaaagatctaaatgaagaatggagacctcagtgattaaagatattttgtttctgaccttgagcagattgcttacctgttctctagactataacccaacatgtaaaaaaaatttgaagatggtgatgaggaaagtgagatatatatatatatatgtattatgtttctagcacttttcccttttaaaaagtgaaaatatccttgtacatttttgaaaaatatattttcagttctgaaaaatgtagcagaagtagtgaaaatgtcatattttaaatgttgattattagataaatttaacctgcttagggtttattgtaactacacctttcagacgtgtgttttggagtagtggaattgccagccaggccctgtggcttggaaaggcatcccagaaatcctcggccagaaggtgtggcttgttaaagcattgagattcagagtattttgttttgccggtgtagataggcatgtatttatgcatttttgcatttgtaaaatcaacttttcaaataatgtaaatgtaatatactagtttacttaaaggtacttgggcagaatctaaagctgctacaatgtttgattatgaaaaaaatgtaacatggtaaggatgaaaatgcaacttacaaaaccaaaggaattaaaaattttcggtagtgtttcaaattgtcttctgaacaggaatttaacattggttttgatgaagtgagggtcagttctcaagatttgtgctaatcataaaatgaatgaatgcaaaacaccttgtaatttcatatggaattataaaaattaggtttgctgggttttggcctaataagagtgctagtatgtattggttagaatacatcttactatttcacattttaaaaatcagtacactcttcaggattttcttttatttcaacttggagcctagattactttgccaaatgtattattttcataatgcaataaaatataaattagaata

SEQ ID NO: 416025 - DNA, 5467 bp, Homo sapiens
catgctcaaatcagctgtgctttttagccacaggaagatccaattccacatcttcactgaagactctctgaagcccgagtttgataagcagttacgccagtggcctgactcatatacaaagaagtttgagcacagaatctaccccatcacattttctgttggaaaccctcaggagtggaagaaattgttcaaaccctgtgctgcccagagactctttcttccggtgattttaaaggatgtggactcacttctctacgtggacaccgatgtcctctttctgagacctgttgatgacatctggaagcttctgaggctgtttaattccacccagcttgcagccatggcccctgagcacgaaatccccaagattggctggtacagccgctttgctaggcatcctttctatggctctgcaggagttaattcaggagtcatgttaatgaatttaactcggataagaagtacccagttcaagaacagcatgattccaacaggcctggcttgggaggacatgttgtaccctctgtaccagaagtacaagaatgccatcacgtggggagaccaggatttattaaatattattttttatttcaacccagagtgtctctatgtattcccctgccagtggaactaccgtcccgatcactgcatgtacggaagcaactgcagagaggctgagcatgaaggtgtgtctgttctgcatggaaaccgaggcgtctaccatgacgataagcaaccaacgttcagagcactctatgaagcaatacgggatattttgagaagagggggaaaaaggaagtttgtcctgtcctggatcagtttctttgtcatgtagccaagactggagaaacaatgattcagtggtcccaatttaaaggctattttattttcaaactggagaaagtgatggatgatttcagaacttcagctcctgagccaagaggtcctcccaaccctaatgtcgaatatattccctttgatgaaatgaaggaaagaatactgaaaattgtcactggatttaatggtatcccttttactattcagcgactatgtgaattgttaacagatccaaggagaaactatacaggaacagacaaatttctcagaggagtagaaaagaatgtgatggttgttagctgtgtttatccttcttcagagaaaaacaattccaatagtttaaatcgaatgaatggtgttatgtttcctggaaattcaccaagctatactgagaggtctaatataaatgggcctgggacacccaggccacttaatcgaccaaaggtttctttgtcagcccccatgacaacaaatgggttgcctgagagcacagacagcaaagaggcaaatttgcagcaaaatgaggagaaaaatcacagtgactcttcgacctctgaatcagaagtttcctcagtgagccctttgaaaaataaacatccagatgaagatgctgtggaagctgaggggcatgaggtaaaaagactcaggtttgacaaagaaggtgaagtcagagaaacagccagtcaaacgacttccagcgaaatttcttcagttatggtaggagaaacagaagcatcatcttcatctcaggataaagacaaagatagccgttgtacccggcagcactgtacagaagaggatgaagaagaggatgaagaggaagaagaagagtcttttatgacatcaagagaaatgatcccagaaagaaaaaatcaagaaaaagaatctgatgatgccttaactgtgaatgaagagacttctgaggaaaataatcaaatggaggaatctgatgtgtctcaagctgagaaagatttgctacattctgaaggtagtgaaaacgaaggccctgtaagtagtagttcttctgactgccgtgaaacagaagaattagtaggatccaattccagtaaaactggagagattctttcagaatcatccatggaaaatgatgacgaagccacagaagtcaccgatgaaccaatggaacaagactaactatttagaaacatttagatgcagtattttacatacagttctggttttaacactgtataaaacttttgtgtaataaaatggacctttagttttacaagagaagcaggttgtaaaataaagtactttatggataattcctgaaagagttgtacatgtaagaactgtgaatatcagctcctctgggtcctgcttaccttaccgctgacttttctttctttctttttttggtctgggcaaatcagtggtttgtgtatagatttttttttttttttaatttaggattgaagtttttaaactggaaagtaattacaattttgaaaagttttttgagattatcacatttagtttatacatatgcaagaagctttttgtcttgtctctttctgatagctctagcagttttcatattttggtcatagtttcaacattttaacatgtgaattatagggtttcatgctggtttccagattttattgtttggctacgtacaatggaactttaagtcatatatacatacatatatatatatatatatatataattctaaggggggaaatgttatatttttctgtttctataagagatgaatacagtggatactttttctattggtaatgattgagttcacctctttcagaagacattttctttctcttctgagtaattgaaataaaatctggcccttgtgaaaccctggaaatcttaagtctgttgaaataccaggttaaacacattccaagagatctgttcaaactcaaattcttttgtatacttctgaggtgcctgagaaaaagacttcattatttatgagaaaatatgctttatcttggaaattgtgttcaaatgttagcttactattttgtagaatgaatgtttatgaagctgatatgagaccatctcagaagaaccaagcaggttccttgaccttttgcttgcttttctgaacattgtgaatattacacatgtctttctaaattattctagggtatgcaaatgtcaatggtatgaaacaccactgtactggaagaattaatatattactttagtatgtacctgagctaaatgactgaagctttaggggtgcatagaaaccaccataatttgtatgacattttgaagtgaattaaatatttttgaacatgcttcttcgacagccagtgttatatttttcagatcaacacaaagcacaatgattactcgaaattcagtattttcaaatttacatatttaaagtcatgcaagctgtaacttccctgtcaaaattactggctgccaaatttatacctgtttcttcagctgtaccttttgatatttaaagtttttaaatttctgtaaagtagattttgtagaatgtaatgtgttcactgcctttgtgaagcggtatataattgtataatttctgtgtgtaaactgaatgcttgggctttcaatacagtattcatataaagcaataaatattaatgttatgaaatatttgactacatttttatcaaaatatgaaagaatccccccttttttagtttcagatacctgaactacacagatgagcttctaaaactgatgcaaacagtttctgacactgtataatatgcttttgggtgatttggggggcaaccacaagttttgcgttttgactacttaaatcatcatggctataaataccaaaacgatttggatccatttatgtttgtaggataatatactactgactgacttgactgtcaggttcacaacagctagatgatatatttatgactatgtctaatagttgaaataaaatctgaatattgatttactatacccaagaggggagaaaaattaaccattgtaaatttttaaaaattttttcaaaaatgttaaaatgaggcaaatttaagtttacaaattttgaaattttcttttgaatatttatgaaattgtcagtaaacttacctaagatcctgtgaccttttgatattttttattttaattgtagtgccatggaccatttgtaaacaaattgatttacttttgttggttgtaagttgaagatttagcattatgactttgaggtctgtggttttatttgtaaacttgcaattgctatatttgcaagggcaaatgtatttctttattaaataaagtacaataatggtgaatgtaccaaaatgacatcacttaactctatgagagatctgcattttaatctatagtttaatagttttaatatttattagatattcatatgttgatcatagatcaaacttgttgctgtttatacagataattgtagaatgctcatggaatatctttagggtaggtggaatacttctgtagttaaattgggaaaccttgttcagctggttttagatattgatggccatttggaagtaaatttccgcaggtattcataggtgcacttaacacagactttgcttaatgaaaatgtcagttctaatagtaactgattcacttctgaacagaagtgattttaggcatatttcttaacatatatcaagcaaagtcctgttaaaagatctaaatgaagaatggagacctcagtgattaaagatattttgtttctgaccttgagcagattgcttacctgttctctagactataacccaacatgtaaaaaaaatttgaagatggtgatgaggaaagtgagatatatatatatatatgtattatgtttctagcacttttcccttttaaaaagtgaaaatatccttgtacatttttgaaaaatatattttcagttctgaaaaatgtagcagaagtagtgaaaatgtcatattttaaatgttgattattagataaatttaacctgcttagggtttattgtaactacacctttcagacgtgtgttttggagtagtggaattgccagccaggccctgtggcttggaaaggcatcccagaaatcctcggccagaaggtgtggcttgttaaagcattgagattcagagtattttgttttgccggtgtagataggcatgtatttatgcatttttgcatttgtaaaatcaacttttcaaataatgtaaatgtaatatactagtttacttaaaggtacttgggcagaatctaaagctgctacaatgtttgattatgaaaaaaatgtaacatggtaaggatgaaaatgcaacttacaaaaccaaaggaattaaaaattttcggtagtgtttcaaattgtcttctgaacaggaatttaacattggttttgatgaagtgagggtcagttctcaagatttgtgctaatcataaaatgaatgaatgcaaaacaccttgtaatttcatatggaattataaaaattaggtttgctgggttttggcctaataagagtgctagtatgtattggttagaatacatcttactatttcacattttaaaaatcagtacactcttcaggattttcttttatttcaacttggagcctagattactttgccaaatgtattattttcataatgcaataaaatataaattagaata

SEQ ID NO: 416026 - DNA, 5305 bp, Homo sapiens
actgtacaaatgctttatttctattcaatatttagaagacagttataaacaagatgcattcaatagcatggtggcagatgaacatcaggaaggaacatccatgagcttccatccacggaacctcaccatggatacgcttgtgatcaagggcctggtctcccctcaagacacggtcacagatcagaggccacaccatcctagcagtggagcagtaccagctgggacagggtccttctgtgacacctgctgcatcaccaggctgggtgaacggacacaattgccagaactcacagaatagaagtatcagcaccgaaacctcacaggaaaaatggtaagttctaagtttctccattaatagtaactctcagattaatctctgtcatccatcgcttctccaagaaatgactttttagggtgatgtgccaggcgccatgttggagggctggtggtagcggcttggggaggtgctcgctctgtcggtcttgctctctcgcacgcttcccccggctcccttcgtttcccccccccggtcgcctgcgtgccggagtgtgtgcgagggagggggagggcgtcgggggggtggggggaggcgttccggtccccaagagacccgcggagggaggcggaggctgtgagggactccgggaagccatggacgtcgagaggctccaggaggcgctgaaagattttgagaagagggggaaaaaggaagtttgtcctgtcctggatcagtttctttgtcatgtagccaagactggagaaacaatgattcagtggtcccaatttaaaggctattttattttcaaactggagaaagtgatggatgatttcagaacttcagctcctgagccaagaggtcctcccaaccctaatgtcgaatatattccctttgatgaaatgaaggaaagaatactgaaaattgtcactggatttaatggtatcccttttactattcagcgactatgtgaattgttaacagatccaaggagaaactatacaggaacagacaaatttctcagaggagtagaaaagaatgtgatggttgttagctgtgtttatccttcttcagagtctaatataaatgggcctgggacacccaggccacttaatcgaccaaaggtttctttgtcagcccccatgacaacaaatgggttgcctgagagcacagacagcaaagaggcaaatttgcagcaaaatgaggagaaaaatcacagtgactcttcgacctctgaatcagaagtttcctcagtgagccctttgaaaaataaacatccagatgaagatgctgtggaagctgaggggcatgaggtaaaaagactcaggtttgacaaagaaggtgaagtcagagaaacagccagtcaaacgacttccagcgaaatttcttcagttatggtaggagaaacagaagcatcatcttcatctcaggataaagacaaagatagccgttgtacccggcagcactgtacagaagaggatgaagaagaggatgaagaggaagaagaagagtcttttatgacatcaagagaaatgatcccagaaagaaaaaatcaagaaaaagaatctgatgatgccttaactgtgaatgaagagacttctgaggaaaataatcaaatggaggaatctgatgtgtctcaagctgagaaagatttgctacattctgaaggtagtgaaaacgaaggccctgtaagtagtagttcttctgactgccgtgaaacagaagaattagtaggatccaattccagtaaaactggagagattctttcagaatcatccatggaaaatgatgacgaagccacagaagtcaccgatgaaccaatggaacaagactaactatttagaaacatttagatgcagtattttacatacagttctggttttaacactgtataaaacttttgtgtaataaaatggacctttagttttacaagagaagcaggttgtaaaataaagtactttatggataattcctgaaagagttgtacatgtaagaactgtgaatatcagctcctctgggtcctgcttaccttaccgctgacttttctttctttctttttttggtctgggcaaatcagtggtttgtgtatagatttttttttttttttaatttaggattgaagtttttaaactggaaagtaattacaattttgaaaagttttttgagattatcacatttagtttatacatatgcaagaagctttttgtcttgtctctttctgatagctctagcagttttcatattttggtcatagtttcaacattttaacatgtgaattatagggtttcatgctggtttccagattttattgtttggctacgtacaatggaactttaagtcatatatacatacatatatatatatatatatatataattctaaggggggaaatgttatatttttctgtttctataagagatgaatacagtggatactttttctattggtaatgattgagttcacctctttcagaagacattttctttctcttctgagtaattgaaataaaatctggcccttgtgaaaccctggaaatcttaagtctgttgaaataccaggttaaacacattccaagagatctgttcaaactcaaattcttttgtatacttctgaggtgcctgagaaaaagacttcattatttatgagaaaatatgctttatcttggaaattgtgttcaaatgttagcttactattttgtagaatgaatgtttatgaagctgatatgagaccatctcagaagaaccaagcaggttccttgaccttttgcttgcttttctgaacattgtgaatattacacatgtctttctaaattattctagggtatgcaaatgtcaatggtatgaaacaccactgtactggaagaattaatatattactttagtatgtacctgagctaaatgactgaagctttaggggtgcatagaaaccaccataatttgtatgacattttgaagtgaattaaatatttttgaacatgcttcttcgacagccagtgttatatttttcagatcaacacaaagcacaatgattactcgaaattcagtattttcaaatttacatatttaaagtcatgcaagctgtaacttccctgtcaaaattactggctgccaaatttatacctgtttcttcagctgtaccttttgatatttaaagtttttaaatttctgtaaagtagattttgtagaatgtaatgtgttcactgcctttgtgaagcggtatataattgtataatttctgtgtgtaaactgaatgcttgggctttcaatacagtattcatataaagcaataaatattaatgttatgaaatatttgactacatttttatcaaaatatgaaagaatccccccttttttagtttcagatacctgaactacacagatgagcttctaaaactgatgcaaacagtttctgacactgtataatatgcttttgggtgatttggggggcaaccacaagttttgcgttttgactacttaaatcatcatggctataaataccaaaacgatttggatccatttatgtttgtaggataatatactactgactgacttgactgtcaggttcacaacagctagatgatatatttatgactatgtctaatagttgaaataaaatctgaatattgatttactatacccaagaggggagaaaaattaaccattgtaaatttttaaaaattttttcaaaaatgttaaaatgaggcaaatttaagtttacaaattttgaaattttcttttgaatatttatgaaattgtcagtaaacttacctaagatcctgtgaccttttgatattttttattttaattgtagtgccatggaccatttgtaaacaaattgatttacttttgttggttgtaagttgaagatttagcattatgactttgaggtctgtggttttatttgtaaacttgcaattgctatatttgcaagggcaaatgtatttctttattaaataaagtacaataatggtgaatgtaccaaaatgacatcacttaactctatgagagatctgcattttaatctatagtttaatagttttaatatttattagatattcatatgttgatcatagatcaaacttgttgctgtttatacagataattgtagaatgctcatggaatatctttagggtaggtggaatacttctgtagttaaattgggaaaccttgttcagctggttttagatattgatggccatttggaagtaaatttccgcaggtattcataggtgcacttaacacagactttgcttaatgaaaatgtcagttctaatagtaactgattcacttctgaacagaagtgattttaggcatatttcttaacatatatcaagcaaagtcctgttaaaagatctaaatgaagaatggagacctcagtgattaaagatattttgtttctgaccttgagcagattgcttacctgttctctagactataacccaacatgtaaaaaaaatttgaagatggtgatgaggaaagtgagatatatatatatatatgtattatgtttctagcacttttcccttttaaaaagtgaaaatatccttgtacatttttgaaaaatatattttcagttctgaaaaatgtagcagaagtagtgaaaatgtcatattttaaatgttgattattagataaatttaacctgcttagggtttattgtaactacacctttcagacgtgtgttttggagtagtggaattgccagccaggccctgtggcttggaaaggcatcccagaaatcctcggccagaaggtgtggcttgttaaagcattgagattcagagtattttgttttgccggtgtagataggcatgtatttatgcatttttgcatttgtaaaatcaacttttcaaataatgtaaatgtaatatactagtttacttaaaggtacttgggcagaatctaaagctgctacaatgtttgattatgaaaaaaatgtaacatggtaaggatgaaaatgcaacttacaaaaccaaaggaattaaaaattttcggtagtgtttcaaattgtcttctgaacaggaatttaacattggttttgatgaagtgagggtcagttctcaagatttgtgctaatcataaaatgaatgaatgcaaaacaccttgtaatttcatatggaattataaaaattaggtttgctgggttttggcctaataagagtgctagtatgtattggttagaatacatcttactatttcacattttaaaaatcagtacactcttcaggattttcttttatttcaacttggagcctagattactttgccaaatgtattattttcataatgcaataaaatataaattagaata

SEQ ID NO: 416027 - DNA, 3280 bp, Homo sapiens
actgtacaaatgctttatttctattcaatatttagaagacagttataaacaagatgcattcaatagcatggtggcagatgaacatcaggaaggaacatccatgagcttccatccacggaacctcaccatggatacgcttgtgatcaagggcctggtctcccctcaagacacggtcacagatcagaggccacaccatcctagcagtggagcagtaccagctgggacagggtccttctgtgacacctgctgcatcaccaggctgggtgaacggacacaattgccagaactcacagaatagaagtatcagcaccgaaacctcacaggaaaaatggtaagttctaagtttctccattaatagtaactctcagattaatctctgtcatccatcgcttctccaagaaatgactttttagggtgatgtgccaggcgccatgttggagggctggtggtagcggcttggggaggtgctcgctctgtcggtcttgctctctcgcacgcttcccccggctcccttcgtttcccccccccggtcgcctgcgtgccggagtgtgtgcgagggagggggagggcgtcgggggggtggggggaggcgttccggtccccaagagacccgcggagggaggcggaggctgtgagggactccgggaagccatggacgtcgagaggctccaggaggcgctgaaagattttgagaagagggggaaaaaggaagtttgtcctgtcctggatcagtttctttgtcatgtagccaagactggagaaacaatgattcagtggtcccaatttaaaggctattttattttcaaactggagaaagtgatggatgatttcagaacttcagctcctgagccaagaggtcctcccaaccctaatgtcgaatatattccctttgatgaaatgaaggaaagaatactgaaaattgtcactggatttaatggtatcccttttactattcagcgactatgtgaattgttaacagatccaaggagaaactatacaggaacagacaaatttctcagaggagtagaaaagaatgtgatggttgttagctgtgtttatccttcttcagagaaaaacaattccaatagtttaaatcgaatgaatggtgttatgtttcctggaaattcaccaagctatactgagaggtctaatataaatgggcctgggacacccaggccacttaatcgaccaaaggtttctttgtcagcccccatgacaacaaatgggttgcctgagagcacagacagcaaagaggcaaatttgcagcaaaatgaggagaaaaatcacagtgactcttcgacctctgaatcagaagtttcctcagtgagccctttgaaaaataaacatccagatgaagatgctgtggaagctgaggggcatgaggtaaaaagactcaggtttgacaaagaaggtgaagtcagagaaacagccagtcaaacgacttccagcgaaatttcttcagttatggtaggagaaacagaagcatcatcttcatctcaggataaagacaaagatagccgttgtacccggcagcactgtacagaagaggatgaagaagaggatgaagaggaagaagaagagtcttttatgacatcaagagaaatgatcccagaaagaaaaaatcaagaaaaagaatctgatgatgccttaactgtgaatgaagagacttctgaggaaaataatcaaatggaggaatctgatgtgtctcaagctgagaaagatttgctacattctgaaggtagtgaaaacgaaggccctgtaagtagtagttcttctgactgccgtgaaacagaagaattagtaggatccaattccagtaaaactggagagattctttcagaatcatccatggaaaatgatgacgaagccacagaagtcaccgatgaaccaatggaacaagactaactatttagaaacatttagatgcagtattttacatacagttctggttttaacactgtataaaacttttgtgtaataaaatggacctttagttttacaagagaagcaggttgtaaaataaagtactttatggataattcctgaaagagttgtacatgtaagaactgtgaatatcagctcctctgggtcctgcttaccttaccgctgacttttctttctttctttttttggtctgggcaaatcagtggtttgtgtatagatttttttttttttttaatttaggattgaagtttttaaactggaaagtaattacaattttgaaaagttttttgagattatcacatttagtttatacatatgcaagaagctttttgtcttgtctctttctgatagctctagcagttttcatattttggtcatagtttcaacattttaacatgtgaattatagggtttcatgctggtttccagattttattgtttggctacgtacaatggaactttaagtcatatatacatacatatatatatatatatatatataattctaaggggggaaatgttatatttttctgtttctataagagatgaatacagtggatactttttctattggtaatgattgagttcacctctttcagaagacattttctttctcttctgagtaattgaaataaaatctggcccttgtgaaaccctggaaatcttaagtctgttgaaataccaggttaaacacattccaagagatctgttcaaactcaaattcttttgtatacttctgaggtgcctgagaaaaagacttcattatttatgagaaaatatgctttatcttggaaattgtgttcaaatgttagcttactattttgtagaatgaatgtttatgaagctgatatgagaccatctcagaagaaccaagcaggttccttgaccttttgcttgcttttctgaacattgtgaatattacacatgtctttctaaattattctagggtatgcaaatgtcaatggtatgaaacaccactgtactggaagaattaatatattactttagtatgtacctgagctaaatgactgaagctttaggggtgcatagaaaccaccataatttgtatgacattttgaagtgaattaaatatttttgaacatgcttcttcgacagccagtgttatatttttcagatcaacacaaagcacaatgattactcgaaattcagtattttcaaatttacatatttaaagtcatgcaagctgtaacttccctgtcaaaattactggctgccaaatttatacctgtttcttcagctgtaccttttgatatttaaagtttttaaatttctgtaaagtagatatagaagagtgcacttttggggtaccgagctcg

SEQ ID NO: 416028 - DNA, 1168 bp, Homo sapiens
  misc_feature (1088)..(1088): n is a, c, g, or t
  misc_feature (1093)..(1093): n is a, c, g, or t
  misc_feature (1110)..(1110): n is a, c, g, or t
actgtacaaatgctttatttctattcaatatttagaagacagttataaacaagatgcattcaatagcatggtggcagatgaacatcaggaaggaacatccatgagcttccatccacggaacctcaccatggatacgcttgtgatcaagggcctggtctcccctcaagacacggtcacagatcagaggccacaccatcctagcagtggagcagtaccagctgggacagggtccttctgtgacacctgctgcatcaccaggctgggtgaacggacacaattgccagaactcacagaatagaagtatcagcaccgaaacctcacaggaaaaatggtaagttctaagtttctccattaatagtaactctcagattaatctctgtcatccatcgcttctccaagaaatgactttttagggtgatgtgccaggcgccatgttggagggctggtggtagcggcttggggaggtgctcgctctgtcggtcttgctctctcgcacgcttcccccggctcccttcgtttcccccccccggtcgcctgcgtgccggagtgtgtgcgagggagggggagggcgtcgggggggtggggggaggcgttccggtccccaagagacccgcggagggaggcggaggctgtgagggactccgggaagccatggacgtcgagaggctccaggaggcgctgaaagattttgagaagagggggaaaaaggaagtttgtcctgtcctggatcagtttctttgtcatgtagccaagactggagaaacaatgattcagtggtcccaatttaaaggctattttattttcaaactggagaaagtgatggatgatttcagaacttcagctcctgagccaagaggtcctcccaaccctaatgtcgaatatattccctttgatgaaatgaaggaaagaatactgaaaattgtcactggatttaatggtatcccttttactattcagcgactatgtgaattgttaacagatccaaggagaaactatacaggaacagacaaatttctcagaggagtagaaaagaatgtgatggttgttagctggtgttattccttcttcaaagaaaaacatttccattngtttnaaatcgatgaatggtgntatgtttcctggaaattcaccagcctttcttataggcctaaatataatgggccctgga

SEQ ID NO: 416029 - DNA, 285 bp, Homo sapiens
gcaacagcctcctcgccgcctccacttcatcttctctgcatactgccagacttaatttttctaaaactacaccattcattcaacaacaaatatttgaatacctgctgtttgctaggactgaggttcatcaataagcaaaacacaccctgtggagtccacagttgggaagacaatcaaatagtcacatatagacagtgacaaacttaagtgctacatgaggaacacaaaacatgggaatctttgtagatcagggagggcttctggaaagaagcagcgtttaagctg

SEQ ID NO: 416030 - DNA, 794 bp, Homo sapiens
gaacggatatgcgcgttttcgtctgcgcatgtgcagtcaaccccactttccggcttctccctgttagtgtttgctggtgcagagggttcgcagctcaggaaggagggagccccaggaacaggagtcccaccgaagaactgctctctgacagaacagagacctcctcaccagggcttccaaacagatgcagaagaacccagaaaggagcaggtcttgatttgcccaaccagcggcacttcttcatccccttgcccagagagcaccagacttggtgatgtcgccacatccagaagccatcacagattgtgtgacactgaacactgtgggccaacttgcagaaggtggttatcctttacggttctccacactctttcaggagcagcagaaaatgaacatatctcaggcatcagtgtcattcaaggacgtgactatagaattcacccaggaggagtggcagcaaatggcccctgttcagaagaatctgtacagagatgtgatgctggagaactacagcaacctcgtctcagtggggtactgctgtttcaaaccagaggtgatcttcaagttggagcaaggagaggagccttggttctcagaggaggaattctcaaaccagagtcacccaagtgagttactgagcagtagtagacataattctgcaggagtggttagactccaggtcactttaggggtgaacacctaaatattgcaagacttttcttagaaagcctaaaggcacaaaaagcagcagttaaaagaaaataattaataaagttgattccattaaaagtaag

SEQ ID NO: 416031 - DNA, 452 bp, Homo sapiens
gctattttctacatcatctaattctgaacccttcagattgaatagaaatgtactgttacaggcatcagtgtcattcaaggacgtgactatagaattcacccaggaggagtggcagcaaatggcccctgttcagaagaatctgtacagagatgtgatgctggagaactacagcaacctcgtctcagtggggtactgctgtttcaaaccagaggtgatcttcaagttggagcaaggagaggagccttggttctcagaggaggaattctcaaaccagagtcacccaagtgagttactgagcagtagtagacataattctgcaggagtggttagactccaggtcactttaggggtgaacacctaaatattgcaagacttttcttagaaagcctaaaggcacaaaaagcagcagttaaaagaaaataattaataaagttgattccattaaaagtaag

SEQ ID NO: 416032 - DNA, 5691 bp, Homo sapiens
gaacggatatgcgcgttttcgtctgcgcatgtgcagtcaaccccactttccggcttctccctgttagtgtttgctggtgcagagggttcgcagctcaggtgagagcgccgggcctccacgcggattgcggacctgcagggagggatgtgctagtgtccaggggcgggaacgcgacgtcccgggaactcccccaaagcaggccgtcgctccctgtgcctcggccggcccgggacctcagcctgagaagggccggtgggggcgggctccgggggcgttaggtggggctgagtcctagttggaagatgctcggtgcgggccgaggtatgggcgccagaatgcagccaggcgtcggaaaacgcggtgctggcttcaggaggggaatgcgcgtttattgtattgaccatgaacctgccacaaagcgcgtacagcccgtgggtctgcggtgagaggccgagcctaggagctagaaggacctcgtgaattttggctctgtcacttgagcgtttgaaaatgaggatattagtaaaaactgctttgtgtcgttcagaggaaggagggagccccaggaacaggagtcccaccgaagaactgctctctgacagaacagagacctcctcaccagggcttccaaacagatgcagaagaacccagaaaggagcaggtcttgatttgcccaaccagcggcacttcttcatccccttgcccagagagcaccagacttggtgatgtcgccacatccagaagccatcacagattgtgtgacactgaacactgtgggccaacttgcagaaggtggttatcctttacggttctccacactctttcaggagcagcagaaaatgaacatatctcaggcatcagtgtcattcaaggacgtgactatagaattcacccaggaggagtggcagcaaatggcccctgttcagaagaatctgtacagagatgtgatgctggagaactacagcaacctcgtctcagtggggtactgctgtttcaaaccagaggtgatcttcaagttggagcaaggagaggagccttggttctcagaggaggaattctcaaaccagagtcacccaaaagattacagaggtgatgacctgatcaagcagaacaagaaaatcaaagacaaacacttggagcaagcaatatgtatcaataataaaacattgactacagaggaagagaaagttttggggaaaccatttactctgcatgtagctgctgttgcttcaacaaaaatgtcctgcaaatgcaactcatgggaagtgaatttgcaaagtatttctgaatttatcattaataatagaaactattcaacaaagaaaataggttgcggtaatgtatgtgagaattcacctttcaaaattaactttgagaaaactcagactggagagaaattttatgaacataataaaaacatgaaagctctcaattataatgaaaatcttcccaagcatccaaagtttcaaactttggagcaagcttttgaatgtaataaaattggaaaagcctttaatgataaggctaactgtgttaaacataacagttctcacacaggagaaacatcctctaaagatgatgaatttaggaaaaattgtgataagaaaactctctttgaccacaggagaactggcacagggaagaaacacctgcatcttaatcaatgtgggaaatcctttgagaagtcaactgtggaggaatataataaacttaatatgggtataaaacattatgaattaaatccaagtggaaataatttcaacagaaaggcacacctcactgatcctcaaacagctgtcatagaagagaacccattggtaagtaatgacagaacacagacttgggttaaatcctctgaatatcatgaaaataagaaatcctaccagacgtcggttcacagagttcgccgaagaagtcactcaatgatgaaaccctataaatgtaatgaatgtgggaaatccttctgtcagaaaggacatctcattcaacatcagagaactcacacaggagagaaaccatttgaatgtagtgaatgtggaaaaactttctcccagaagtcacacctcagtactcatcagagaattcatacagcagaaaaaccctataaatgtaatgaatgtggaaaaacatttgtccagaagtcaaccctcaggggacatcaaagaattcacacaggagaaaaaccctatgaatgtagtgaatgtgggaaaacttttgttcagaagtccaccctcagagatcatcacagaattcacacaggggagaaatcctttcaatgcaatcaatgtggaaaaacatttggccagaagtcaaacctcagaatacatcagagaactcacactggggagaaaacttaccagtgtaatgaatgtgaaaaatccttctggcgaaaagatcatctcattcaacatcagaaaactcacacgggagagaaaccattcaaatgtaacgaatgtgggaaaacttttgcccggacatcaaccctcagagtgcatcaaagaattcacactggggagaaaccatttaaatgtaatgaatgtgggaagaaatttgtccggaaagcaatccttagtgatcatcagagaattcacacaggggagaaaccctttcagtgtaataaatgtgggaaaacttttggccagaaatcaaacctcagaatacatcaaaggactcacagtggggagaaatcttatgaatgcaatgaatatgggaaattatgtaagaagtctaccctaagcttataccagaaaattcagggagaggggaatccctattgatgtaataactagaaaatccttttgacaaaaggaataccccatttgatatcagagatacacaaaaaaccaattgagggtagtgaatgtaagaagacagtcccagaagtaaaccctcactgtgaatcagagaattcacataggaaagaaaccagatgaagatgaatgcaggaagaattgtgtccaaaatgcaaccttcagagtgtatcaaagaattcagacaggcttctgttttcagagtactatggataggcctgaatgaagtcataccctattagatagctcccacacatcacacaggctggtaatctcttcaccagcaccaatttcattttactccaggcacatagtccagatttcccaatctccttttcatccaggttggtctttgtgactggctactaagatgtggatgtccatgatgtatatcacatcccagtctgaaacataagagacttccctaataaattaccagggccctgtcacaacaaaatggatatcatttctaggacaagcttggtgccgtgctttaatgtggcatggtacaagataaagaagtctgtgcctgaatgaatacacgcagcaaaattctcctcttctgtgtctttcccagttgaacattatgtgagcaaaatttaagcttatacagtagtccccccttatctgtattttcactttacgcaatttccattaaccatggtcaactgtactttaaagttattaaatggatccagaaataaacaattcctacattttaaactgcacccgattctgagtagtgggatgaagtctcatgccctcctgctctcccatgagggttattgaatcattccttagtctagcatatccacagtgtatacactatctgccagttagtcacttacttgacattttagttatcagatcacctgtcagggtatgacagtgcttgtattcaagtaacccttgttttactaaataatggcctgaaattgcaagagcatttctggcatgttgttgtaattattccattattagtccttaatttataaattaggcacagcaagagattaaactatcataggcatgtgtatatgtaggaaaaaaatatagtatatacagggttcagtatacccgtggtttcaaacatcaacttggaattcttggagagcattccttgtagttaagcagggactactgtattctgttgagctttcacatgtttgagtctatttgtttctacacataatttagttatcttctgctaggaaggcagaaagcttctgtgtaagccaggcttaagtcaatcagagggcacaaaccttattaggaggctagagagtcaaggagaacctcaaatatgatcagagaattgtggaaaagacatcctttcaatgtaatgaaattgatagtaccacctgatacagggctttgcatgaacctaaaagtcttttggctgaatggtgagcagccactgtgcagttcaacgtaagtgtgccttaattgcacagaggtactgcccccacacctcctgacacctccatataccccagctatatctgctttaaggagttttccctggctccaaaggccattggcacccacccaagtattatgggaaacctccagagaggggagggactcagatttatatggctttattgaatccatgcccaaggcaacatcttactagttcctgtgggggtacaggacacctagatttagctaatggggtttggcaatgggaaggcaaacaaatttaataactttatgggtgaggtactttgggccagtagagtatactacagttatgtttacatctgaaagtgtagtagggattaattcccataagttatagagagaattctaattccctgtaattcgcataagtcatagaattctaatcaggaataattgtatgtaaagatacctctgaggtccaacagctctgatcattttgggcttcaagtctctctctgtgactggtgattttgtgggttgaaacttctggcaaaagggggcagcccttgggagctgggggccaggggattgacttggttccctgacaagggtaccaggtccaccccttctgaaaagcagctgttagtttactcttgggctcttttacacattggatatctcttccttgggtagagggttctgacctaaaattccactttaggagtttgtcgtcttggactcaacaactaacaaaatgaaaaggacccagcaagcctcacttgtggaatgaaaatggggcattcaggaaagcacctgtcctggccccacagtatgtcagctgtataggcaatagtagtagctgtctcttagaagggaaataatgtatcacctctttccagaacgaagcaaagttgctggcttagtagagccctcaattcatagaggttactgtaattgggcctggctcactgatgctttcgccaactgaaactactaggatcctgtgtgtgttcaaactcagtgccattaacaaacccaaagtgaagcggtcactcctctcagtggaaagagcacgaggatgttctcagctctggccaatactccatttcataaaccatgttacatttttgttaagccttggctctggatgtggcctagatatttgatattctaattggaaattacagattaaaaagcaccctttctttgtacagtgggggtaaaagtcacagctgcttagtacaaccatctgggttgctcaagtagatgcccataataagagactattttctgataagactgactggaatcaagctgccgacagctttctccatccagattgtgacggttgctacctggatccatcattttactggtatggcaaaaaatcacccatgtgacactgggtgacatggtaaaagtacatggtacttttacagtaccatgtactgtacaaaataaaggtctctttatctga

SEQ ID NO: 416033 - DNA, 5240 bp, Homo sapiens
gaacggatatgcgcgttttcgtctgcgcatgtgcagtcaaccccactttccggcttctccctgttagtgtttgctggtgcagagggttcgcagctcaggaaggagggagccccaggaacaggagtcccaccgaagaactgctctctgacagaacagagacctcctcaccagggcttccaaacagatgcagaagaacccagaaaggagcaggtcttgatttgcccaaccagcggcacttcttcatccccttgcccagagagcaccagacttggtgatgtcgccacatccagaagccatcacagattgtgtgacactgaacactgtgggccaacttgcagaaggtggttatcctttacggttctccacactctttcaggagcagcagaaaatgaacatatctcaggcatcagtgtcattcaaggacgtgactatagaattcacccaggaggagtggcagcaaatggcccctgttcagaagaatctgtacagagatgtgatgctggagaactacagcaacctcgtctcagtggggtactgctgtttcaaaccagaggtgatcttcaagttggagcaaggagaggagccttggttctcagaggaggaattctcaaaccagagtcacccaaaagattacagaggtgatgacctgatcaagcagaacaagaaaatcaaagacaaacacttggagcaagcaatatgtatcaataataaaacattgactacagaggaagagaaagttttggggaaaccatttactctgcatgtagctgctgttgcttcaacaaaaatgtcctgcaaatgcaactcatgggaagtgaatttgcaaagtatttctgaatttatcattaataatagaaactattcaacaaagaaaataggttgcggtaatgtatgtgagaattcacctttcaaaattaactttgagaaaactcagactggagagaaattttatgaacataataaaaacatgaaagctctcaattataatgaaaatcttcccaagcatccaaagtttcaaactttggagcaagcttttgaatgtaataaaattggaaaagcctttaatgataaggctaactgtgttaaacataacagttctcacacaggagaaacatcctctaaagatgatgaatttaggaaaaattgtgataagaaaactctctttgaccacaggagaactggcacagggaagaaacacctgcatcttaatcaatgtgggaaatcctttgagaagtcaactgtggaggaatataataaacttaatatgggtataaaacattatgaattaaatccaagtggaaataatttcaacagaaaggcacacctcactgatcctcaaacagctgtcatagaagagaacccattggtaagtaatgacagaacacagacttgggttaaatcctctgaatatcatgaaaataagaaatcctaccagacgtcggttcacagagttcgccgaagaagtcactcaatgatgaaaccctataaatgtaatgaatgtgggaaatccttctgtcagaaaggacatctcattcaacatcagagaactcacacaggagagaaaccatttgaatgtagtgaatgtggaaaaactttctcccagaagtcacacctcagtactcatcagagaattcatacagcagaaaaaccctataaatgtaatgaatgtggaaaaacatttgtccagaagtcaaccctcaggggacatcaaagaattcacacaggagaaaaaccctatgaatgtagtgaatgtgggaaaacttttgttcagaagtccaccctcagagatcatcacagaattcacacaggggagaaatcctttcaatgcaatcaatgtggaaaaacatttggccagaagtcaaacctcagaatacatcagagaactcacactggggagaaaacttaccagtgtaatgaatgtgaaaaatccttctggcgaaaagatcatctcattcaacatcagaaaactcacacgggagagaaaccattcaaatgtaacgaatgtgggaaaacttttgcccggacatcaaccctcagagtgcatcaaagaattcacactggggagaaaccatttaaatgtaatgaatgtgggaagaaatttgtccggaaagcaatccttagtgatcatcagagaattcacacaggggagaaaccctttcagtgtaataaatgtgggaaaacttttggccagaaatcaaacctcagaatacatcaaaggactcacagtggggagaaatcttatgaatgcaatgaatatgggaaattatgtaagaagtctaccctaagcttataccagaaaattcagggagaggggaatccctattgatgtaataactagaaaatccttttgacaaaaggaataccccatttgatatcagagatacacaaaaaaccaattgagggtagtgaatgtaagaagacagtcccagaagtaaaccctcactgtgaatcagagaattcacataggaaagaaaccagatgaagatgaatgcaggaagaattgtgtccaaaatgcaaccttcagagtgtatcaaagaattcagacaggcttctgttttcagagtactatggataggcctgaatgaagtcataccctattagatagctcccacacatcacacaggctggtaatctcttcaccagcaccaatttcattttactccaggcacatagtccagatttcccaatctccttttcatccaggttggtctttgtgactggctactaagatgtggatgtccatgatgtatatcacatcccagtctgaaacataagagacttccctaataaattaccagggccctgtcacaacaaaatggatatcatttctaggacaagcttggtgccgtgctttaatgtggcatggtacaagataaagaagtctgtgcctgaatgaatacacgcagcaaaattctcctcttctgtgtctttcccagttgaacattatgtgagcaaaatttaagcttatacagtagtccccccttatctgtattttcactttacgcaatttccattaaccatggtcaactgtactttaaagttattaaatggatccagaaataaacaattcctacattttaaactgcacccgattctgagtagtgggatgaagtctcatgccctcctgctctcccatgagggttattgaatcattccttagtctagcatatccacagtgtatacactatctgccagttagtcacttacttgacattttagttatcagatcacctgtcagggtatgacagtgcttgtattcaagtaacccttgttttactaaataatggcctgaaattgcaagagcatttctggcatgttgttgtaattattccattattagtccttaatttataaattaggcacagcaagagattaaactatcataggcatgtgtatatgtaggaaaaaaatatagtatatacagggttcagtatacccgtggtttcaaacatcaacttggaattcttggagagcattccttgtagttaagcagggactactgtattctgttgagctttcacatgtttgagtctatttgtttctacacataatttagttatcttctgctaggaaggcagaaagcttctgtgtaagccaggcttaagtcaatcagagggcacaaaccttattaggaggctagagagtcaaggagaacctcaaatatgatcagagaattgtggaaaagacatcctttcaatgtaatgaaattgatagtaccacctgatacagggctttgcatgaacctaaaagtcttttggctgaatggtgagcagccactgtgcagttcaacgtaagtgtgccttaattgcacagaggtactgcccccacacctcctgacacctccatataccccagctatatctgctttaaggagttttccctggctccaaaggccattggcacccacccaagtattatgggaaacctccagagaggggagggactcagatttatatggctttattgaatccatgcccaaggcaacatcttactagttcctgtgggggtacaggacacctagatttagctaatggggtttggcaatgggaaggcaaacaaatttaataactttatgggtgaggtactttgggccagtagagtatactacagttatgtttacatctgaaagtgtagtagggattaattcccataagttatagagagaattctaattccctgtaattcgcataagtcatagaattctaatcaggaataattgtatgtaaagatacctctgaggtccaacagctctgatcattttgggcttcaagtctctctctgtgactggtgattttgtgggttgaaacttctggcaaaagggggcagcccttgggagctgggggccaggggattgacttggttccctgacaagggtaccaggtccaccccttctgaaaagcagctgttagtttactcttgggctcttttacacattggatatctcttccttgggtagagggttctgacctaaaattccactttaggagtttgtcgtcttggactcaacaactaacaaaatgaaaaggacccagcaagcctcacttgtggaatgaaaatggggcattcaggaaagcacctgtcctggccccacagtatgtcagctgtataggcaatagtagtagctgtctcttagaagggaaataatgtatcacctctttccagaacgaagcaaagttgctggcttagtagagccctcaattcatagaggttactgtaattgggcctggctcactgatgctttcgccaactgaaactactaggatcctgtgtgtgttcaaactcagtgccattaacaaacccaaagtgaagcggtcactcctctcagtggaaagagcacgaggatgttctcagctctggccaatactccatttcataaaccatgttacatttttgttaagccttggctctggatgtggcctagatatttgatattctaattggaaattacagattaaaaagcaccctttctttgtacagtgggggtaaaagtcacagctgcttagtacaaccatctgggttgctcaagtagatgcccataataagagactattttctgataagactgactggaatcaagctgccgacagctttctccatccagattgtgacggttgctacctggatccatcattttactggtatggcaaaaaatcacccatgtgacactgggtgacatggtaaaagtacatggtacttttacagtaccatgtactgtacaaaataaaggtctctttatctga

SEQ ID NO: 416034 - DNA, 5181 bp, Homo sapiens
gaacggatatgcgcgttttcgtctgcgcatgtgcagtcaaccccactttccggcttctccctgttagtgtttgctggtgcagagggttcgcagctcaggaaggagggagccccaggaacaggagtcccaccgaagaactgctctctgacagaacagagacctcctcaccagggcttccaaacagatgcagaagaacccagaaaggagcaggtcttgatttgcccaaccagcggcacttcttcatccccttgcccagagagcaccagacttggtgatgtcgccacatccagaagccatcacagattgtgtgacactgaacactgtgggccaacttgcagaaggtggcatcagtgtcattcaaggacgtgactatagaattcacccaggaggagtggcagcaaatggcccctgttcagaagaatctgtacagagatgtgatgctggagaactacagcaacctcgtctcagtggggtactgctgtttcaaaccagaggtgatcttcaagttggagcaaggagaggagccttggttctcagaggaggaattctcaaaccagagtcacccaaaagattacagaggtgatgacctgatcaagcagaacaagaaaatcaaagacaaacacttggagcaagcaatatgtatcaataataaaacattgactacagaggaagagaaagttttggggaaaccatttactctgcatgtagctgctgttgcttcaacaaaaatgtcctgcaaatgcaactcatgggaagtgaatttgcaaagtatttctgaatttatcattaataatagaaactattcaacaaagaaaataggttgcggtaatgtatgtgagaattcacctttcaaaattaactttgagaaaactcagactggagagaaattttatgaacataataaaaacatgaaagctctcaattataatgaaaatcttcccaagcatccaaagtttcaaactttggagcaagcttttgaatgtaataaaattggaaaagcctttaatgataaggctaactgtgttaaacataacagttctcacacaggagaaacatcctctaaagatgatgaatttaggaaaaattgtgataagaaaactctctttgaccacaggagaactggcacagggaagaaacacctgcatcttaatcaatgtgggaaatcctttgagaagtcaactgtggaggaatataataaacttaatatgggtataaaacattatgaattaaatccaagtggaaataatttcaacagaaaggcacacctcactgatcctcaaacagctgtcatagaagagaacccattggtaagtaatgacagaacacagacttgggttaaatcctctgaatatcatgaaaataagaaatcctaccagacgtcggttcacagagttcgccgaagaagtcactcaatgatgaaaccctataaatgtaatgaatgtgggaaatccttctgtcagaaaggacatctcattcaacatcagagaactcacacaggagagaaaccatttgaatgtagtgaatgtggaaaaactttctcccagaagtcacacctcagtactcatcagagaattcatacagcagaaaaaccctataaatgtaatgaatgtggaaaaacatttgtccagaagtcaaccctcaggggacatcaaagaattcacacaggagaaaaaccctatgaatgtagtgaatgtgggaaaacttttgttcagaagtccaccctcagagatcatcacagaattcacacaggggagaaatcctttcaatgcaatcaatgtggaaaaacatttggccagaagtcaaacctcagaatacatcagagaactcacactggggagaaaacttaccagtgtaatgaatgtgaaaaatccttctggcgaaaagatcatctcattcaacatcagaaaactcacacgggagagaaaccattcaaatgtaacgaatgtgggaaaacttttgcccggacatcaaccctcagagtgcatcaaagaattcacactggggagaaaccatttaaatgtaatgaatgtgggaagaaatttgtccggaaagcaatccttagtgatcatcagagaattcacacaggggagaaaccctttcagtgtaataaatgtgggaaaacttttggccagaaatcaaacctcagaatacatcaaaggactcacagtggggagaaatcttatgaatgcaatgaatatgggaaattatgtaagaagtctaccctaagcttataccagaaaattcagggagaggggaatccctattgatgtaataactagaaaatccttttgacaaaaggaataccccatttgatatcagagatacacaaaaaaccaattgagggtagtgaatgtaagaagacagtcccagaagtaaaccctcactgtgaatcagagaattcacataggaaagaaaccagatgaagatgaatgcaggaagaattgtgtccaaaatgcaaccttcagagtgtatcaaagaattcagacaggcttctgttttcagagtactatggataggcctgaatgaagtcataccctattagatagctcccacacatcacacaggctggtaatctcttcaccagcaccaatttcattttactccaggcacatagtccagatttcccaatctccttttcatccaggttggtctttgtgactggctactaagatgtggatgtccatgatgtatatcacatcccagtctgaaacataagagacttccctaataaattaccagggccctgtcacaacaaaatggatatcatttctaggacaagcttggtgccgtgctttaatgtggcatggtacaagataaagaagtctgtgcctgaatgaatacacgcagcaaaattctcctcttctgtgtctttcccagttgaacattatgtgagcaaaatttaagcttatacagtagtccccccttatctgtattttcactttacgcaatttccattaaccatggtcaactgtactttaaagttattaaatggatccagaaataaacaattcctacattttaaactgcacccgattctgagtagtgggatgaagtctcatgccctcctgctctcccatgagggttattgaatcattccttagtctagcatatccacagtgtatacactatctgccagttagtcacttacttgacattttagttatcagatcacctgtcagggtatgacagtgcttgtattcaagtaacccttgttttactaaataatggcctgaaattgcaagagcatttctggcatgttgttgtaattattccattattagtccttaatttataaattaggcacagcaagagattaaactatcataggcatgtgtatatgtaggaaaaaaatatagtatatacagggttcagtatacccgtggtttcaaacatcaacttggaattcttggagagcattccttgtagttaagcagggactactgtattctgttgagctttcacatgtttgagtctatttgtttctacacataatttagttatcttctgctaggaaggcagaaagcttctgtgtaagccaggcttaagtcaatcagagggcacaaaccttattaggaggctagagagtcaaggagaacctcaaatatgatcagagaattgtggaaaagacatcctttcaatgtaatgaaattgatagtaccacctgatacagggctttgcatgaacctaaaagtcttttggctgaatggtgagcagccactgtgcagttcaacgtaagtgtgccttaattgcacagaggtactgcccccacacctcctgacacctccatataccccagctatatctgctttaaggagttttccctggctccaaaggccattggcacccacccaagtattatgggaaacctccagagaggggagggactcagatttatatggctttattgaatccatgcccaaggcaacatcttactagttcctgtgggggtacaggacacctagatttagctaatggggtttggcaatgggaaggcaaacaaatttaataactttatgggtgaggtactttgggccagtagagtatactacagttatgtttacatctgaaagtgtagtagggattaattcccataagttatagagagaattctaattccctgtaattcgcataagtcatagaattctaatcaggaataattgtatgtaaagatacctctgaggtccaacagctctgatcattttgggcttcaagtctctctctgtgactggtgattttgtgggttgaaacttctggcaaaagggggcagcccttgggagctgggggccaggggattgacttggttccctgacaagggtaccaggtccaccccttctgaaaagcagctgttagtttactcttgggctcttttacacattggatatctcttccttgggtagagggttctgacctaaaattccactttaggagtttgtcgtcttggactcaacaactaacaaaatgaaaaggacccagcaagcctcacttgtggaatgaaaatggggcattcaggaaagcacctgtcctggccccacagtatgtcagctgtataggcaatagtagtagctgtctcttagaagggaaataatgtatcacctctttccagaacgaagcaaagttgctggcttagtagagccctcaattcatagaggttactgtaattgggcctggctcactgatgctttcgccaactgaaactactaggatcctgtgtgtgttcaaactcagtgccattaacaaacccaaagtgaagcggtcactcctctcagtggaaagagcacgaggatgttctcagctctggccaatactccatttcataaaccatgttacatttttgttaagccttggctctggatgtggcctagatatttgatattctaattggaaattacagattaaaaagcaccctttctttgtacagtgggggtaaaagtcacagctgcttagtacaaccatctgggttgctcaagtagatgcccataataagagactattttctgataagactgactggaatcaagctgccgacagctttctccatccagattgtgacggttgctacctggatccatcattttactggtatggcaaaaaatcacccatgtgacactgggtgacatggtaaaagtacatggtacttttacagtaccatgtactgtacaaaataaaggtctctttatctga

SEQ ID NO: 416035 - DNA, 6010 bp, Homo sapiens
gaacggatatgcgcgttttcgtctgcgcatgtgcagtcaaccccactttccggcttctccctgttagtgtttgctggtgcagagggttcgcagctcaggtgagagcgccgggcctccacgcggattgcggacctgcagggagggatgtgctagtgtccaggggcgggaacgcgacgtcccgggaactcccccaaagcaggccgtcgctccctgtgcctcggccggcccgggacctcagcctgagaagggccggtgggggcgggctccgggggcgttaggtggggctgagtcctagttggaagatgctcggtgcgggccgaggtatgggcgccagaatgcagccaggcgtcggaaaacgcggtgctggcttcaggaggggaatgcgcgtttattgtattgaccatgaacctgccacaaagcgcgtacagcccgtgggtctgcggtgagaggccgagcctaggagctagaaggacctcgtgaattttggctctgtcacttgagcgtttgaaaatgaggatattagtaaaaactgctttgtgtcgttcagaggaaggagggagccccaggaacaggagtcccaccgaagaactgctctctgacagaacagagacctcctcaccagggcttccaaacagatgcagaagaacccagaaaggagcaggtcttgatttgcccaaccagcggcacttcttcatccccttgcccagagagcaccagacttggtgatgtcgccacatccagaagccatcacagattgtgtgacactgaacactgtgggccaacttgcagaaggtggttatcctttacggttctccacactctttcaggagcagcagaaaatgaacatatctcaggcatcagtgtcattcaaggacgtgactatagaattcacccaggaggagtggcagcaaatggcccctgttcagaagaatctgtacagagatgtgatgctggagaactacagcaacctcgtctcagtggggtactgctgtttcaaaccagaggtgatcttcaagttggagcaaggagaggagccttggttctcagaggaggaattctcaaaccagagtcacccaaaagattacagaggtgatgacctgatcaagcagaacaagaaaatcaaagacaaacacttggagcaagcaatatgtatcaataataaaacattgactacagaggaagagaaagttttggggaaaccatttactctgcatgtagctgctgttgcttcaacaaaaatgtcctgcaaatgcaactcatgggaagtgaatttgcaaagtatttctgaatttatcattaataatagaaactattcaacaaagaaaataggttgcggtaatgtatgtgagaattcacctttcaaaattaactttgagaaaactcagactggagagaaattttatgaacataataaaaacatgaaagctctcaattataatgaaaatcttcccaagcatccaaagtttcaaactttggagcaagcttttgaatgtaataaaattggaaaagcctttaatgataaggctaactgtgttaaacataacagttctcacacaggagaaacatcctctaaagatgatgaatttaggaaaaattgtgataagaaaactctctttgaccacaggagaactggcacagggaagaaacacctgcatcttaatcaatgtgggaaatcctttgagaagtcaactgtggaggaatataataaacttaatatgggtataaaacattatgaattaaatccaagtggaaataatttcaacagaaaggcacacctcactgatcctcaaacagctgtcatagaagagaacccattggtaagtaatgacagaacacagacttgggttaaatcctctgaatatcatgaaaataagaaatcctaccagacgtcggttcacagagttcgccgaagaagtcactcaatgatgaaaccctataaatgtaatgaatgtgggaaatccttctgtcagaaaggacatctcattcaacatcagagaactcacacaggagagaaaccatttgaatgtagtgaatgtggaaaaactttctcccagaagtcacacctcagtactcatcagagaattcatacagcagaaaaaccctataaatgtaatgaatgtggaaaaacatttgtccagaagtcaaccctcaggggacatcaaagaattcacacaggagaaaaaccctatgaatgtagtgaatgtgggaaaacttttgttcagaagtccaccctcagagatcatcacagaattcacacaggggagaaatcctttcaatgcaatcaatgtggaaaaacatttggccagaagtcaaacctcagaatacatcagagaactcacactggggagaaaacttaccagtgtaatgaatgtgaaaaatccttctggcgaaaagatcatctcattcaacatcagaaaactcacacgggagagaaaccattcaaatgtaacgaatgtgggaaaacttttgcccggacatcaaccctcagagtgcatcaaagaattcacactggggagaaaccatttaaatgtaatgaatgtgggaagaaatttgtccggaaagcaatccttagtgatcatcagagaattcacacaggggagaaaccctttcagtgtaataaatgtgggaaaacttttggccagaaatcaaacctcagaatacatcaaaggactcacagtggggagaaatcttatgaatgcaatgaatatgggaaattatgtaagaagtctaccctaagcttataccagaaaattcagggagaggggaatccctattgatgtaataactagaaaatccttttgacaaaaggaataccccatttgatatcagagatacacaaaaaaccaattgagggtagtgaatgtaagaagacagtcccagaagtaaaccctcactgtgaatcagagaattcacataggaaagaaaccagatgaagatgaatgcaggaagaattgtgtccaaaatgcaaccttcagagtgtatcaaagaattcagacaggcttctgttttcagagtactatggataggcctgaatgaagtcataccctattagatagctcccacacatcacacaggctggtaatctcttcaccagcaccaatttcattttactccaggcacatagtccagatttcccaatctccttttcatccaggttggtctttgtgactggctactaagatgtggatgtccatgatgtatatcacatcccagtctgaaacataagagacttccctaataaattaccagggccctgtcacaacaaaatggatatcatttctaggacaagcttggtgccgtgctttaatgtggcatggtacaagataaagaagtctgtgcctgaatgaatacacgcagcaaaattctcctcttctgtgtctttcccagttgaacattatgtgagcaaaatttaagcttatacagtagtccccccttatctgtattttcactttacgcaatttccattaaccatggtcaactgtactttaaagttattaaatggatccagaaataaacaattcctacattttaaactgcacccgattctgagtagtgggatgaagtctcatgccctcctgctctcccatgagggttattgaatcattccttagtctagcatatccacagtgtatacactatctgccagttagtcacttacttgacattttagttatcagatcacctgtcagggtatgacagtgcttgtattcaagtaacccttgttttactaaataatggcctgaaattgcaagagcatttctggcatgttgttgtaattattccattattagtccttaatttataaattaggcacagcaagagattaaactatcataggcatgtgtatatgtaggaaaaaaatatagtatatacagggttcagtatacccgtggtttcaaacatcaacttggaattcttggagagcattccttgtagttaagcagggactactgtattctgttgagctttcacatgtttgagtctatttgtttctacacataatttagttatcttctgctaggaaggcagaaagcttctgtgtaagccaggcttaagtcaatcagagggcacaaaccttattaggaggctagagagtcaaggagaacctcaaatatgatcagagaattgtggaaaagacatcctttcaatgtaatgaaattgatagtaccacctgatacagggctttgcatgaacctaaaagtcttttggctgaatggtgagcagccactgtgcagttcaacgtaagtgtgccttaattgcacagaggtactgcccccacacctcctgacacctccatataccccagctatatctgctttaaggagttttccctggctccaaaggccattggcacccacccaagtattatgggaaacctccagagaggggagggactcagatttatatggctttattgaatccatgcccaaggcaacatcttactagttcctgtgggggtacaggacacctagatttagctaatggggtttggcaatgggaaggcaaacaaatttaataactttatgggtgaggtactttgggccagtagagtatactacagttatgtttacatctgaaagtgtagtagggattaattcccataagttatagagagaattctaattccctgtaattcgcataagtcatagaattctaatcaggaataattgtatgtaaagatacctctgaggtccaacagctctgatcattttgggcttcaagtctctctctgtgactggtgattttgtgggttgaaacttctggcaaaagggggcagcccttgggagctgggggccaggggattgacttggttccctgacaagggtaccaggtccaccccttctgaaaagcagctgttagtttactcttgggctcttttacacattggatatctcttccttgggtagagggttctgacctaaaattccactttaggagtttgtcgtcttggactcaacaactaacaaaatgaaaaggacccagcaagcctcacttgtggaatgaaaatggggcattcaggaaagcacctgtcctggccccacagtatgtcagctgtataggcaatagtagtagctgtctcttagaagggaaataatgtatcacctctttccagaacgaagcaaagttgctggcttagtagagccctcaattcatagaggttactgtaattgggcctggctcactgatgctttcgccaactgaaactactaggatcctgtgtgtgttcaaactcagtgccattaacaaacccaaagtgaagcggtcactcctctcagtggaaagagcacgaggatgttctcagctctggccaatactccatttcataaaccatgttacatttttgttaagccttggctctggatgtggcctagatatttgatattctaattggaaattacagattaaaaagcaccctttctttgtacagtgggggtaaaagtcacagctgcttagtacaaccatctgggttgctcaagtagatgcccataataagagactattttctgataagactgactggaatcaagctgccgacagctttctccatccagattgtgacggttgctacctggatccatcattttactggtatggcaaaaaatcacccatgtgacactgggtgacatggtaaaagtacatggtacttttacagtaccatgtactgtacaaaataaaggtctctttatctgaaaaaaagacactgatgattgtcaccagcctgaatgattcttagggttgtgatgtaaccgattaactgtatactgggttgcccaccagcctgtgcgcgtccgaactcctcgcttccattggcacaaccgtggacacacacaaatggtcacgcgagactcgagttctctggcttcaggtcacctctatcaaattgcgctctcatggactcccgttccccaaatgcttccaatctacgatcgcacttgcaacttgggagccagttattctatcgaaatcccaggctcttcttcctgctcaggtcttgtctaccctacggggg

SEQ ID NO: 416036 - DNA, 6023 bp, Homo sapiens
gaacggatatgcgcgttttcgtctgcgcatgtgcagtcaaccccactttccggcttctccctgttagtgtttgctggtgcagagggttcgcagctcaggtgagagcgccgggcctccacgcggattgcggacctgcagggagggatgtgctagtgtccaggggcgggaacgcgacgtcccgggaactcccccaaagcaggccgtcgctccctgtgcctcggccggcccgggacctcagcctgagaagggccggtgggggcgggctccgggggcgttaggtggggctgagtcctagttggaagatgctcggtgcgggccgaggtatgggcgccagaatgcagccaggcgtcggaaaacgcggtgctggcttcaggaggggaatgcgcgtttattgtattgaccatgaacctgccacaaagcgcgtacagcccgtgggtctgcggtgagaggccgagcctaggagctagaaggacctcgtgaattttggctctgtcacttgagcgtttgaaaatgaggatattagtaaaaactgctttgtgtcgttcagaggaaggagggagccccaggaacaggagtcccaccgaagaactgctctctgacagaacagagacctcctcaccagggcttccaaacagatgcagaagaacccagaaaggagcaggtcttgatttgcccaaccagcggcacttcttcatccccttgcccagagagcaccagacttggtgatgtcgccacatccagaagccatcacagattgtgtgacactgaacactgtgggccaacttgcagaaggtggttatcctttacggttctccacactctttcaggagcagcagaaaatgaacatatctcaggcatcagtgtcattcaaggacgtgactatagaattcacccaggaggagtggcagcaaatggcccctgttcagaagaatctgtacagagatgtgatgctggagaactacagcaacctcgtctcagtggggtactgctgtttcaaaccagaggtgatcttcaagttggagcaaggagaggagccttggttctcagaggaggaattctcaaaccagagtcacccaaaagattacagaggtgatgacctgatcaagcagaacaagaaaatcaaagacaaacacttggagcaagcaatatgtatcaataataaaacattgactacagaggaagagaaagttttggggaaaccatttactctgcatgtagctgctgttgcttcaacaaaaatgtcctgcaaatgcaactcatgggaagtgaatttgcaaagtatttctgaatttatcattaataatagaaactattcaacaaagaaaataggttgcggtaatgtatgtgagaattcacctttcaaaattaactttgagaaaactcagactggagagaaattttatgaacataataaaaacatgaaagctctcaattataatgaaaatcttcccaagcatccaaagtttcaaactttggagcaagcttttgaatgtaataaaattggaaaagcctttaatgataaggctaactgtgttaaacataacagttctcacacaggagaaacatcctctaaagatgatgaatttaggaaaaattgtgataagaaaactctctttgaccacaggagaactggcacagggaagaaacacctgcatcttaatcaatgtgggaaatcctttgagaagtcaactgtggaggaatataataaacttaatatgggtataaaacattatgaattaaatccaagtggaaataatttcaacagaaaggcacacctcactgatcctcaaacagctgtcatagaagagaacccattggtaagtaatgacagaacacagacttgggttaaatcctctgaatatcatgaaaataagaaatcctaccagacgtcggttcacagagttcgccgaagaagtcactcaatgatgaaaccctataaatgtaatgaatgtgggaaatccttctgtcagaaaggacatctcattcaacatcagagaactcacacaggagagaaaccatttgaatgtagtgaatgtggaaaaactttctcccagaagtcacacctcagtactcatcagagaattcatacagcagaaaaaccctataaatgtaatgaatgtggaaaaacatttgtccagaagtcaaccctcaggggacatcaaagaattcacacaggagaaaaaccctatgaatgtagtgaatgtgggaaaacttttgttcagaagtccaccctcagagatcatcacagaattcacacaggggagaaatcctttcaatgcaatcaatgtggaaaaacatttggccagaagtcaaacctcagaatacatcagagaactcacactggggagaaaacttaccagtgtaatgaatgtgaaaaatccttctggcgaaaagatcatctcattcaacatcagaaaactcacacgggagagaaaccattcaaatgtaacgaatgtgggaaaacttttgcccggacatcaaccctcagagtgcatcaaagaattcacactggggagaaaccatttaaatgtaatgaatgtgggaagaaatttgtccggaaagcaatccttagtgatcatcagagaattcacacaggggagaaaccctttcagtgtaataaatgtgggaaaacttttggccagaaatcaaacctcagaatacatcaaaggactcacagtggggagaaatcttatgaatgcaatgaatatgggaaattatgtaagaagtctaccctaagcttataccagaaaattcagggagaggggaatccctattgatgtaataactagaaaatccttttgacaaaaggaataccccatttgatatcagagatacacaaaaaaccaattgagggtagtgaatgtaagaagacagtcccagaagtaaaccctcactgtgaatcagagaattcacataggaaagaaaccagatgaagatgaatgcaggaagaattgtgtccaaaatgcaaccttcagagtgtatcaaagaattcagacaggcttctgttttcagagtactatggataggcctgaatgaagtcataccctattagatagctcccacacatcacacaggctggtaatctcttcaccagcaccaatttcattttactccaggcacatagtccagatttcccaatctccttttcatccaggttggtctttgtgactggctactaagatgtggatgtccatgatgtatatcacatcccagtctgaaacataagagacttccctaataaattaccagggccctgtcacaacaaaatggatatcatttctaggacaagcttggtgccgtgctttaatgtggcatggtacaagataaagaagtctgtgcctgaatgaatacacgcagcaaaattctcctcttctgtgtctttcccagttgaacattatgtgagcaaaatttaagcttatacagtagtccccccttatctgtattttcactttacgcaatttccattaaccatggtcaactgtactttaaagttattaaatggatccagaaataaacaattcctacattttaaactgcacccgattctgagtagtgggatgaagtctcatgccctcctgctctcccatgagggttattgaatcattccttagtctagcatatccacagtgtatacactatctgccagttagtcacttacttgacattttagttatcagatcacctgtcagggtatgacagtgcttgtattcaagtaacccttgttttactaaataatggcctgaaattgcaagagcatttctggcatgttgttgtaattattccattattagtccttaatttataaattaggcacagcaagagattaaactatcataggcatgtgtatatgtaggaaaaaaatatagtatatacagggttcagtatacccgtggtttcaaacatcaacttggaattcttggagagcattccttgtagttaagcagggactactgtattctgttgagctttcacatgtttgagtctatttgtttctacacataatttagttatcttctgctaggaaggcagaaagcttctgtgtaagccaggcttaagtcaatcagagggcacaaaccttattaggaggctagagagtcaaggagaacctcaaatatgatcagagaattgtggaaaagacatcctttcaatgtaatgaaattgatagtaccacctgatacagggctttgcatgaacctaaaagtcttttggctgaatggtgagcagccactgtgcagttcaacgtaagtgtgccttaattgcacagaggtactgcccccacacctcctgacacctccatataccccagctatatctgctttaaggagttttccctggctccaaaggccattggcacccacccaagtattatgggaaacctccagagaggggagggactcagatttatatggctttattgaatccatgcccaaggcaacatcttactagttcctgtgggggtacaggacacctagatttagctaatggggtttggcaatgggaaggcaaacaaatttaataactttatgggtgaggtactttgggccagtagagtatactacagttatgtttacatctgaaagtgtagtagggattaattcccataagttatagagagaattctaattccctgtaattcgcataagtcatagaattctaatcaggaataattgtatgtaaagatacctctgaggtccaacagctctgatcattttgggcttcaagtctctctctgtgactggtgattttgtgggttgaaacttctggcaaaagggggcagcccttgggagctgggggccaggggattgacttggttccctgacaagggtaccaggtccaccccttctgaaaagcagctgttagtttactcttgggctcttttacacattggatatctcttccttgggtagagggttctgacctaaaattccactttaggagtttgtcgtcttggactcaacaactaacaaaatgaaaaggacccagcaagcctcacttgtggaatgaaaatggggcattcaggaaagcacctgtcctggccccacagtatgtcagctgtataggcaatagtagtagctgtctcttagaagggaaataatgtatcacctctttccagaacgaagcaaagttgctggcttagtagagccctcaattcatagaggttactgtaattgggcctggctcactgatgctttcgccaactgaaactactaggatcctgtgtgtgttcaaactcagtgccattaacaaacccaaagtgaagcggtcactcctctcagtggaaagagcacgaggatgttctcagctctggccaatactccatttcataaaccatgttacatttttgttaagccttggctctggatgtggcctagatatttgatattctaattggaaattacagattaaaaagcaccctttctttgtacagtgggggtaaaagtcacagctgcttagtacaaccatctgggttgctcaagtagatgcccataataagagactattttctgataagactgactggaatcaagctgccgacagctttctccatccagattgtgacggttgctacctggatccatcattttactggtatggcaaaaaatcacccatgtgacactgggtgacatggtaaaagtacatggtacttttacagtaccatgtactgtacaaaataaaggtctctttatctgaaaaaaatctcttcttcttagccctcctctccttcaattccagtggggtcctcttcccgcctctctccctatctcttctttcatcactctcccgcgcttcgcccaatcgctcccctctgtcacacctctgtcctctcctactcctgccgttccgcattaccttaccactctctctcctcttctttcctctacgagctctcctactttctctccttcaattgtattgcttcttcttatccttctctcacatccgacggcttattttttctcttaaccctctcttcttcacacttctccgctcctcttccctctcttcccagttcgcgattccct

SEQ ID NO: 416037 - DNA, 1245 bp, Homo sapiens
gaacggatatgcgcgttttcgtctgcgcatgtgcagtcaaccccactttccggcttctccctgttagtgtttgctggtgcagagggttcgcagctcaggtgagagcgccgggcctccacgcggattgcggacctgcagggagggatgtgctagtgtccaggggcgggaacgcgacgtcccgggaactcccccaaagcaggccgtcgctccctgtgcctcggccggcccgggacctcagcctgagaagggccggtgggggcgggctccgggggcgttaggtggggctgagtcctagttggaagatgctcggtgcgggccgaggtatgggcgccagaatgcagccaggcgtcggaaaacgcggtgctggcttcaggaggggaatgcgcgtttattgtattgaccatgaacctgccacaaagcgcgtacagcccgtgggtctgcggtgagaggccgagcctaggagctagaaggacctcgtgaattttggctctgtcacttgagcgtttgaaaatgaggatattagtaaaaactgctttgtgtcgttcagaggaaggagggagccccaggaacaggagtcccaccgaagaactgctctctgacagaacagagacctcctcaccagggcttccaaacagatgcagaagaacccagaaaggagcaggtcttgatttgcccaaccagcggcacttcttcatccccttgcccagagagcaccagacttggtgatgtcgccacatccagaagccatcacagattgtgtgacactgaacactgtgggccaacttgcagaaggtggttatcctttacggttctccacactctttcaggagcagcagaaaatgaacatatctcaggcatcagtgtcattcaaggacgtgactatagaattcacccaggaggagtggcagcaaatggcccctgttcagaagaatctgtacagagatgtgatgctggagaactacagcaacctcgtctcagtggggtactgctgtttcaaaccagaggtgatcttcaagttggagcaaggagaggagccttggttctcagaggaggaattctcaaaccagagtcacccaagtgagttactgagcagtagtagacataattctgcaggagtggttagactccaggtcactttaggggtgaacacctaaatattgcaagacttttcttagaaagcctaaaggcacaaaaagcagcagttaaaagaaaataattaataaagttgattccattaaaagtaag

SEQ ID NO: 416038 - DNA, 915 bp, Homo sapiens
gaacggatatgcgcgttttcgtctgcgcatgtgcagtcaaccccactttccggcttctccctgttagtgtttgctggtgcagagggttcgcagctcaggtgagagcgccgggcctccacgcggattgcggacctgcagggagggatgtgctagtgtccaggggcgggaacgcgacgtcccgggaactcccccaaagcaggccgtcgctccctgtgcctcggccggcccgggacctcagcctgagaagggccggtgggggcgggctccgggggcgttaggtggggctgagtcctagttggaagatgctcggtgcgggccgaggtatgggcgccagaatgcagccaggcgtcggaaaacgcggtgctggcttcaggaggggaatgcgcgtttattgtattgaccatgaacctgccacaaagcgcgtacagcccgtgggtctgcggtgagaggccgagcctaggagctagaaggacctcgtgaattttggctctgtcacttgagcgtttgaaaatgaggatattagtaaaaactgctttgtgtcgttcagaggtaagccatcccctgtaaagcatttagctaagcgctagttactaagcagcatgtaaatgttgattcccgttatatttggaagacactttgttcttttcatgtagtatttcgtttaattctcacaaccaccctatttatatcattaaaaatgaagaaggaggagtgaaaagatagagccaagctcacaaaggatgagagagctaggatgtcaatacataaacactttactccccgaatcaggctgtttgtaatggcctacctacctaacccagcattgcagccttcacagcactgagtgattgtccccaaaaccccaggacaatgattgtgaagtcagtgtggacagaatcttactatgtggcaagt

SEQ ID NO: 416039 - DNA, 418 bp, Homo sapiens
gaggatgaaggaaggccccgcccatgagcacatcctcttgcaattcatcaacactgaaaataaagataccataaagaaatgtgaagcaggctgggcgcagtggtgcatgcctgtaatcccagctacttgggaggctgaagcaggagaatcgcttgaacccaggaggcagaggttgcagtgacctgagatcaggccactgcactccagccttggcgacagagagtccgtcgcaaaagaaaaaaacaaacaaacaaacaaaaactaagagcttttgtaaagaatagcttcaggccaggcgcagtggctcacgcctgtaatcccagcactttcggaggccaaggcgggcggatcacgaggtcaggagttcgagaccagcctgaccaacatggtgaaaccctgtctctactaaaaatacaaa

SEQ ID NO: 416040 - DNA, 713 bp, Homo sapiens
caacaagtgggggtttatgaaaaactttcaggaatgggttatctatggtggccgtggagctggcttcctcaagggctctttgaccacaggaagcttggtagcaacaattttaaggtgaacctgccagaggcaagatgagtaagtagctgtggattcatttagtttctgcatccctccagcatgaccgtgagtagcacagccgtggtgccagcctcctgagtttaccatctcatcagaggctagctacacactaggagttactgaccatttctacatgccggagactgtgctacatctcttatagacatgacttcacttactcctcacccaggaacactgaaggaaggacaattacccaatcttcaaaacataaaacaggctcaggctaagcatcttcctccaagttacaccactgacaagtggtagagccaggatttgaactcagagctctataatcaaagcctgctgtcttatccatgatcttgccatccaaacccaaaaacaaatgacctaggccgggcgcggtggctcacgcctgtaatcccagcactttgggaggccaaggtggacggatcacgaggtcaggagatcgagaccatcctggctaaaatggtgaaaccctgtctctactaaaaatacaaaaaaattagccgggcgtggtggcgggcgcctgtagtcccagctactcgggaggctgaggcaggagaatggcg

SEQ ID NO: 416041 - DNA, 1182 bp, Homo sapiens
caacaagtgggggtttatgaaaaactttcaggaatgggttatctatggtggccgtggagctggcttcctcaagggctctttgaccacaggaagcttggtagcaacaattttaaggtgaacctgccagaggcaagatgagtaagtagctgtggattcatttagtttctgcatccctccagcatgaccgtgagtagcacagccgtggtgccagcctcctgagtttaccatctcatcagaggctagctacacactaggagttactgaccatttctacatgccggagactgtgctacatctcttatagacatgacttcacttactcctcacccaggaacactgaaggaaggacaattacccaatcttcaaaacataaaacaggctcaggctaagcatcttcctccaagttacaccactgacaagtggtagagccaggatttgaactcagagctctataatcaaagcctgctgtcttatccatgatcttgccatccaaacccaaaaacaaatgacctaggccgggcgcggtggctcacgcctgtaatcccagcactttgggaggccaaggtggacggatcacgaggtcaggagctcgagaccagcctagccaacatagtaaaaccccatctctactaaaaatacaaaaaaaattagctagtgtagtggcgggcgcctgtaatcccggatactttgaaaattacatacaaaaattactaagaggcccaggcacagtgtcttatgcctgtaatcccaacaccttgggaggccaaggcaggcggatcccctgaggttggaagttcgagaccagcctgaccaataaagtgaaacgccatctctactaaaaatacaaaaattagctgggtgtggtggcaggcgcctgtaatcccagctacttgggaggctgaagcaggagaatcgcttgaacccaggaggcagaggttgcagtgacctgagatcaggccactgcactccagccttggcgacagagagtccgtcgcaaaagaaaaaaacaaacaaacaaacaaaaactaagagcttttgtaaagaatagcttcaggccaggcgcagtggctcacgcctgtaatcccagcactttcggaggccaaggcgggcggatcacgaggtcaggagttcgagaccagcctgaccaacatggtgaaaccctgtctctactaaaaatacaaa

SEQ ID NO: 416042 - DNA, 1760 bp, Homo sapiens
aatccttagatttcttggattgggttttgacttttctcctgaatctcgatgatttttgttcctatccatattctgaattctacttctgtcatttcagccatttcagcctggttaagaacccttgctggggcactagggtggttgtttggaggaagagactctggcttttcaagtagctatatagcaatgctccactcctcagtaccaattttctgtggcaggccatccttatattgcaaaaaatacctgaggctgggtaatatataaagaagcttaattggcttatggttctataggctgtacaagcagcacagtcccaggcatctgctcagcttctggtgaggcctcggaaagcttacaatcatggtggaaggcaaaggaacccgatgtctcacatagtgagaatcaagagtaagagagagtgaaggaagaagccatatacttgtaaacaggcaaacctcatgagcacgcaccatcacaaggacagcatcaagtggatggggctaaaccattcatgagaaatctgcaccaatgatgcagtcacctcctaccaggttccacctccagcactggaaattacaattcaacaagagagttagaggggtcaacttccaaactatatcattctccctgcagttctatcagtttttgcctcatgtatcctgatcctctgttcttgggtgcatacatgttaaggatagtcatgtcttcttggagaatggacccctttcatcattatccctgatagtaattcttgctgtatagtctgctattctataatatacctatttcttcattttggttagtgttagcctggcatatttttctctctttaatttgtatgtctctttacatttcaagtgggttgcttgtaaccaacatataattgggttttgttctttgatcctgctttgacaattttttcttttttaaactggcccagtttttccatataataatctatcttttaattggtacatttacacccttgacattcaaagtatttatatatttggataaacatctaccataatgttactgttttctatttgttaaccttgttctttattcctatttttgtcttccattcgtcttgtgcctttgatggtgttaatttggcattttattattctctcttctagcgtggttttcttgtggttgcccttgtgtttgcagtatagatttacaaataatgcaacccctctttcaaataataatatactgcttcttgggcagtgtaccttatagtaacaaaataatcctaatttctctttcctatcccatgtatcattgctgtcattccacttatatataagcacccctaagtatgacgactatacacacacacacacacacacacacacacaaatatatgtgtacaaaatcaaatacattgttgccattattttgaatgaactgttaactgttagattaagaattggtaccatatggaacaggttagtggaacttactataaaaggcttttctttgggggaaatttttaattactgaaactatttaggagctgtgggattacatgtctatcttcaattagtttgagtaaaatactcgtagtaatttgtgtattttgtcagttttcaaatgaattgttcataatatcctcacattttcaaatttcaactgcgtttataaaattttcatttttccattctctatttgtgtcttcttgctcgatcttaccaaaatattttgttttagtgctttttcaataaacaagttctggcttattttacttggtt

SEQ ID NO: 416043 - DNA, 1656 bp, Homo sapiens
aatccttagatttcttggattgggttttgacttttctcctgaatctcgatgatttttgttcctatccatattctgaattctacttctgtcatttcagccatttcagcctggttaagaacccttgctggggcactagggtggttgtttggaggaagagactctggcttttcaagtagctatatagcaatgctccactcctcagtaccaattttctgtggcaggccatccttatattgcaaaaaatacctgaggctgggtaatatataaagaagcttaattggcttatggttctataggctgtacaagcagcacagtcccaggcatctgctcagcttctggtgaggcctcggaaagcttacaatcatggtggaaggcaaaggaacccgatgtctcacatagtgagaatcaagagtaagagagagtgaaggaagaagccatatacttgtaaacaggcaaacctcatgagcacgcaccatcacaaggacagcatcaagtggatggggctaaaccattcatgagaaatctgcaccaatgatgcagtcacctcctaccaggttccacctccagcactggaaattacaattcaacaagagagttagaggggtcaacttccaaactatatcattctccctgcagttctatcagtttttgcctcatgtatcctgatcctctgttcttgggtgcatacatgttaaggatagtcatgtcttcttggagaatggacccctttcatcattatccctgatagtaattcttgctgtatagtctgctattctataatatacctatttcttcattttggttagtgttagcctggcatatttttctctctttaatttgtatgtctctttacatttcaagtgggttgcttgtaaccaacatataattgggttttgttctttgatcctgctttgacaattttttcttttttaaactggcccagtttttccatataataatctatcttttaattggtacatttacacccttgacattcaaagtatttatatatttggataaacatctaccataatgttactgttttctatttgttaaccttgttctttattcctatttttgtcttccattcgtcttgtgcctttgatggtgttaatttggcattttattattctctcttctagcgtggttttcttgtggttgcccttgtgtttgcagtatagatttacaaataatgcaacccctctttcaaataataatatactgcttcttgggcagtgtaccttatagtaacaaaataatcctaatttctctttcctatcccatgtatcattgctgtcattccacttatatataagcacccctaagtatgacgactatacacacacacacacacacacacacacacaaatatatgtgtacaaaatcaaatacattgttgccattattttgaatgaactgttaactgttagattaagaattggtaccatatggaacaggttagtggaacttactataaaaggcttttctttgggggaaatttttaattactgaaactatttaggagctgtgggattacacgtgcgcgagggataacacgtgcgcgaggataacacgttcgcgagagataacacgtgcgcgagggataacacgttcgcgaggggataacacgtgcgcgagggataacacgttcgcgag

SEQ ID NO: 416044 - DNA, 826 bp, Homo sapiens
tggctgccaagggaaaccctacagtcagaaagtactagaattgttactatctacagggaatcactttctattttttgagttctcaacttcacctcctcctttcaatagtgcccctccatattgctaatctgagaattagtctgaatatgaaaacttttgaaaatatgtttgtgttgtccaagaaaaatttcaccagtgtttctggttgcctgctggttttcagcctttatcttgagtgggcatgtttattctaactgaatgaagaatgactattgaattaggtatattccccatgccaaataattttaactgtgatgtaatcctagccgctttcttatttttactcccgaataaatttaaaatatttaagattggccaggtgtctgtttttctcagggtaacatgggacagctatggataggcattaggcctctcatagaactcttcattcaagtgagtgtggctgagaggaacaaccaggaaagagtatagtgccccattgcacttgccctgttggcttttcaaatgcaaaatccacgttgttgcatttgggaaacttgtttctctgttttatggtatttcatttaagaattttttttaactgccagtctgtaaatatttaaccagccaagcaggaaacagccttttattctcgactgtatacagcttttgtttttatctgggttagcatgggtgccatgtaaataccatataaaatttgactttggttgtccttactttgaagattgacaggggtttctttaattaatcttgtttcctttcatgttctgtattgagatattgaaatacagtattttatacattt

SEQ ID NO: 416045 - DNA, 4100 bp, Homo sapiens
atactgcatacacataacctagcctatttatttgtatctaaaattccctagccgcaccatcaccgtaaacaccaagggaaaaaattaaggaggttcctggtgggaaaagggcgagttggggggacagggtgtctgcgaggtgacgggatacagaaaactagggtgtcaaaagggagcaagaacctgttttgggggcaacttaaggatccaagtgtcacggggtctgggcaatgcaggacgggaggggctgcgtgagtgagtacagaagggaaatgagtgagggggcatgggatctcagagaaaatcagggccctctgagcaaagtggaaaggacgaccgccgcagctcctcgggccgtagcttcgaccccgccttcccttttgcgcagaatcctcgccttggctgcagcagcgcgctgcccccactggacggcgtgccgtgatcgatcgcaggctgcgtcaggagcctcccggcgtataaataggggtggcagaacggcgccgagccgcacacagccatccatcctcccccttccctctctcccctgtcctctctctccgggctcccaccgccgccgcgggccggggagccaccggccgccaccatgagttccttcagctacgagccgtactactcgacctcctacaagcggcgctacgtggagacgccccgggtgcacatctccagcgtgcgcagcggctacagcaccgcacgctcagcttactccagctactcggcgccggtgtcttcctcgctgtccgtgcgccgcagctactcctccagctctggatcgttgatgcccagtctggagaacctcgacctgagccaggtagccgccatcagcaacgacctcaagtccatccgcacgcaggagaaggcgcagctccaggacctcaatgaccgcttcgccagcttcatcgagcgcgtgcacgagctggagcagcagaacaaggtcctggaagccgagctgctggtgctgcgccagaagcactccgagccatcccgcttccgggcgctgtacgagcaggagatccgcgacctgcgcctggcggcggaagatgccaccaacgagaagcaggcgctccagggcgagcgcgaagggctggaggagaccctgcgcaacctgcaggcgcgctatgaagaggaggtgctgagccgcgaggacgccgagggccggctgatggaagcgcgcaaaggcgccgacgaggcggcgctcgctcgcgccgagctcgagaagcgcatcgacagcttgatggacgaaatctcttttctgaagaaagtgcacgaagaggagatcgccgaactgcaggcgcagatccagtacgcgcagatctccgtggagatggacgtgaccaagcccgacctttccgccgcgctcaaggacatccgcgcgcagtacgagaagctggccgccaagaacatgcagaacgctgaggaatggttcaagagccgcttcaccgtgctgaccgagagcgccgccaagaacaccgacgccgtgcgcgccgccaaggacgaggtgtccgagagccgtcgtctgctcaaggccaagaccctggaaatcgaagcatgccggggcatgaatgaagcgctggagaagcagctgcaggagctggaggacaagcagaacgccgacatcagcgctatgcaggacacgatcaacaaattagaaaatgaattgaggaccacaaagagtgaaatggcacgatacctaaaagaataccaagacctcctcaacgtgaagatggctttggatattgagattgcagcttacaggaaactcttggaaggcgaggagacccgactcagtttcaccagcgtgggaagcataaccagtggctactcccagagctcccaggtctttggccgatctgcctacggcggtttacagaccagctcctatctgatgtccacccgctccttcccgtcctactacaccagccatgtccaagaggagcagatcgaagtggaggaaaccattgaggctgccaaggctgaggaagccaaggatgagcccccctctgaaggagaagccgaggaggaggagaaggacaaggaagaggccgaggaagaggaggcagctgaagaggaagaagctgccaaggaagagtctgaagaagcaaaagaagaagaagaaggaggtgaaggtgaagaaggagaggaaaccaaagaagctgaagaggaggagaagaaagttgaaggtgctggggaggaacaagcagctaagaagaaagattgaacccccatttccttaattatttcaggaataattctcccgaaatcaggtcaaccccatcaccaaccaaccaaccagttgagttccagattctatgtgaattaaaaagtcaatatatgtataattctgagatgacttaggttggacattcaatgttgtgctatgaatttcctctttatgcagagtatctgtttgcttgcagagtggctttctggcttgctgccagcctgtgcatggtccacgcttatgagttcaggatctacggcaatgtgaatcattcagatgtttacaataaaaaacaccacatgagtaaatgaattcactaatgttaatgttaaacttcatggaaaaatagtcctttgaaccttcggtggttagcaattaaagaccctgagttatgtgcaataaatagtaaataaagttataccgaatgatgtattttttgctgtggttgttacttaattaaaataccttaaagatggcaccaatataaagtatataccagtggactattgacctccaattttttaaaaagttgaaattttaacaattaccaatacttttttttcttccttcaattggaaattctgagggatacagttatgtcatgattacttgtgaaatctctccccacaaaaattttactgataataaacatgagtaaatgagaaagtctataaataacaatagactttgcctcataacacgtgttgtgttaggttttgggatggctttctagggagcaattctgaaattacttgacagatacactctttatggtaaacaggtcatttcagagtctagagtgctaaccattacactatggaaccatgataaataggtcatttcaaactgatatgtcacaatgcaatatggatagaatatgaatcccatacattcatccctataactgcattttaaaatatagtctaaatatcatgggaggaggttaaaacctgagaacatggtacaataagaaggaataattttttatctatatataatttcaggagaagggattaaaactaccaaaggttatttgccactccactgcaaacatgttgcctgcaatcctgagctcatgatttagtgtgttgttaagcgtaattctgttgcctcaagtaaataccacttaatgctacacatttttaaacctttaaaagctacagacacaagtaatgaaattatgagtcacttaaggggggaggtaatatgcttgtatgttacattgacattgctctgcatgtctctactgggaaatatttggatttcaatgatagcttgactggttggacattgcatcaaatacacgccccatgtatcctttctgtcgtaaagttaagaacgctcttgcatttgatgtggaataaatatagatgatattactatctgctattctgcctttgttctgaaacaattgctttgtcagctaatttcattcaatatttgttttttagacgatctctataagttattaatttaacctgaaaccaaagtggtctccatttaaagttacttaatccctttgtaccacctatttctagttaaatatatgttgctatgcaaataggtaaagtgcttccttgccatgatggtaatggattggaactatgaaggctctcagtgtattggcttctgtaaagatgaggcgtctcctcagaaacaaaacttttcacatttctgcttactagacctgggttgatgtacatggtaagtctcaaacagatgcaagctatgtgcaaaaagtaactttagccaaatggaaatagctggatgctttgagaattacttggttgaagtaagaaaactgtaccatcctctatcctgtgtgccataataaaatagtaaaaaacctaaaaaaaaaaaa

SEQ ID NO: 416046 - DNA, 2671 bp, Homo sapiens
atactgcatacacataacctagcctatttatttgtatctaaaattccctagccgcaccatcaccgtaaacaccaagggaaaaaattaaggaggttcctggtgggaaaagggcgagttggggggacagggtgtctgcgaggtgacgggatacagaaaactagggtgtcaaaagggagcaagaacctgttttgggggcaacttaaggatccaagtgtcacggggtctgggcaatgcaggacgggaggggctgcgtgagtgagtacagaagggaaatgagtgagggggcatgggatctcagagaaaatcagggccctctgagcaaagtggaaaggacgaccgccgcagctcctcgggccgtagcttcgaccccgccttcccttttgcgcagaatcctcgccttggctgcagcagcgcgctgcccccactggacggcgtgccgtgatcgatcgcaggctgcgtcaggagcctcccggcgtataaataggggtggcagaacggcgccgagccgcacacagccatccatcctcccccttccctctctcccctgtcctctctctccgggctcccaccgccgccgcgggccggggagccaccggccgccaccatgagttccttcagctacgagccgtactactcgacctcctacaagcggcgctacgtggagacgccccgggtgcacatctccagcgtgcgcagcggctacagcaccgcacgctcagcttactccagctactcggcgccggtgtcttcctcgctgtccgtgcgccgcagctactcctccagctctggatcgttgatgcccagtctggagaacctcgacctgagccaggtagccgccatcagcaacgacctcaagtccatccgcacgcaggagaaggcgcagctccaggacctcaatgaccgcttcgccagcttcatcgagcgcgtgcacgagctggagcagcagaacaaggtcctggaagccgagctgctggtgctgcgccagaagcactccgagccatcccgcttccgggcgctgtacgagcaggagatccgcgacctgcgcctggcggcggaagatgccaccaacgagaagcaggcgctccagggcgagcgcgaagggctggaggagaccctgcgcaacctgcaggcgcgctatgaagaggaggtgctgagccgcgaggacgccgagggccggctgatggaagcgcgcaaaggcgccgacgaggcggcgctcgctcgcgccgagctcgagaagcgcatcgacagcttgatggacgaaatctcttttctgaagaaagtgcacgaagaggagatcgccgaactgcaggcgcagatccagtacgcgcagatctccgtggagatggacgtgaccaagcccgacctttccgccgcgctcaaggacatccgcgcgcagtacgagaagctggccgccaagaacatgcagaacgctgaggaatggttcaagagccgcttcaccgtgctgaccgagagcgccgccaagaacaccgacgccgtgcgcgccgccaaggacgaggtgtccgagagccgtcgtctgctcaaggccaagaccctggaaatcgaagcatgccggggcatgaatgaagcgctggagaagcagctgcaggagctggaggacaagcagaacgccgacatcagcgctatgcaggacacgatcaacaaattagaaaatgaattgaggaccacaaagagtgaaatggcacgatacctaaaagaataccaagacctcctcaacgtgaagatggctttggatattgagattgcagcttacaggaaactcttggaaggcgaggagacccgactcagtttcaccagcgtgggaagcataaccagtggctactcccagagctcccaggtctttggccgatctgcctacggcggtttacagaccagctcctatctgatgtccacccgctccttcccgtcctactacaccagccatgtccaagaggagcagatcgaagtggaggaaaccattgaggctgccaaggctgaggaagccaaggatgagcccccctctgaaggagaagccgaggaggaggagaaggacaaggaagaggccgaggaagaggaggcagctgaagaggaagaagctgccaaggaagagtctgaagaagcaaaagaagaagaagaaggaggtgaaggtgaagaaggagaggaaaccaaagaagctgaagaggaggagaagaaagttgaaggtgctggggaggaacaagcagctaagaagaaagattgaacccccatttccttaattatttcaggaataattctcccgaaatcaggtcaaccccatcaccaaccaaccaaccagttgagttccagattctatgtgaattaaaaagtcaatatatgtataattctgagatgacttaggttggacattcaatgttgtgctatgaatttcctctttatgcagagtatctgtttgcttgcagagtggctttctggcttgctgccagcctgtgcatggtccacgcttatgagttcaggatctacggcaatgtgaatcattcagatgtttacaataaaaaacaccacatgagtaaatgaattcactaatgttaatgttaaacttcatggaaaaatagtcctttgaaccttcggtggttagcaattaaagaccctgagttatgtgcaataaatagtaaataaagttataccgaatgatgta

SEQ ID NO: 416047 - DNA, 3821 bp, Homo sapiens
atactgcatacacataacctagcctatttatttgtatctaaaattccctagccgcaccatcaccgtaaacaccaagggaaaaaattaaggaggttcctggtgggaaaagggcgagttggggggacagggtgtctgcgaggtgacgggatacagaaaactagggtgtcaaaagggagcaagaacctgttttgggggcaacttaaggatccaagtgtcacggggtctgggcaatgcaggacgggaggggctgcgtgagtgagtacagaagggaaatgagtgagggggcatgggatctcagagaaaatcagggccctctgagcaaagtggaaaggacgaccgccgcagctcctcgggccgtagcttcgaccccgccttcccttttgcgcagaatcctcgccttggctgcagcagcgcgctgcccccactggacggcgtgccgtgatcgatcgcaggctgcgtcaggagcctcccggcgtataaataggggtggcagaacggcgccgagccgcacacagccatccatcctcccccttccctctctcccctgtcctctctctccgggctcccaccgccgccgcgggccggggagccaccggccgccaccatgagttccttcagctacgagccgtactactcgacctcctacaagcggcgctacgtggagacgccccgggtgcacatctccagcgtgcgcagcggctacagcaccgcacgctcagcttactccagctactcggcgccggtgtcttcctcgctgtccgtgcgccgcagctactcctccagctctggatcgttgatgcccagtctggagaacctcgacctgagccaggtagccgccatcagcaacgacctcaagtccatccgcacgcaggagaaggcgcagctccaggacctcaatgaccgcttcgccagcttcatcgagcgcgtgcacgagctggagcagcagaacaaggtcctggaagccgagctgctggtgctgcgccagaagcactccgagccatcccgcttccgggcgctgtacgagcaggagatccgcgacctgcgcctggcggcggaagatgccaccaacgagaagcaggcgctccagggcgagcgcgaagggctggaggagaccctgcgcaacctgcaggcgcgctatgaagaggaggtgctgagccgcgaggacgccgagggccggctgatggaagcgcgcaaaggcgccaagaacaccgacgccgtgcgcgccgccaaggacgaggtgtccgagagccgtcgtctgctcaaggccaagaccctggaaatcgaagcatgccggggcatgaatgaagcgctggagaagcagctgcaggagctggaggacaagcagaacgccgacatcagcgctatgcaggacacgatcaacaaattagaaaatgaattgaggaccacaaagagtgaaatggcacgatacctaaaagaataccaagacctcctcaacgtgaagatggctttggatattgagattgcagcttacaggaaactcttggaaggcgaggagacccgactcagtttcaccagcgtgggaagcataaccagtggctactcccagagctcccaggtctttggccgatctgcctacggcggtttacagaccagctcctatctgatgtccacccgctccttcccgtcctactacaccagccatgtccaagaggagcagatcgaagtggaggaaaccattgaggctgccaaggctgaggaagccaaggatgagcccccctctgaaggagaagccgaggaggaggagaaggacaaggaagaggccgaggaagaggaggcagctgaagaggaagaagctgccaaggaagagtctgaagaagcaaaagaagaagaagaaggaggtgaaggtgaagaaggagaggaaaccaaagaagctgaagaggaggagaagaaagttgaaggtgctggggaggaacaagcagctaagaagaaagattgaacccccatttccttaattatttcaggaataattctcccgaaatcaggtcaaccccatcaccaaccaaccaaccagttgagttccagattctatgtgaattaaaaagtcaatatatgtataattctgagatgacttaggttggacattcaatgttgtgctatgaatttcctctttatgcagagtatctgtttgcttgcagagtggctttctggcttgctgccagcctgtgcatggtccacgcttatgagttcaggatctacggcaatgtgaatcattcagatgtttacaataaaaaacaccacatgagtaaatgaattcactaatgttaatgttaaacttcatggaaaaatagtcctttgaaccttcggtggttagcaattaaagaccctgagttatgtgcaataaatagtaaataaagttataccgaatgatgtattttttgctgtggttgttacttaattaaaataccttaaagatggcaccaatataaagtatataccagtggactattgacctccaattttttaaaaagttgaaattttaacaattaccaatacttttttttcttccttcaattggaaattctgagggatacagttatgtcatgattacttgtgaaatctctccccacaaaaattttactgataataaacatgagtaaatgagaaagtctataaataacaatagactttgcctcataacacgtgttgtgttaggttttgggatggctttctagggagcaattctgaaattacttgacagatacactctttatggtaaacaggtcatttcagagtctagagtgctaaccattacactatggaaccatgataaataggtcatttcaaactgatatgtcacaatgcaatatggatagaatatgaatcccatacattcatccctataactgcattttaaaatatagtctaaatatcatgggaggaggttaaaacctgagaacatggtacaataagaaggaataattttttatctatatataatttcaggagaagggattaaaactaccaaaggttatttgccactccactgcaaacatgttgcctgcaatcctgagctcatgatttagtgtgttgttaagcgtaattctgttgcctcaagtaaataccacttaatgctacacatttttaaacctttaaaagctacagacacaagtaatgaaattatgagtcacttaaggggggaggtaatatgcttgtatgttacattgacattgctctgcatgtctctactgggaaatatttggatttcaatgatagcttgactggttggacattgcatcaaatacacgccccatgtatcctttctgtcgtaaagttaagaacgctcttgcatttgatgtggaataaatatagatgatattactatctgctattctgcctttgttctgaaacaattgctttgtcagctaatttcattcaatatttgttttttagacgatctctataagttattaatttaacctgaaaccaaagtggtctccatttaaagttacttaatccctttgtaccacctatttctagttaaatatatgttgctatgcaaataggtaaagtgcttccttgccatgatggtaatggattggaactatgaaggctctcagtgtattggcttctgtaaagatgaggcgtctcctcagaaacaaaacttttcacatttctgcttactagacctgggttgatgtacatggtaagtctcaaacagatgcaagctatgtgcaaaaagtaactttagccaaatggaaatagctggatgctttgagaattacttggttgaagtaagaaaactgtaccatcctctatcctgtgtgccataataaaatagtaaaaaacctaaaaaaaaaaaa

SEQ ID NO: 416048 - DNA, 2515 bp, Homo sapiens
gcgctgatgtcggcgttctgcttgtcctccagctcctgcagctgcttctccagcgctatgcaggacacgatcaacaaattagaaaatgaattgaggaccacaaagagtgaaatggcacgatacctaaaagaataccaagacctcctcaacgtgaagatggctttggatattgagattgcagcttacaggaaactcttggaaggcgaggagacccgactcagtttcaccagcgtgggaagcataaccagtggctactcccagagctcccaggtctttggccgatctgcctacggcggtttacagaccagctcctatctgatgtccacccgctccttcccgtcctactacaccagccatgtccaagaggagcagatcgaagtggaggaaaccattgaggctgccaaggctgaggaagccaaggatgagcccccctctgaaggagaagccgaggaggaggagaaggacaaggaagaggccgaggaagaggaggcagctgaagaggaagaagctgccaaggaagagtctgaagaagcaaaagaagaagaagaaggaggtgaaggtgaagaaggagaggaaaccaaagaagctgaagaggaggagaagaaagttgaaggtgctggggaggaacaagcagctaagaagaaagattgaacccccatttccttaattatttcaggaataattctcccgaaatcaggtcaaccccatcaccaaccaaccaaccagttgagttccagattctatgtgaattaaaaagtcaatatatgtataattctgagatgacttaggttggacattcaatgttgtgctatgaatttcctctttatgcagagtatctgtttgcttgcagagtggctttctggcttgctgccagcctgtgcatggtccacgcttatgagttcaggatctacggcaatgtgaatcattcagatgtttacaataaaaaacaccacatgagtaaatgaattcactaatgttaatgttaaacttcatggaaaaatagtcctttgaaccttcggtggttagcaattaaagaccctgagttatgtgcaataaatagtaaataaagttataccgaatgatgtattttttgctgtggttgttacttaattaaaataccttaaagatggcaccaatataaagtatataccagtggactattgacctccaattttttaaaaagttgaaattttaacaattaccaatacttttttttcttccttcaattggaaattctgagggatacagttatgtcatgattacttgtgaaatctctccccacaaaaattttactgataataaacatgagtaaatgagaaagtctataaataacaatagactttgcctcataacacgtgttgtgttaggttttgggatggctttctagggagcaattctgaaattacttgacagatacactctttatggtaaacaggtcatttcagagtctagagtgctaaccattacactatggaaccatgataaataggtcatttcaaactgatatgtcacaatgcaatatggatagaatatgaatcccatacattcatccctataactgcattttaaaatatagtctaaatatcatgggaggaggttaaaacctgagaacatggtacaataagaaggaataattttttatctatatataatttcaggagaagggattaaaactaccaaaggttatttgccactccactgcaaacatgttgcctgcaatcctgagctcatgatttagtgtgttgttaagcgtaattctgttgcctcaagtaaataccacttaatgctacacatttttaaacctttaaaagctacagacacaagtaatgaaattatgagtcacttaaggggggaggtaatatgcttgtatgttacattgacattgctctgcatgtctctactgggaaatatttggatttcaatgatagcttgactggttggacattgcatcaaatacacgccccatgtatcctttctgtcgtaaagttaagaacgctcttgcatttgatgtggaataaatatagatgatattactatctgctattctgcctttgttctgaaacaattgctttgtcagctaatttcattcaatatttgttttttagacgatctctataagttattaatttaacctgaaaccaaagtggtctccatttaaagttacttaatccctttgtaccacctatttctagttaaatatatgttgctatgcaaataggtaaagtgcttccttgccatgatggtaatggattggaactatgaaggctctcagtgtattggcttctgtaaagatgaggcgtctcctcagaaacaaaacttttcacatttctgcttactagacctgggttgatgtacatggtaagtctcaaacagatgcaagctatgtgcaaaaagtaactttagccaaatggaaatagctggatgctttgagaattacttggttgaagtaagaaaactgtaccatcctctatcctgtgtgccataataaaatagtaaaaaacctaaaaaaaaaaaa

SEQ ID NO: 416049 - DNA, 1398 bp, Homo sapiens
tagcgtggtcgcggccgaggtacgcgtatataccagtggactattgacctccaattttttaaaaagttgaaattttaacaattaccaatacttttttttcttccttcaattggaaattctgagggatacagttatgtcatgattacttgtgaaatctctccccacaaaaattttactgataataaacatgagtaaatgagaaagtctataaataacaatagactttgcctcataacacgtgttgtgttaggttttgggatggctttctagggagcaattctgaaattacttgacagatacactctttatggtaaacaggtcatttcagagtctagagtgctaaccattacactatggaaccatgataaataggtcatttcaaactgatatgtcacaatgcaatatggatagaatatgaatcccatacattcatccctataactgcattttaaaatatagtctaaatatcatgggaggaggttaaaacctgagaacatggtacaataagaaggaataattttttatctatatataatttcaggagaagggattaaaactaccaaaggttatttgccactccactgcaaacatgttgcctgcaatcctgagctcatgatttagtgtgttgttaagcgtaattctgttgcctcaagtaaataccacttaatgctacacatttttaaacctttaaaagctacagacacaagtaatgaaattatgagtcacttaaggggggaggtaatatgcttgtatgttacattgacattgctctgcatgtctctactgggaaatatttggatttcaatgatagcttgactggttggacattgcatcaaatacacgccccatgtatcctttctgtcgtaaagttaagaacgctcttgcatttgatgtggaataaatatagatgatattactatctgctattctgcctttgttctgaaacaattgctttgtcagctaatttcattcaatatttgttttttagacgatctctataagttattaatttaacctgaaaccaaagtggtctccatttaaagttacttaatccctttgtaccacctatttctagttaaatatatgttgctatgcaaataggtaaagtgcttccttgccatgatggtaatggattggaactatgaaggctctcagtgtattggcttctgtaaagatgaggcgtctcctcagaaacaaaacttttcacatttctgcttactagacctgggttgatgtacatggtaagtctcaaacagatgcaagctatgtgcaaaaagtaactttagccaaatggaaatagctggatgctttgagaattacttggttgaagtaagaaaactgtaccatcctctatcctgtgtgccataataaaatagtaaaaaacctaaaaaaaaaaaa

SEQ ID NO: 416050 - DNA, 4046 bp, Homo sapiens
atactgcatacacataacctagcctatttatttgtatctaaaattccctagccgcaccatcaccgtaaacaccaagggaaaaaattaaggaggttcctggtgggaaaagggcgagttggggggacagggtgtctgcgaggtgacgggatacagaaaactagggtgtcaaaagggagcaagaacctgttttgggggcaacttaaggatccaagtgtcacggggtctgggcaatgcaggacgggaggggctgcgtgagtgagtacagaagggaaatgagtgagggggcatgggatctcagagaaaatcagggccctctgagcaaagtggaaaggacgaccgccgcagctcctcgggccgtagcttcgaccccgccttcccttttgcgcagaatcctcgccttggctgcagcagcgcgctgcccccactggacggcgtgccgtgatcgatcgcaggctgcgtcaggagcctcccggcgtataaataggggtggcagaacggcgccgagccgcacacagccatccatcctcccccttccctctctcccctgtcctctctctccgggctcccaccgccgccgcgggccggggagccaccggccgccaccatgagttccttcagctacgagccgtactactcgacctcctacaagcggcgctacgtggagacgccccgggtgcacatctccagcgtgcgcagcggctacagcaccgcacgctcagcttactccagctactcggcgccggtgtcttcctcgctgtccgtgcgccgcagctactcctccagctctggatcgttgatgcccagtctggagaacctcgacctgagccaggtagccgccatcagcaacgacctcaagtccatccgcacgcaggagaaggcgcagctccaggacctcaatgaccgcttcgccagcttcatcgagcgcgtgcacgagctggagcagcagaacaaggtcctggaagccgagctgctggtgctgcgccagaagcactccgagccatcccgcttccgggcgctgtacgagcaggagatccgcgacctgcgcctggcggcggaagatgccaccaacgagaagcaggcgctccagggcgagcgcgaagggctggaggagaccctgcgcaacctgcaggcgcgctatgaagaggaggtgctgagccgcgaggacgccgagggccggctgatggaagcgcgcaaaggcgccgacgaggcggcgctcgctcgcgccgagctcgagaagcgcatcgacagcttgatggacgaaatctcttttctgaagaaagtgcacgaagaggagatcgccgaactgcaggcgcagatccagtacgcgcagatctccgtggagatggacgtgaccaagcccgacctttccgccgcgctcaaggacatccgcgcgcagtacgagaagctggccgccaagaacatgcagaacgctgaggaatggttcaagagccgcttcaccgtgctgaccgagagcgccgccaagaacaccgacgccgtgcgcgccgccaaggacgaggtgtccgagagccgtcgtctgctcaaggccaagaccctggaaatcgaagcatgccggggcatgaatgaagcgctggagaagcagctgcaggagctggaggacaagcagaacgccgacatcagcgctatgcaggacacgatcaacaaattagaaaatgaattgaggaccacaaagagtgaaatggcacgatacctaaaagaataccaagacctcctcaacgtgaagatggctttggatattgagattgcagcttacaggaaactcttggaaggcgaggagacccgactcagtttcaccagcgtgggaagcataaccagtggctactcccagagctcccaggtctttggccgatctgcctacggcggtttacagaccagctcctatctgatgtccacccgctccttcccgtcctactacaccagccatgtccaagaggagcagatcgaagtggaggaaaccattgaggctgccaaggctgaggaagccaaggatgagcccccctctgaaggagaagccgaggaggaggagaaggacaaggaagaggccgaggaagaggaggcagctgaagaggaagaagctgccaaggaagagtctgaagaagcaaaagaagaagaagaaggaggtgaaggtgaagaaggagaggaaaccaaagaagctgaagaggaggagaagaaagttgaaggtgctggggaggaacaagcagctaagaagaaagattgaacccccatttccttaattatttcaggaataattctcccgaaatcaggtcaaccccatcaccaaccaaccaaccagttgagttccagattctatgtgaattatgctatgaatttcctctttatgcagagtatctgtttgcttgcagagtggctttctggcttgctgccagcctgtgcatggtccacgcttatgagttcaggatctacggcaatgtgaatcattcagatgtttacaataaaaaacaccacatgagtaaatgaattcactaatgttaatgttaaacttcatggaaaaatagtcctttgaaccttcggtggttagcaattaaagaccctgagttatgtgcaataaatagtaaataaagttataccgaatgatgtattttttgctgtggttgttacttaattaaaataccttaaagatggcaccaatataaagtatataccagtggactattgacctccaattttttaaaaagttgaaattttaacaattaccaatacttttttttcttccttcaattggaaattctgagggatacagttatgtcatgattacttgtgaaatctctccccacaaaaattttactgataataaacatgagtaaatgagaaagtctataaataacaatagactttgcctcataacacgtgttgtgttaggttttgggatggctttctagggagcaattctgaaattacttgacagatacactctttatggtaaacaggtcatttcagagtctagagtgctaaccattacactatggaaccatgataaataggtcatttcaaactgatatgtcacaatgcaatatggatagaatatgaatcccatacattcatccctataactgcattttaaaatatagtctaaatatcatgggaggaggttaaaacctgagaacatggtacaataagaaggaataattttttatctatatataatttcaggagaagggattaaaactaccaaaggttatttgccactccactgcaaacatgttgcctgcaatcctgagctcatgatttagtgtgttgttaagcgtaattctgttgcctcaagtaaataccacttaatgctacacatttttaaacctttaaaagctacagacacaagtaatgaaattatgagtcacttaaggggggaggtaatatgcttgtatgttacattgacattgctctgcatgtctctactgggaaatatttggatttcaatgatagcttgactggttggacattgcatcaaatacacgccccatgtatcctttctgtcgtaaagttaagaacgctcttgcatttgatgtggaataaatatagatgatattactatctgctattctgcctttgttctgaaacaattgctttgtcagctaatttcattcaatatttgttttttagacgatctctataagttattaatttaacctgaaaccaaagtggtctccatttaaagttacttaatccctttgtaccacctatttctagttaaatatatgttgctatgcaaataggtaaagtgcttccttgccatgatggtaatggattggaactatgaaggctctcagtgtattggcttctgtaaagatgaggcgtctcctcagaaacaaaacttttcacatttctgcttactagacctgggttgatgtacatggtaagtctcaaacagatgcaagctatgtgcaaaaagtaactttagccaaatggaaatagctggatgctttgagaattacttggttgaagtaagaaaactgtaccatcctctatcctgtgtgccataataaaatagtaaaaaacctaaaaaaaaaaaa

SEQ ID NO: 416051 - DNA, 4052 bp, Homo sapiens
atactgcatacacataacctagcctatttatttgtatctaaaattccctagccgcaccatcaccgtaaacaccaagggaaaaaattaaggaggttcctggtgggaaaagggcgagttggggggacagggtgtctgcgaggtgacgggatacagaaaactagggtgtcaaaagggagcaagaacctgttttgggggcaacttaaggatccaagtgtcacggggtctgggcaatgcaggacgggaggggctgcgtgagtgagtacagaagggaaatgagtgagggggcatgggatctcagagaaaatcagggccctctgagcaaagtggaaaggacgaccgccgcagctcctcgggccgtagcttcgaccccgccttcccttttgcgcagaatcctcgccttggctgcagcagcgcgctgcccccactggacggcgtgccgtgatcgatcgcaggctgcgtcaggagcctcccggcgtataaataggggtggcagaacggcgccgagccgcacacagccatccatcctcccccttccctctctcccctgtcctctctctccgggctcccaccgccgccgcgggccggggagccaccggccgccaccatgagttccttcagctacgagccgtactactcgacctcctacaagcggcgctacgtggagacgccccgggtgcacatctccagcgtgcgcagcggctacagcaccgcacgctcagcttactccagctactcggcgccggtgtcttcctcgctgtccgtgcgccgcagctactcctccagctctggatcgttgatgcccagtctggagaacctcgacctgagccaggtagccgccatcagcaacgacctcaagtccatccgcacgcaggagaaggcgcagctccaggacctcaatgaccgcttcgccagcttcatcgagcgcgtgcacgagctggagcagcagaacaaggtcctggaagccgagctgctggtgctgcgccagaagcactccgagccatcccgcttccgggcgctgtacgagcaggagatccgcgacctgcgcctggcggcggaagatgccaccaacgagaagcaggcgctccagggcgagcgcgaagggctggaggagaccctgcgcaacctgcaggcgcgctatgaagaggaggtgctgagccgcgaggacgccgagggccggctgatggaagcgcgcaaaggcgccgacgaggcggcgctcgctcgcctgaagaaagtgcacgaagaggagatcgccgaactgcaggcgcagatccagtacgcgcagatctccgtggagatggacgtgaccaagcccgacctttccgccgcgctcaaggacatccgcgcgcagtacgagaagctggccgccaagaacatgcagaacgctgaggaatggttcaagagccgcttcaccgtgctgaccgagagcgccgccaagaacaccgacgccgtgcgcgccgccaaggacgaggtgtccgagagccgtcgtctgctcaaggccaagaccctggaaatcgaagcatgccggggcatgaatgaagcgctggagaagcagctgcaggagctggaggacaagcagaacgccgacatcagcgctatgcaggacacgatcaacaaattagaaaatgaattgaggaccacaaagagtgaaatggcacgatacctaaaagaataccaagacctcctcaacgtgaagatggctttggatattgagattgcagcttacaggaaactcttggaaggcgaggagacccgactcagtttcaccagcgtgggaagcataaccagtggctactcccagagctcccaggtctttggccgatctgcctacggcggtttacagaccagctcctatctgatgtccacccgctccttcccgtcctactacaccagccatgtccaagaggagcagatcgaagtggaggaaaccattgaggctgccaaggctgaggaagccaaggatgagcccccctctgaaggagaagccgaggaggaggagaaggacaaggaagaggccgaggaagaggaggcagctgaagaggaagaagctgccaaggaagagtctgaagaagcaaaagaagaagaagaaggaggtgaaggtgaagaaggagaggaaaccaaagaagctgaagaggaggagaagaaagttgaaggtgctggggaggaacaagcagctaagaagaaagattgaacccccatttccttaattatttcaggaataattctcccgaaatcaggtcaaccccatcaccaaccaaccaaccagttgagttccagattctatgtgaattaaaaagtcaatatatgtataattctgagatgacttaggttggacattcaatgttgtgctatgaatttcctctttatgcagagtatctgtttgcttgcagagtggctttctggcttgctgccagcctgtgcatggtccacgcttatgagttcaggatctacggcaatgtgaatcattcagatgtttacaataaaaaacaccacatgagtaaatgaattcactaatgttaatgttaaacttcatggaaaaatagtcctttgaaccttcggtggttagcaattaaagaccctgagttatgtgcaataaatagtaaataaagttataccgaatgatgtattttttgctgtggttgttacttaattaaaataccttaaagatggcaccaatataaagtatataccagtggactattgacctccaattttttaaaaagttgaaattttaacaattaccaatacttttttttcttccttcaattggaaattctgagggatacagttatgtcatgattacttgtgaaatctctccccacaaaaattttactgataataaacatgagtaaatgagaaagtctataaataacaatagactttgcctcataacacgtgttgtgttaggttttgggatggctttctagggagcaattctgaaattacttgacagatacactctttatggtaaacaggtcatttcagagtctagagtgctaaccattacactatggaaccatgataaataggtcatttcaaactgatatgtcacaatgcaatatggatagaatatgaatcccatacattcatccctataactgcattttaaaatatagtctaaatatcatgggaggaggttaaaacctgagaacatggtacaataagaaggaataattttttatctatatataatttcaggagaagggattaaaactaccaaaggttatttgccactccactgcaaacatgttgcctgcaatcctgagctcatgatttagtgtgttgttaagcgtaattctgttgcctcaagtaaataccacttaatgctacacatttttaaacctttaaaagctacagacacaagtaatgaaattatgagtcacttaaggggggaggtaatatgcttgtatgttacattgacattgctctgcatgtctctactgggaaatatttggatttcaatgatagcttgactggttggacattgcatcaaatacacgccccatgtatcctttctgtcgtaaagttaagaacgctcttgcatttgatgtggaataaatatagatgatattactatctgctattctgcctttgttctgaaacaattgctttgtcagctaatttcattcaatatttgttttttagacgatctctataagttattaatttaacctgaaaccaaagtggtctccatttaaagttacttaatccctttgtaccacctatttctagttaaatatatgttgctatgcaaataggtaaagtgcttccttgccatgatggtaatggattggaactatgaaggctctcagtgtattggcttctgtaaagatgaggcgtctcctcagaaacaaaacttttcacatttctgcttactagacctgggttgatgtacatggtaagtctcaaacagatgcaagctatgtgcaaaaagtaactttagccaaatggaaatagctggatgctttgagaattacttggttgaagtaagaaaactgtaccatcctctatcctgtgtgccataataaaatagtaaaaaacctaaaaaaaaaaaa

SEQ ID NO: 416052 - DNA, 3517 bp, Homo sapiens
atactgcatacacataacctagcctatttatttgtatctaaaattccctagccgcaccatcaccgtaaacaccaagggaaaaaattaaggaggttcctggtgggaaaagggcgagttggggggacagggtgtctgcgaggtgacgggatacagaaaactagggtgtcaaaagggagcaagaacctgttttgggggcaacttaaggatccaagtgtcacggggtctgggcaatgcaggacgggaggggctgcgtgagtgagtacagaagggaaatgagtgagggggcatgggatctcagagaaaatcagggccctctgagcaaagtggaaaggacgaccgccgcagctcctcgggccgtagcttcgaccccgccttcccttttgcgcagaatcctcgccttggctgcagcagcgcgctgcccccactggacggcgtgccgtgatcgatcgcaggctgcgtcaggagcctcccggcgtataaataggggtggcagaacggcgccgagccgcacacagccatccatcctcccccttccctctctcccctgtcctctctctccgggctcccaccgccgccgcgggccggggagccaccggccgccaccatgagttccttcagctacgagccgtactactcgacgccgagctcgagaagcgcatcgacagcttgatggacgaaatctcttttctgaagaaagtgcacgaagaggagatcgccgaactgcaggcgcagatccagtacgcgcagatctccgtggagatggacgtgaccaagcccgacctttccgccgcgctcaaggacatccgcgcgcagtacgagaagctggccgccaagaacatgcagaacgctgaggaatggttcaagagccgcttcaccgtgctgaccgagagcgccgccaagaacaccgacgccgtgcgcgccgccaaggacgaggtgtccgagagccgtcgtctgctcaaggccaagaccctggaaatcgaagcatgccggggcatgaatgaagcgctggagaagcagctgcaggagctggaggacaagcagaacgccgacatcagcgctatgcaggacacgatcaacaaattagaaaatgaattgaggaccacaaagagtgaaatggcacgatacctaaaagaataccaagacctcctcaacgtgaagatggctttggatattgagattgcagcttacaggaaactcttggaaggcgaggagacccgactcagtttcaccagcgtgggaagcataaccagtggctactcccagagctcccaggtctttggccgatctgcctacggcggtttacagaccagctcctatctgatgtccacccgctccttcccgtcctactacaccagccatgtccaagaggagcagatcgaagtggaggaaaccattgaggctgccaaggctgaggaagccaaggatgagcccccctctgaaggagaagccgaggaggaggagaaggacaaggaagaggccgaggaagaggaggcagctgaagaggaagaagctgccaaggaagagtctgaagaagcaaaagaagaagaagaaggaggtgaaggtgaagaaggagaggaaaccaaagaagctgaagaggaggagaagaaagttgaaggtgctggggaggaacaagcagctaagaagaaagattgaacccccatttccttaattatttcaggaataattctcccgaaatcaggtcaaccccatcaccaaccaaccaaccagttgagttccagattctatgtgaattaaaaagtcaatatatgtataattctgagatgacttaggttggacattcaatgttgtgctatgaatttcctctttatgcagagtatctgtttgcttgcagagtggctttctggcttgctgccagcctgtgcatggtccacgcttatgagttcaggatctacggcaatgtgaatcattcagatgtttacaataaaaaacaccacatgagtaaatgaattcactaatgttaatgttaaacttcatggaaaaatagtcctttgaaccttcggtggttagcaattaaagaccctgagttatgtgcaataaatagtaaataaagttataccgaatgatgtattttttgctgtggttgttacttaattaaaataccttaaagatggcaccaatataaagtatataccagtggactattgacctccaattttttaaaaagttgaaattttaacaattaccaatacttttttttcttccttcaattggaaattctgagggatacagttatgtcatgattacttgtgaaatctctccccacaaaaattttactgataataaacatgagtaaatgagaaagtctataaataacaatagactttgcctcataacacgtgttgtgttaggttttgggatggctttctagggagcaattctgaaattacttgacagatacactctttatggtaaacaggtcatttcagagtctagagtgctaaccattacactatggaaccatgataaataggtcatttcaaactgatatgtcacaatgcaatatggatagaatatgaatcccatacattcatccctataactgcattttaaaatatagtctaaatatcatgggaggaggttaaaacctgagaacatggtacaataagaaggaataattttttatctatatataatttcaggagaagggattaaaactaccaaaggttatttgccactccactgcaaacatgttgcctgcaatcctgagctcatgatttagtgtgttgttaagcgtaattctgttgcctcaagtaaataccacttaatgctacacatttttaaacctttaaaagctacagacacaagtaatgaaattatgagtcacttaaggggggaggtaatatgcttgtatgttacattgacattgctctgcatgtctctactgggaaatatttggatttcaatgatagcttgactggttggacattgcatcaaatacacgccccatgtatcctttctgtcgtaaagttaagaacgctcttgcatttgatgtggaataaatatagatgatattactatctgctattctgcctttgttctgaaacaattgctttgtcagctaatttcattcaatatttgttttttagacgatctctataagttattaatttaacctgaaaccaaagtggtctccatttaaagttacttaatccctttgtaccacctatttctagttaaatatatgttgctatgcaaataggtaaagtgcttccttgccatgatggtaatggattggaactatgaaggctctcagtgtattggcttctgtaaagatgaggcgtctcctcagaaacaaaacttttcacatttctgcttactagacctgggttgatgtacatggtaagtctcaaacagatgcaagctatgtgcaaaaagtaactttagccaaatggaaatagctggatgctttgagaattacttggttgaagtaagaaaactgtaccatcctctatcctgtgtgccataataaaatagtaaaaaacctaaaaaaaaaaaa

SEQ ID NO: 416053 - DNA, 1884 bp, Homo sapiens
atactgcatacacataacctagcctatttatttgtatctaaaattccctagccgcaccatcaccgtaaacaccaagggaaaaaattaaggaggttcctggtgggaaaagggcgagttggggggacagggtgtctgcgaggtgacgggatacagaaaactagggtgtcaaaagggagcaagaacctgttttgggggcaacttaaggatccaagtgtcacggggtctgggcaatgcaggacgggaggggctgcgtgagtgagtacagaagggaaatgagtgagggggcatgggatctcagagaaaatcagggccctctgagcaaagtggaaaggacgaccgccgcagctcctcgggccgtagcttcgaccccgccttcccttttgcgcagaatcctcgccttggctgcagcagcgcgctgcccccactggacggcgtgccgtgatcgatcgcaggctgcgtcaggagcctcccggcgtataaataggggtggcagaacggcgccgagccgcacacagccatccatcctcccccttccctctctcccctgtcctctctctccgggctcccaccgccgccgcgggccggggagccaccggccgccaccatgagttccttcagctacgagccgtactactcgacctcctacaagcggcgctacgtggagacgccccgggtgcacatctccagcgtgcgcagcggctacagcaccgcacgctcagcttactccagctactcggcgccggtgtcttcctcgctgtccgtgcgccgcagctactcctccagctctggatcgttgatgcccagtctggagaacctcgacctgagccaggtagccgccatcagcaacgacctcaagtccatccgcacgcaggagaaggcgcagctccaggacctcaatgaccgcttcgccagcttcatcgagcgcgtgcacgagctggagcagcagaacaaggtcctggaagccgagctgctggtgctgcgccagaagcactccgagccatcccgcttccgggcgctgtacgagcaggagatccgcgacctgcgcctggcggcggaagatgccaccaacgagaagcaggcgctccagggcgagcgcgaagggctggaggagaccctgcgcaacctgcaggcgcgctatgaagaggaggtgctgagccgcgaggacgccgagggccggctgatggaagcgcgcaaaggcgccgacgaggcggcgctcgctcgcgccgagctcgagaagcgcatcgacagcttgatggacgaaatctcttttctgaagaaagtgcacgaagaggagatcgccgaactgcaggcgcagatccagtacgcgcagatctccgtggagatggacgtgaccaagcccgacctttccgccgcgctcaaggacatccgcgcgcagtacgagaagctggccgccaagaacatgcagaacgctgaggaatggttcaagagccgcttcaccgtgctgaccgagagcgccgccaagaacaccgacgccgtgcgcgccgccaaggacgaggtgtccgagagccgtcgtctgctcaaggccaagaccctggaaatcgaagcatgccggggcatgaatgaagcgctggagaagcagctgcaggagctggaggacaagcagaacgccgacatcagcgctatgcaggacacgatcaacaaattagaaaatgaattgaggaccacaaagagtgaaatggcacgatacctaaaagaataccaagacctcctcaacgtgaagatggctttggatattgagattgcagcttacaggaaactcttggaaggcgaggagacccgactcagtttcaccagcgtgggaagcataaccagtggctactcccagagctcccagtatgccagaagtccagatgccggccggcc

SEQ ID NO: 416054 - DNA, 1884 bp, Homo sapiens
gtgcgggatcggaagttccatttttcagatgggaaaagtgaggctcagagaaaggaatctggaacgatgaaggtgatgattgtgcctgtggccaagaccgggagaaccctggatccctacaccttccccacccctggaatgtcactatacatatctgacttcttctgatgttgcctttgaccctaaagtcaatatgataaagtaacaagaagctgggacagaggaacaaacacagcccactcaagcagtggtggcaacattctgttagaaaggaggggagtcaaagaaaaaaacacccctccgcccatctccttatcacctccctaaagacagaggagaacatggacaccctccatcctgatagacatgccatgtggtcagtttgtgcggtaaacaggaaaaaaaaaaacctaaagatattgtagacctttattttctttaaatctcctaataaaaacattaaactttcaagaagattccaaactgacattgcatagaccaactcctttccaaaaatatctctgatatactctccaactctctcaatatatagaatttgaagtccaggagctgtgggcacctggtgggaattcactgagctcaaggggacaagagggctgaggacagggctcccacatggggacaaggccaggctttctggcctctggttccagccagcatcaatttggttgtggccaaattctcagtccaatcaccctggcccagggcctggcgtgggaggatgtggcaggctctgtctccttctggggttcctggtctggaggagtctccccaacagcgccaaagctggctgttttccgcccaaagccccagaactttgaatgagaggcaaatctaccctgaatgcacctccctcctaggctgggtgaggtcacgcagacacagaagggcaggacagaactccccatcttctgggggccaattcgtctggacactgtgcggtcagcttcctttttaaagtgccagtatcggtggggcaggaagggactctcagggctgagcagagccttctccagcgcgagcaaacactctgtcccgcctcggcaggcaccttctaacattcattttctaagggttaggtgagtaaaacaacaacaacaaatgctggaaatgctctgttcccaatgccagggagttccaagaccaagaagcccaactctcaccagcgggggcagatggggagctagggaaggaaccctcccagcctggggagggcacctgcacccctcccagagagagaagcccccatcccggccccccagctgggccccagcgctgctggaaccagccggcaggtggggcagaaaagcagcacctcccctcaccagggcgaggaggcaatattgaaccgtgaactcaagaagaaagacggaaagaaaaaatgaaaaaagctacagggctaagtaaacaccagcctgctgggtttatacaaaatgagtgaaatttaaaaggggcaggagagtttgtccagggactggctggcagccagaacccaccttcaagcaagttacaaggacttgggggaaagtgctgagagcagaggctttagtagggggcagggccagactgctccccactgggaaagcacaccccttaaaggagcccttcccccttgcccagaacgggggatgcttccagaggaaggctgaggcttttctggtaaggaagccagctccggaccagtccagccacagcccacctgcctctctggcatccgccccagtctgggcagctgaccctgagggcagagaaggactttgcttgctccaaccttcctgcaggaaaaccagctgctcaggacccagccctgggcagagggcacggtcggtgctcagacctttctcagcacgggtctcagacctg

SEQ ID NO: 416055 - DNA, 1942 bp, Homo sapiens
cacttgattgcagagaaggtctacagagcagtggttagaacttggccctgaggacagagcttttgctccgtatgaggctggcaggtaacgatcttctcagttttctccccaggaatctggaacgatgaaggtgatgattgtgcctgtggccaagaccgggagaaccctggatccctacaccttccccacccctggaatgtcactatacatatctgacttcttctgatgttgcctttgaccctaaagtcaatatgataaagtaacaagaagctgggacagaggaacaaacacagcccactcaagcagtggtggcaacattctgttagaaaggaggggagtcaaagaaaaaaacacccctccgcccatctccttatcacctccctaaagacagaggagaacatggacaccctccatcctgatagacatgccatgtggtcagtttgtgcggtaaacaggaaaaaaaaaaacctaaagatattgtagacctttattttctttaaatctcctaataaaaacattaaactttcaagaagattccaaactgacattgcatagaccaactcctttccaaaaatatctctgatatactctccaactctctcaatatatagaatttgaagtccaggagctgtgggcacctggtgggaattcactgagctcaaggggacaagagggctgaggacagggctcccacatggggacaaggccaggctttctggcctctggttccagccagcatcaatttggttgtggccaaattctcagtccaatcaccctggcccagggcctggcgtgggaggatgtggcaggctctgtctccttctggggttcctggtctggaggagtctccccaacagcgccaaagctggctgttttccgcccaaagccccagaactttgaatgagaggcaaatctaccctgaatgcacctccctcctaggctgggtgaggtcacgcagacacagaagggcaggacagaactccccatcttctgggggccaattcgtctggacactgtgcggtcagcttcctttttaaagtgccagtatcggtggggcaggaagggactctcagggctgagcagagccttctccagcgcgagcaaacactctgtcccgcctcggcaggcaccttctaacattcattttctaagggttaggtgagtaaaacaacaacaacaaatgctggaaatgctctgttcccaatgccagggagttccaagaccaagaagcccaactctcaccagcgggggcagatggggagctagggaaggaaccctcccagcctggggagggcacctgcacccctcccagagagagaagcccccatcccggccccccagctgggccccagcgctgctggaaccagccggcaggtggggcagaaaagcagcacctcccctcaccagggcgaggaggcaatattgaaccgtgaactcaagaagaaagacggaaagaaaaaatgaaaaaagctacagggctaagtaaacaccagcctgctgggtttatacaaaatgagtgaaatttaaaaggggcaggagagtttgtccagggactggctggcagccagaacccaccttcaagcaagttacaaggacttgggggaaagtgctgagagcagaggctttagtagggggcagggccagactgctccccactgggaaagcacaccccttaaaggagcccttcccccttgcccagaacgggggatgcttccagaggaaggctgaggcttttctggtaaggaagccagctccggaccagtccagccacagcccacctgcctctctggcatccgccccagtctgggcagctgaccctgagggcagagaaggactttgcttgctccaaccttcctgcaggaaaaccagctgctcaggacccagccctgggcagagggcacggtcggtgctcagacctttctcagcacgggtctcagacctg

SEQ ID NO: 416056 - DNA, 1830 bp, Homo sapiens
gtgcgggatcggaagttccatttttcagatgggaaaagtgaggctcagagaaaggaatctggaacgatgaaggtgatgattgtgcctgtggccaagaccgggagaaccctggatccctacaccttccccacccctggaatgtcactatacatatctgacttcttctgatgttgcctttgaccctaaagtcaatatgataaagtaacaagaagctgggacagaggaacaaacacagcccactcaagcagtggtggcaacattctgttagaaaggaggggagtcaaagaaaaaaacacccctccgcccatctccttatcacctccctaaagacagaggagaacatggacaccctccatcctgatagacatgccatgtggtcagtttgtgcggtaaacaggaaaaaaaaaaacctaaagatattgtagacctttattttctttaaatctcctaataaaaacattaaactttcaagaagattccaaactgacattgcatagaccaactcctttccaggagctgtgggcacctggtgggaattcactgagctcaaggggacaagagggctgaggacagggctcccacatggggacaaggccaggctttctggcctctggttccagccagcatcaatttggttgtggccaaattctcagtccaatcaccctggcccagggcctggcgtgggaggatgtggcaggctctgtctccttctggggttcctggtctggaggagtctccccaacagcgccaaagctggctgttttccgcccaaagccccagaactttgaatgagaggcaaatctaccctgaatgcacctccctcctaggctgggtgaggtcacgcagacacagaagggcaggacagaactccccatcttctgggggccaattcgtctggacactgtgcggtcagcttcctttttaaagtgccagtatcggtggggcaggaagggactctcagggctgagcagagccttctccagcgcgagcaaacactctgtcccgcctcggcaggcaccttctaacattcattttctaagggttaggtgagtaaaacaacaacaacaaatgctggaaatgctctgttcccaatgccagggagttccaagaccaagaagcccaactctcaccagcgggggcagatggggagctagggaaggaaccctcccagcctggggagggcacctgcacccctcccagagagagaagcccccatcccggccccccagctgggccccagcgctgctggaaccagccggcaggtggggcagaaaagcagcacctcccctcaccagggcgaggaggcaatattgaaccgtgaactcaagaagaaagacggaaagaaaaaatgaaaaaagctacagggctaagtaaacaccagcctgctgggtttatacaaaatgagtgaaatttaaaaggggcaggagagtttgtccagggactggctggcagccagaacccaccttcaagcaagttacaaggacttgggggaaagtgctgagagcagaggctttagtagggggcagggccagactgctccccactgggaaagcacaccccttaaaggagcccttcccccttgcccagaacgggggatgcttccagaggaaggctgaggcttttctggtaaggaagccagctccggaccagtccagccacagcccacctgcctctctggcatccgccccagtctgggcagctgaccctgagggcagagaaggactttgcttgctccaaccttcctgcaggaaaaccagctgctcaggacccagccctgggcagagggcacggtcggtgctcagacctttctcagcacgggtctcagacctg

SEQ ID NO: 416057 - DNA, 528 bp, Homo sapiens
gaatctggaacgatgaaggtgatgattgtgcctgtggccaagaccgggagaaccctggatccctacaccttccccacccctggaatgtcactatacatatctgacttcttctgatgttgcctttgaccctaaagtcaatatgataaagtaacaaggtaaaaacaaaacagcaaaagaaacaaaaaccgaaacatttaattttttctccccaaaccaagacgctgacactagcctgagttcccctaacaatgttattttctacaacagaagctgggacagaggaacaaacacagcccactcaagcagtggtggcaacattctgttagaaaggaggggagtcaaagaaaaaaacacccctccgcccatctccttatcacctccctaaagacagaggagaacatggacaccctccatcctgatagacatgccatgtggtcagtttgtgcggtaaacaggaaaaaaaaaaacctaaagatattgtagacctttattttctttaaatctcctaataaaaacattaaactttca

SEQ ID NO: 416058 - DNA, 3994 bp, Homo sapiens
tgggtttttaccagcaacaaaaaatttattgaatgagaagaaccatggtgtcctccacacatctgtagtcctcctcacagaaatgtgtgagcgaagcccagacatgcttgcgcatttcagagagaatgaaaagcttgtgccccaattagttcgtattttaaagaacctcatcatgtccggatattcaccaggacatgatgtttctggtatcagtgacccctttttgcaggtacgaattttgcggttattaagaattttaggacgaaatgatgatgattcaagtgaagctatgaatgatatattagcacaggttgccactaatactgagactagtaaaaatgtaggaaatgctattctttatgaaacggttttgactatcatggatattaagtcagagagtggattgcgagtcctagccataaatatcctgggtcgtttcttattgaacaatgacaagaatattaggtatgtggctctgacatctttgttgaagactgtacagacagatcataatgcagtacagaggcacagaagcacaattgtggactgtcttaaagatttggatgtctcaataaaacggcgtgcaatggaattgagttttgccctggtaaatgggaataatatccgaggcatgatgaaagaattactttattttctggattcgtgtgagccagaatttaaagcagactgtgcatctggaatctttcttgctgcagaaaagtatgcaccttccaaacgatggcatatagacacaattatgcgtgttttgacaacggcaggaagttatgttcgtgatgatgcagtccccaatttaatccagttaataactaatagtgtggagatgcatgcctatactgtccagcgcctgtacaaagcaattcttggtgattattctcaacaacctttggtacaagtggctgcatggtgtataggtgaatatggtgatcttcttgtatctggccagtgtgaagaggaagagcctattcaggtaacagaggatgaagtgttggatattttagaaagtgtcctaatctctaatatgtccacctctgtgacacgaggttatgccctcactgccattatgaagctttccactcgattcacttgtactgtaaaccgaattaagaaagtggtttccatctacggaagcagcattgatgtggaactccagcggagggcagtagaatataatgcacttttcaagaaatatgaccacatgaggtctgccctacttgagagaatgcctgtcatggaaaaagtgaccacaaatggccctactgagattgtgcagacaaatggagagacagaaccagctccactagagaccaaaccgccaccctctgggccacagcccaccagccaggccaatgatttattggatttgttgggaggaaatgacataacacctgttattccaactgcgcctacaagcaaaccatcttctgctggtggagaacttcttgatttgctgggagacatcaaccttacagggtctcactctgtcagccaggctggagtgcagtgggattatctcggctcacttcaacctctgcctcctgcgttcaggtgagcctcctgcctcggcctcctgagtagctgggattataggcgaatgccaccatgcccggctaattttttgtatttttagtagagacggggttttgctgtcttctttaaggggataatgaagagttaaagcacacatgaccttgagtaaaaaatagacataggataacaagttggatggttagctaagctcattcccacaggctgattttttttttcctaatacagtggagtcacagagtataggatttatgtctgtgtcttaacaaaatttcaaaatgttacttgtcatgtacttatgaatcatttacaaatggtcaatttcaaatcctcaaatgtcaaagctgtactggataaccggcaaagaaaaaacaaccccacagttaaaccatagcatatacttcacctaatatgttagtatttccatgttaatatatatagccttcataattataattttaggtgactaatactttatcaacaaatttgctctgtttactcagttcgttagtattgggtagtttggcttttttttttggtttttttgaaacggaatcttgctttgttgcccgggctggagtgcaacagcacgatcgcggctcactgcaacctctgcctcccgggttcaagtgattctcctgcctcagcctcccgagtagctgggatttataggcacgtgccaccatgcccagctaatttttgtatttttttatttgagatggggtttcaccatgttggccaggctggtcttgaactcctgacctcggatgatcctcccgccttggcctcccaaagtgctgggattacaggcatgagtcaccgcacccagccagtatggggtattttgtttctagatttttctacctagcggccccaacaaatattacatcaatttgttcttattttagattaatttgttagactaagtgacttagtctttctgaatctggttaaaattaggatgattaatacttactccataagatatttgtgaggcccattgacctattcagtgcatgatacatagtaggcacttggtaaatattatttaccttttcctcaatttatatgtttaaccgcacagtcataagcattgtatattatcattttaaaaagccctattgggtgaaaatttggtcctattatattttatttttattattatttttttaaattttgtagccctctgccaggcttggtcagcagagagaggccctattattttttgatcacagagcgagactccatctcaaaaaaaaaaaaaaaaaaaattattctgtaccatcacaacttttcacaacgatggcaagccttatgtcttgggagcctgttttgctaggcaaagttacaagtgacctaatgggagctcaaatgtgtgtgtgtctctctgtgtgtttgtgtgtgtgtgtgcactcaagacctctaacagcctcgaagcctggggtggcatcccggccttgccattagcatgcctcatgcatcatcagatgacaaggacaaccctcatgacgaagcaacatgaattagggggcctcttggccttggtccaaaattgtcaatcagaaatgaacataaaggactccagagcagtgggactgtctgtcaaaagactctgtatatcttttgtggatgagttttgtgagagaacagagagaccattgtacctggcacaagggctgttcatgaaaagggagacttactgggaggtgcaagacagtggcatttctcctctcctcttgctgctcagcacagccctggattgcagccccgaggctgagaccagacaaagcccgggaggcagaaagatgctccaagaaccaacactatcaatgtctttgcaaatcctcacaggattcctgtgggtccagctttggaactgggaaacctttcttcggatccgcactcattccactgatgccagctgcccctgaaggatgccagtactgtggtgtgtgagtctcagcagccgcccacacgctcctaactctgctgcatggcagatgcctaggtggaaatagcaaaaacaaggcccaggctggggccagggccagaggggaaggccctggattctcactcatgtgagatcttgaatctctttctttgttctgtttgtttagttagtatcatctggtaaaatagttaaaaaacaacaaaaaactctgtatctgtttctagcatgtgctgcattgactctattaatcacatttcaaattcaccctacattcctctcctcttcactagcctctctgaaggtgtcctggccagccctggagaagcactggtgtctgcagcacccctcagttcctgtgcctcagcccacaggccactgtgataatggtctgtttagcacttctgtatttattgtaagaatgattataatgaagatacacactgtaactacaagaaattataaatgtttttcacatca

SEQ ID NO: 416059 - DNA, 6155 bp, Homo sapiens
tgggtttttaccagcaacaaaaaatttattgaatgagaagaaccatggtgtcctccacacatctgtagtcctcctcacagaaatgtgtgagcgaagcccagacatgcttgcgcatttcagagagaatgaaaagcttgtgccccaattagttcgtattttaaagaacctcatcatgtccggatattcaccaggacatgatgtttctggtatcagtgacccctttttgcaggtacgaattttgcggttattaagaattttaggacgaaatgatgatgattcaagtgaagctatgaatgatatattagcacaggttgccactaatactgagactagtaaaaatgtaggaaatgctattctttatgaaacggttttgactatcatggatattaagtcagagagtggattgcgagtcctagccataaatatcctgggtcgtttcttattgaacaatgacaagaatattaggtatgtggctctgacatctttgttgaagactgtacagacagatcataatgcagtacagaggcacagaagcacaattgtggactgtcttaaagatttggatgtctcaataaaacggcgtgcaatggaattgagttttgccctggtaaatgggaataatatccgaggcatgatgaaagaattactttattttctggattcgtgtgagccagaatttaaagcagactgtgcatctggaatctttcttgctgcagaaaagtatgcaccttccaaacgatggcatatagacacaattatgcgtgttttgacaacggcaggaagttatgttcgtgatgatgcagtccccaatttaatccagttaataactaatagtgtggagatgcatgcctatactgtccagcgcctgtacaaagcaattcttggtgattattctcaacaacctttggtacaagtggctgcatggtgtataggtgaatatggtgatcttcttgtatctggccagtgtgaagaggaagagcctattcaggtaacagaggatgaagtgttggatattttagaaagtgtcctaatctctaatatgtccacctctgtgacacgaggttatgccctcactgccattatgaagctttccactcgattcacttgtactgtaaaccgaattaagaaagtggtttccatctacggaagcagcattgatgtggaactccagcggagggcagtagaatataatgcacttttcaagaaatatgaccacatgaggtctgccctacttgagagaatgcctgtcatggaaaaagtgaccacaaatggccctactgagattgtgcagacaaatggagagacagaaccagctccactagagaccaaaccgccaccctctgggccacagcccaccagccaggccaatgatttattggatttgttgggaggaaatgacataacacctgttattccaactgcgcctacaagcaaaccatcttctgctggtggagaacttcttgatttgctgggagacatcaaccttacagggtctcactctgtcagccaggctggagtgcagtgggattatctcggctcacttcaacctctgcctcctgcgttcaggtgagcctcctgcctcggcctcctgagtagctgggattataggcgaatgccaccatgcccggctaattttttgtatttttagtagagacggggttttgctgtcttctttaaggggataatgaagagttaaagcacacatgaccttgagtaaaaaatagacataggataacaagttggatggttagctaagctcattcccacaggctgattttttttttcctaatacagtggagtcacagagtataggatttatgtctgtgtcttaacaaaatttcaaaatgttacttgtcatgtacttatgaatcatttacaaatggtcaatttcaaatcctcaaatgtcaaagctgtactggataaccggcaaagaaaaaacaaccccacagttaaaccatagcatatacttcacctaatatgttagtatttccatgttaatatatatagccttcataattataattttaggtgactaatactttatcaacaaatttgctctgtttactcagttcgttagtattgggtagtttggcttttttttttggtttttttgaaacggaatcttgctttgttgcccgggctggagtgcaacagcacgatcgcggctcactgcaacctctgcctcccgggttcaagtgattctcctgcctcagcctcccgagtagctgggatttataggcacgtgccaccatgcccagctaatttttgtatttttttatttgagatggggtttcaccatgttggccaggctggtcttgaactcctgacctcggatgatcctcccgccttggcctcccaaagtgctgggattacaggcatgagtcaccgcacccagccagtatggggtattttgtttctagatttttctacctagcggccccaacaaatattacatcaatttgttcttattttagattaatttgttagactaagtgacttagtctttctgaatctggttaaaattaggatgattaatacttactccataagatatttgtgaggcccattgacctattcagtgcatgatacatagtaggcacttggtaaatattatttaccttttcctcaatttatatgtttaaccgcacagtcataagcattgtatattatcattttaaaaagccctattgggtgaaaatttggtcctattatattttatttttattattatttttttaaattttgtagccctctgccaggcttggtcagcagagagaggccctattattttttgatcacagagcgagactccatctcaaaaaaaaaaaaaaaaaaaattattctgtaccatcacaacttttcacaacgatggcaagccttatgtcttgggagcctgttttgctaggcaaagttacaagtgacctaatgggagctcaaatgtgtgtgtgtctctctgtgtgtttgtgtgtgtgtgtgcactcaagacctctaacagcctcgaagcctggggtggcatcccggccttgccattagcatgcctcatgcatcatcagatgacaaggacaaccctcatgacgaagcaacatgaattagggggcctcttggccttggtccaaaattgtcaatcagaaatgaacataaaggactccagagcagtgggactgtctgtcaaaagactctgtatatcttttgtggatgagttttgtgagagaacagagagaccattgtacctggcacaagggctgttcatgaaaagggagacttactgggaggtgcaagacagtggcatttctcctctcctcttgctgctcagcacagccctggattgcagccccgaggctgagaccagacaaagcccgggaggcagaaagatgctccaagaaccaacactatcaatgtctttgcaaatcctcacaggattcctgtgggtccagctttggaactgggaaacctttcttcggatccgcactcattccactgatgccagctgcccctgaaggatgccagtactgtggtgtgtgagtctcagcagccgcccacacgctcctaactctgctgcatggcagatgcctaggtggaaatagcaaaaacaaggcccaggctggggccagggccagaggggaaggccctggattctcactcatgtgagatcttgaatctctttctttgttctgtttgtttagttagtatcatctggtaaaatagttaaaaaacaacaaaaaactctgtatctgtttctagcatgtgctgcattgactctattaatcacatttcaaattcaccctacattcctctcctcttcactagcctctctgaaggtgtcctggccagccctggagaagcactggtgtctgcagcacccctcagttcctgtgcctcagcccacaggccactgtgataatggtctgtttagcacttctgtatttattgtaagaatgattataatgaagatacacactgtaactacaagaaattataaatgtttttcacatcaggctgttctttttttttttttggaggcgaggttaaagcattactatttgcaaagcactctgtagctccctgttatggggataggtaactaatcagaataataatgtcactcgcatccacttcttagaacctggctccaaaggaaaataagctgatagactcaatcactttcctgaggatggaggcctatggcatgtgtggctgcaggtcgcgaagctgcttaatggtgctgggaagcctagaggaattaaataaagaccctggaggaggtgggatcggagctgcaccttgaacaaatagctcagatttgaacagatggatggaaaagagggaggtgttcccaaccaaggggacatgatacagggaacaggtcctatgtctctttactcctgagagtattaaacctagtaggtgggcagcccctcttggttgcctgttaccttattttgaattctttttgcaaaacatactatcacccgtccaaataatcttttgtctaaatccagacttcacattctgactggggcaaaaagaggcagtccagtaaaggttataaaataggtaccatcattgtttgccttatttagaaaagcttccaattttcactataatcaccctaagcctgagagaggtgaactgttcaagggtactttggctccagtgggtgacagtacctggcccagctttggaattgaaacatttctgatggtctgtactctgctagaacacaggatgcttctgctctccctgctctggcatcctgccaggtgtcatggccacgcacaggcatgaagacagccgggaagccagagttcccacgaagcactcactccttggacttgctcccaccccactggggagagcactcctggagcaggaaatgagcatctctcatctccctgaattccacatccactggctgaatgatcagggaggcatagcagtgagagccataggtcggcagagggaactcaggccctcctttaggatggccatcacctcatctcaatccagccaaatcaaccatctagagcacacaggccgagagaaatgtaataaaatataacatgagacacgtatgaaatttaaactttccggtagccacactagaaaaaggtaaaaaaaaaaaaaccagtgacattaatttaaatttaattttagataatccaacagatctaaaatactatcatttccacatgtaaccagtattttcatgtgtttttttctgcagtaaatctttgaaatctggtgtgtgttttacactgacagcacactcgattcagatgctagattttccttgtagatatttggtcgttatttagatttcataaaatttacagtttaaaagattccaatatccgagttgctccaaacacacttagaagttgttttccaaataatggaatcaatgatcggcttttagatgtaaacttattaaaataaagtagcgtttctcagttaagtcacattccaagcgctcagatccatgccctgcgcagacccggacgacgaacccgactttcagagactgagggttctgcctagagagctcccacagaaatcagcccgagaagaaagccttgtgggtgaagccagggagggagacaggagggcaggaggaaaatcaagcctaaatgagcacatcgtggacgccgctcttcctctccccacatctcctcgcctcgccgcagtgggcccggctgtgccccaggtccccgcggtcgggagtgaatggcgctcgggtggcaggcacgtgggcacctggtgaactgcaggaccctggcaccgccaccccctcgcccctacacacacaggagtgcccctcccgttgtcacgtggccttcctgctgggtatctggagcagttgcagcctcgcttccggaaggaaacggggcctctggggcacagggaccacctgccagtgcgttccagccgggctgccatccacactggagaccgccccgcacgtggtcctcgggctcggattcagctgtcgcaggatgtgaggggaaaggtatgtggcccgacaatgccaccgagggtgtccccgggctccaccccgtgcctcttcattatagaatgactgggcagagataagggccagattactttgctgtattgaataattcaccataaaaatgattgcaaccaggaaaaaaaat

SEQ ID NO: 416060 - DNA, 4666 bp, Homo sapiens
  misc_feature (4646)..(4646): n is a, c, g, or t
tgggtttttaccagcaacaaaaaatttattgaatgagaagaaccatggtgtcctccacacatctgtagtcctcctcacagaaatgtgtgagcgaagcccagacatgcttgcgcatttcagagagaatgaaaagcttgtgccccaattagttcgtattttaaagaacctcatcatgtccggatattcaccaggacatgatgtttctggtatcagtgacccctttttgcaggtacgaattttgcggttattaagaattttaggacgaaatgatgatgattcaagtgaagctatgaatgatatattagcacaggttgccactaatactgagactagtaaaaatgtaggaaatgctattctttatgaaacggttttgactatcatggatattaagtcagagagtggattgcgagtcctagccataaatatcctgggtcgtttcttattgaacaatgacaagaatattaggtatgtggctctgacatctttgttgaagactgtacagacagatcataatgcagtacagaggcacagaagcacaattgtggactgtcttaaagatttggatgtctcaataaaacggcgtgcaatggaattgagttttgccctggtaaatgggaataatatccgaggcatgatgaaagaattactttattttctggattcgtgtgagccagaatttaaagcagactgtgcatctggaatctttcttgctgcagaaaagtatgcaccttccaaacgatggcatatagacacaattatgcgtgttttgacaacggcaggaagttatgttcgtgatgatgcagtccccaatttaatccagttaataactaatagtgtggagatgcatgcctatactgtccagcgcctgtacaaagcaattcttggtgattattctcaacaacctttggtacaagtggctgcatggtgtataggtgaatatggtgatcttcttgtatctggccagtgtgaagaggaagagcctattcaggtaacagaggatgaagtgttggatattttagaaagtgtcctaatctctaatatgtccacctctgtgacacgaggttatgccctcactgccattatgaagctttccactcgattcacttgtactgtaaaccgaattaagaaagtggtttccatctacggaagcagcattgatgtggaactccagcggagggcagtagaatataatgcacttttcaagaaatatgaccacatgaggtctgccctacttgagagaatgcctgtcatggaaaaagtgaccacaaatggccctactgagattgtgcagacaaatggagagacagaaccagctccactagagaccaaaccgccaccctctgggccacagcccaccagccaggccaatgatttattggatttgttgggaggaaatgacataacacctgttattccaactgcgcctacaagcaaaccatcttctgctggtggagaacttcttgatttgctgggagacatcaaccttacagggtctcactctgtcagccaggctggagtgcagtgggattatctcggctcacttcaacctctgcctcctgcgttcaggtgagcctcctgcctcggcctcctgagtagctgggattataggcgaatgccaccatgcccggctaattttttgtatttttagtagagacggggttttgctgtcttctttaaggggataatgaagagttaaagcacacatgaccttgagtaaaaaatagacataggataacaagttggatggttagctaagctcattcccacaggctgattttttttttcctaatacagtggagtcacagagtataggatttatgtctgtgtcttaacaaaatttcaaaatgttacttgtcatgtacttatgaatcatttacaaatggtcaatttcaaatcctcaaatgtcaaagctgtactggataaccggcaaagaaaaaacaaccccacagttaaaccatagcatatacttcacctaatatgttagtatttccatgttaatatatatagccttcataattataattttaggtgactaatactttatcaacaaatttgctctgtttactcagttcgttagtattgggtagtttggcttttttttttggtttttttgaaacggaatcttgctttgttgcccgggctggagtgcaacagcacgatcgcggctcactgcaacctctgcctcccgggttcaagtgattctcctgcctcagcctcccgagtagctgggatttataggcacgtgccaccatgcccagctaatttttgtatttttttatttgagatggggtttcaccatgttggccaggctggtcttgaactcctgacctcggatgatcctcccgccttggcctcccaaagtgctgggattacaggcatgagtcaccgcacccagccagtatggggtattttgtttctagatttttctacctagcggccccaacaaatattacatcaatttgttcttattttagattaatttgttagactaagtgacttagtctttctgaatctggttaaaattaggatgattaatacttactccataagatatttgtgaggcccattgacctattcagtgcatgatacatagtaggcacttggtaaatattatttaccttttcctcaatttatatgtttaaccgcacagtcataagcattgtatattatcattttaaaaagccctattgggtgaaaatttggtcctattatattttatttttattattatttttttaaattttgtagccctctgccaggcttggtcagcagagagaggccctattattttttgatcacagagcgagactccatctcaaaaaaaaaaaaaaaaaaaattattctgtaccatcacaacttttcacaacgatggcaagccttatgtcttgggagcctgttttgctaggcaaagttacaagtgacctaatgggagctcaaatgtgtgtgtgtctctctgtgtgtttgtgtgtgtgtgtgcactcaagacctctaacagcctcgaagcctggggtggcatcccggccttgccattagcatgcctcatgcatcatcagatgacaaggacaaccctcatgacgaagcaacatgaattagggggcctcttggccttggtccaaaattgtcaatcagaaatgaacataaaggactccagagcagtgggactgtctgtcaaaagactctgtatatcttttgtggatgagttttgtgagagaacagagagaccattgtacctggcacaagggctgttcatgaaaagggagacttactgggaggtgcaagacagtggcatttctcctctcctcttgctgctcagcacagccctggattgcagccccgaggctgagaccagacaaagcccgggaggcagaaagatgctccaagaaccaacactatcaatgtctttgcaaatcctcacaggattcctgtgggtccagctttggaactgggaaacctttcttcggatccgcactcattccactgatgccagctgcccctgaaggatgccagtactgtggtgtgtgagtctcagcagccgcccacacgctcctaactctgctgcatggcagatgcctaggtggaaatagcaaaaacaaggcccaggctggggccagggccagaggggaaggccctggattctcactcatgtgagatcttgaatctctttctttgttctgtttgtttagttagtatcatctggtaaaatagttaaaaaacaacaaaaaactctgtatctgtttctagcatgtgctgcattgactctattaatcacatttcaaattcaccctacattcctctcctcttcactagcctctctgaaggtgtcctggccagccctggagaagcactggtgtctgcagcacccctcagttcctgtgcctcagcccacaggccactgtgataatggtctgtttagcacttctgtatttattgtaagaatgattataatgaagatacacactgtaactacaagaaattataaatgtttttcacatcaaaaaaaaaaaaaaaaaaaaaaaaaaaaaaaaaaaaaagagggggggcgcgcgcccaaaaattccccccgggggggccccagtttgccgcctcccccggtttttggtgtcaaccaggggggccccctaaggagcgagccgtattataataagccgctaagggacctcggcgcccgcgctggtttcaaccacaccgttcgcggttcgacctgggagacaacaactgtcgcaaacggtcggggagcaacctccttggggaagagaccgagccccctttacacctctcgggcgggggggcgcacaatcctttgcgggaccgaacctcttcccctttaacaggagttttataaagccgctcctgagggggcacaaatctacaaccttcttcacacgcctgtgtatgcacggcggtgtctaaacacccacccagcgaccacatattatcgcctgggccggccttgaaaaaaagttttgcgggctgccccgcagggttacctgtatctgtgcggacacattttttttcttcccgggcactgtgtgctccaataaaaacgggcgcgacgctgacagagaagcggccgctagcaagcgccgtcacacagtacacgcgggccgactcgtgacacgacgacctcgcacagcgcacactaccanccatgacacacacatcgctg

SEQ ID NO: 416061 - DNA, 796 bp, Homo sapiens
tttctcctctcctcttgctgctcagcacagcccagtaagtctccctgttcatgaaaagggagacttactgggaggtgcaagacagtggcatttctcctctcctcttgctgctcagcacagccctggattgcagccccgaggctgagaccagacaaagcccgggaggcagaaagatgctccaagaaccaacactatcaatgtctttgcaaatcctcacaggattcctgtgggtccagctttggaactgggaaacctttcttcggatccgcactcattccactgatgccagctgcccctgaaggatgccagtactgtggtgtgtgagtctcagcagccgcccacacgctcctaactctgctgcatggcagatgcctaggtggaaatagcaaaaacaaggcccaggctggggccagggccagaggggaaggccctggattctcactcatgtgagatcttgaatctctttctttgttctgtttgtttagttagtatcatctggtaaaatagttaaaaaacaacaaaaaactctgtatctgtttctagcatgtgctgcattgactctattaatcacatttcaaattcaccctacattcctctcctcttcactagcctctctgaaggtgtcctggccagccctggagaagcactggtgtctgcagcacccctcagttcctgtgcctcagcccacaggccactgtgataatggtctgtttagcacttctgtatttattgtaagaatgattataatgaagatacacactgtaactacaagaaattataaatgtttttcacatca

SEQ ID NO: 416062 - DNA, 505 bp, Homo sapiens
gctttttaaatatctttttccttctactcctccctctgactctaagaattctctcttctggaatcgcttgaacccaggaggcggaggttgcagtaagccaaggtcatgccactgcactctagcctgggtgacagagcgagactccatctcaaaaaaaaaaaaaaaaaaaattattctgtaccatcacaacttttcacaacgatggcaagccttatgtcttgggagcctgttttgctaggcaaagttacaagtgacctaatgggagctcaaatgtgtgtgtgtctctctgtgtgtttgtgtgtgtgtgtgcactcaagacctctaacagcctcgaagcctggggtggcatcccggccttgccattagcatgcctcatgcatcatcagatgacaaggacaaccctcatgacgaagcaacatgaattagggggcctcttggccttggtccaaaattgtcaatcagaaatgaacataaaggactccagagcagtgggactgtctgtcaa

SEQ ID NO: 416063 - DNA, 1375 bp, Homo sapiens
aagatacctgaggaagatctctttattccttccccttcccactccccatcaaccaggtccccctgcagcacccttccttgtgaaatcacagctgctatgacagtgaccagctccaaaccaccctgtgtcactgaaccttgggtgctgggtgacacatgggcaggaaaggcaggaagagcagggatctgagggcctgggggctgggcaagcctcaggggtggggtgggtgctgatcaatgccaggtgatcaatgccaggtgattggacccactgagtaccaggacaaacctggagtcacgcaactggcctacatcagttgccttggcaacacactgcccttgaccctacccggaaaagatttatttcagccggtagccctggtaacttgagtggctccccagggacaggaagtggcagaacctcaactctgcctctcctgacctgaggggttcacttttcatccctgtcagggacggggcactgcgttctcagcccctatggaagaatgttatgggtttgggggaatccacggggaggagactaggctgttccagcgtgcccctccttcctcagcctgaggccttgctcctctgtggaaggcaacacagggacagagccacacattcagcccctaccctcagccctgctcccatcccctggcccacaggtctgacccgcaagctccgatgtggagacacttggtggctgactcctgcttcctcacacatggggatggcccacaggtgaccgactggctgaatgctggggccatgctagaggactgctgtctgcagagcatggtccctgcattggccagaagttggtgtgagcccaggtgagtcactctagccccgtggtgtgtgtggtgggtttgaatctgcagctaccaggcaatgttttctccatttcctctcaagccaggcctttctccattctttgctactctccaggagaggcggctcactggagggctggagcctgagctgctggagctgtccccggccaaggagagcagctcctagtgtcagcctgtgcccagggaaccctggggcccgaggctgacctggcgttaacttcttactgcttcatccagctctcaccagccagcaggctggagtccttgtgggctggaggggagggagtctgcagggaggacccgggcctggacccagatagtgaggagatgccgggagacagcacagggtgacagaagcaggagaaaggccttcggtttagcctcagttccaaacctcggcgctcctggcattaagggaagggtgatggaagctggggggaaataacagaaaggctcctccccctaatacaccataacagattccagcttcccttcctccggctctaagcagaaaggaaa

SEQ ID NO: 416064 - DNA, 393 bp, Homo sapiens
aagatacctgaggaagatctctttattccttccccttcccactccccatcaaccagggtggcgaagaggggagaaagagaagagatggaacatgcaaaggccaggagcgaagcgggagaccacccaggagacagaaggagggcagaggctgggagaagaacaggaacagacaggatggggtcctgattgttggaaaagacagggaggccaatcccagccttgcaaatagcagcagctagaggttatttccagaaaaatctgcaaagtaaatacactgatcacccaactcccatatctctttgctgctctctgtggaagactcagacaaaccccaagaatgaatggccacagggccagggcaatggtggaaagggaggggcctcacctggcctt

SEQ ID NO: 416065 - DNA, 2202 bp, Homo sapiens
gtgaccggagcgagaaaccccgcctcggcaccctgacgcagcgcaggacccaccccgtgcgtgacgccagcgtcaggccagccccggcatgctctgcggccgcccgcggtccagctccgacaacaggaattttctccgagagcgggccgggctcagttcagctgctgtccagacccggatcggcaacagtgccgcctccagacgttctcctgccgctcgcccgcccgtcccagcgcccccagccctcccgcgagggcgccccgggacggaaggatccaccagtctgtcggcgcccgccgttctcgtggtcgccgtcgccgtcgtcgtggtggtagtctccgccgtcgcctgggccatggccaattacatccacgtccctcccggctccccggaggtgcccaagctgaacgtcaccgttcaggatcaggaggagcatcgctgccgggagggggccctgagcctcctgcaacacctgcggcctcactgggacccccaggaggtgaccctgcagctcttcacagatggaatcacaaataaacttattggctgttacgtgggaaacaccatggaggatgtagtcctggtgagaatttatggcaataagactgagttattagtcgatcgagatgaggaagtaaagagttttcgagtgttgcaggctcatgggtgtgcaccacaactctactgtaccttcaataatggactatgctatgaatttatacaaggagaagcactggatccaaagcatgtctgcaacccagccattttcaggctaatagctcgtcagcttgctaaaatccatgctattcatgcacacaatggctggatccccaaatctaatctttggctaaagatgggaaagtatttctctctcattcccacaggatttgcagatgaagacattaataaaaggttcctaagtgatatcccaagctctcagattctccaggaagagatgacttggatgaaggagattctttccaacctgggctcacctgttgtgctttgccataatgacctattgtgtaagaatataatctacaatgagaaacaaggtgatgtacagttcattgattatgaatattctggatacaactacctggcatatgatattggaaatcatttcaatgaatttgcaggtgtgagtgatgtagactatagtctgtatccagatagagaactacagagtcagtggctgcgtgcttaccttgaagcctacaaagaatttaagggctttgggactgaagttactgaaaaggaggtagaaatactcttcattcaagtcaatcagtttgcattggcttctcatttcttttggggattgtgggctttgattcaagccaaatactccactattgagtttgatttccttgggtatgcaattgttcgttttaaccagtactttaaaatgaagcctgaggttactgcattaaaagtgcctgagtaaagaagagatttaattattctccagtagctgagcaatgcttgtgaatcttttcttaagaaatcccaaaaagccaatattagttaaaattctgttgtttaatttggttatcttgctttataaattatgcctctaaacaatcaaatctatttttgaaatagactgaatgatgtcaagaaatatacctactgctatccgtatgtggtggattagaaatgtgttaaatctgcaaaaggtataaagatgtcagtttaatttctttgataatttaacctatgttgtatgtgaattatttattataaacttagcacgattctgtgactgtttttctctgtttcacgttcgttgagtgtaagcaatgaaaatgtcccaaataagttttttaagttttactttaataagattaatttcagtaaacattctagttgttcagtgtaacctttttatcttgatgcattgtaagtaaaatgaatcatttactcttgaaatgccagtcattgactgatgtagataatttaggattttcatataaaaatagctgtttaggaaggtgaaatacattcactgtctctgttggtggtacatcttgttgaattcaatattagaaagtatttctttttggggtaatataacttagaattaaatccctgtttctctatgtagtctggcagtataaatataaatatttaccatataatcttggaataagtattagttaatgttaccaaaatctgtattaaataatgttttcaaatgct

SEQ ID NO: 416066 - DNA, 1773 bp, Homo sapiens
gtgaccggagcgagaaaccccgcctcggcaccctgacgcagcgcaggacccaccccgtgcgtgacgccagcgtcaggccagccccggcatgctctgcggccgcccgcggtccagctccgacaacaggaattttctccgagagcgggccgggctcagttcagctgctgtccagacccggatcggcaacagtgccgcctccagacgttctcctgccgctcgcccgcccgtcccagcgcccccagccctcccgcgagggcgccccgggacggaaggatccaccagtctgtcggcgcccgccgttctcgtggtcgccgtcgccgtcgtcgtggtggtagtctccgccgtcgcctgggccatggccaattacatccacgtccctcccggctccccggaggtgcccaagctgaacgtcaccgttcaggatcaggaggagcatcgctgccgggagggggccctgagcctcctgcaacacctgcggcctcactgggacccccaggaggtgaccctgcagctcttcacagatggaatcacaaataaacttattggctgttacgtgggaaacaccatggaggatgtagtcctggtgagaatttatggcaataagactgagttattagtcgatcgagatgaggaagtaaagagttttcgagtgttgcaggctcatgggtgtgcaccacaactctactgtaccttcaataatggactatgctatgaatttatacaaggagaagcactggatccaaagcatgtctgcaacccagccattttcaggctaatagctcgtcagcttgctaaaatccatgctattcatgcacacaatggctggatccccaaatctaatctttggctaaagatgggaaagtatttctctctcattcccacaggatttgcagatgaagacattaataaaaggttcctaagtgatatcccaagctctcagattctccaggaagagatgacttggatgaaggagattctttccaacctgggctcacctgttgtgctttgccataatgacctattgtgtaagaatataatctacaatgagaaacaaggtgatgtacagttcattgattatgaatattctggatacaactacctggcatatgatattggaaatcatttcaatgaatttgcaggtgtgagtgatgtagactatagtctgtatccagatagagaactacagagtcagtggctgcgtgcttaccttgaagcctacaaagaatttaagggctttgggactgaagttactgaaaaggaggtagaaatactcttcattcaagtcaatcagtttgcattgggtgaaaacttgaattttatcattggcaacaaatattgtcagttattttcactgaaatggcttctcatttcttttggggattgtgggctttgattcaagccaaatactccactattgagtttgatttccttgggtatgcaattgttcgttttaaccagtactttaaaatgaagcctgaggttactgcattaaaagtgcctgagtaaagaagagatttaattattctccagtagctgagcaatgcttgtgaatcttttcttaagaaatcccaaaaagccaatattagttaaaattctgttgtttaatttggttatcttgctttataaattatgcctctaaacaatcaaatctatttttgaaatagactgaatgatgtcaagaaatatacctactgctatccgtatgtggtggattagaaatgtgttaaatctgcaaaaggtataaagatgtcagtttaatttctttgataattt

SEQ ID NO: 416067 - DNA, 974 bp, Homo sapiens
gtgaccggagcgagaaaccccgcctcggcaccctgacgcagcgcaggacccaccccgtgcgtgacgccagcgtcaggccagccccggcatgctctgcggccgcccgcggtccagctccgacaacaggaattttctccgagagcgggccgggctcagttcagctgctgtccagacccggatcggcaacagtgccgcctccagacgttctcctgccgctcgcccgcccgtcccagcgcccccagccctcccgcgagggcgccccgggacggaaggatccaccagtctgtcggcgcccgccgttctcgtggtcgccgtcgccgtcgtcgtggtggtagtctccgccgtcgcctgggccatggccaattacatccacgtccctcccggctccccggaggtgcccaagctgaacgtcaccgttcaggatcaggaggagcatcgctgccgggagggggccctgagcctcctgcaacacctgcggcctcactgggacccccaggaggtgaccctgcagctcttcacagatggaatcacaaataaacttattggctgttacgtgggaaacaccatggaggatgtagtcctggtgagaatttatggcaataagactgagttattagtcgatcgagatgaggaagtaaagagttttcgagtgttgcaggctcatgggtgtgcaccacaactctactgtaccttcaataatggactatgctatgaatttatacaaggagaagcactggatccaaagcatgtctgcaacccagccattttcagtttatcatcgttgactctttgcaaaggaaaaactacaagatgttttggattaaccggctgcagagggtcaaggcttctgcttagttttttctagttagtgtttgagttgaagtgttatacatttcttactgccgattgcttattacttaattgttcatgttttcagagttcttgcctattaaaattttattaatttggttaac

SEQ ID NO: 416068 - DNA, 854 bp, Homo sapiens
gtgaccggagcgagaaaccccgcctcggcaccctgacgcagcgcaggacccaccccgtgcgtgacgccagcgtcaggccagccccggcatgctctgcggccgcccgcggtccagctccgacaacaggaattttctccgagagcgggccgggctcagttcagctgctgtccagacccggatcggcaacagtgccgcctccagacgttctcctgccgctcgcccgcccgtcccagcgcccccagccctcccgcgagggcgccccgggacggaaggatccaccagtctgtcggcgcccgccgttctcgtggtcgccgtcgccgtcgtcgtggtggtagtctccgccgtcgcctgggccatggccaattacatccacgtccctcccggctccccggaggtgcccaagctgaacgtcaccgttcaggatcaggaggagcatcgctgccgggagggggccctgagcctcctgcaacacctgcggcctcactgggacccccaggaggtgaccctgcaggaatttccattttttaccttgacggcatttcctcctggattccttgtacacgtgggggtgtagttagtgcacgttctgtgaagcttttggatcgtatccacaatcctgtgaagaggtctgcattttatctgcatctggcacagcggctgtactgaatcctagatttctgcaggatggcaccgtggaaggctgtttggcacagaggcttgaagaaaatttgctacacgtgtggattgtcatataccatatgatgaactgaatatgccatttccagctcatctcacatatgctataactgcaggaaacaaaagtcctgatgtctgtttacaactatagactccag

SEQ ID NO: 416069 - DNA, 2381 bp, Homo sapiens
gtgaccggagcgagaaaccccgcctcggcaccctgacgcagcgcaggacccaccccgtgcgtgacgccagcgtcaggccagccccggcatgctctgcggccgcccgcggtccagctccgacaacaggaattttctccgagagcgggccgggctcagttcagctgctgtccagacccggatcggcaacagtgccgcctccagacgttctcctgccgctcgcccgcccgtcccagcgcccccagccctcccgcgagggcgccccgggacggaaggatccaccagtctgtcggcgcccgccgttctcgtggtcgccgtcgccgtcgtcgtggtggtagtctccgccgtcgcctgggccatggccaattacatccacgtccctcccggctccccggaggtgcccaagctgaacgtcaccgttcaggatcaggaggagcatcgctgccgggagggggccctgagcctcctgcaacacctgcggcctcactgggacccccaggaggtgaccctgcagctcttcacagatggaatcacaaataaacttattggctgttacgtgggaaacaccatggaggatgtagtcctggtgagaatttatggcaataagactgagttattagtcgatcgagatgaggaagtaaagagttttcgagtgttgcaggctcatgggtgtgcaccacaactctactgtaccttcaataatggactatgctatgaatttatacaaggagaagcactggatccaaagcatgtctgcaacccagccattttcaggctaatagctcgtcagcttgctaaaatccatgctattcatgcacacaatggctggatccccaaatctaatctttggctaaagatgggaaagtatttctctctcattcccacaggatttgcagatgaagacattaataaaaggttcctaagtgatatcccaagctctcagattctccaggaagagatgacttggatgaaggagattctttccaacctgggctcacctgttgtgctttgccataatgacctattgtgtaagaatataatctacaatgagaaacaaggtgatgtacagttcattgattatgaatattctggatacaactacctggcatatgatattggaaatcatttcaatgaatttgcaggtgtgagtgatgtagactatagtctgtatccagatagagaactacagagtcagtggctgcgtgcttaccttgaagcctacaaagaatttaagggctttgggactgaagttactgaaaaggaggtagaaatactcttcattcaagtcaatcagtttgcattggcttctcatttcttttggggattgtgggctttgattcaagccaaatactccactattgagtttgatttccttgggtatgcaattgttcgttttaaccagtactttaaaatgaagcctgaggttactgcattaaaagtgcctgagtaaagaagagatttaattattctccagtagctgagcaatgcttgtgaatcttttcttaagaaatcccaaaaagccaatattagttaaaattctgttgtttaatttggttatcttgctttataaattatgcctctaaacaatcaaatctatttttgaaatagactgaatgatgtcaagaaatatacctactgctatccgtatgtggtggattagaaatgtgttaaatctgcaaaaggtataaagatgtcagtttaatttctttgataatttaacctatgttgtatgtgaattatttattataaacttagcacgattctgtgactgtttttctctgtttcacgttcgttgagtgtaagcaatgaaaatgtcccaaataagttttttaagttttactttaataagattaatttcagtaaacattctagttgttcagtgtaacctttttatcttgatgcattgtaagtaaaatgaatcatttactcttgaaatgccagtcattgactgatgtagataatttaggattttcatataaaaatagctgtttaggaaggtgaaatacattcactgtctctgttggtggtacatcttgttgaattcaatattagaaagtatttctttttggggtaatataacttagaattaaatccctgtttctctatgtagtctggcagtataaatataaatatttaccatataatcttggaataagtattagttaatgttaccaaaatctgtattaaataatgttttcaaatgctaaatatggtcgttactattttcagttttaaaaattttatagtatcaaattgtttctaaccaaaaatttccttttacttctagagatgctttatgtttttgattattaaatagtcactagtattgctaatttttgaaacaaatacacaaaatttatcatatgtagaaataagaaaatatt

SEQ ID NO: 416070 - DNA, 2093 bp, Homo sapiens
gtgaccggagcgagaaaccccgcctcggcaccctgacgcagcgcaggacccaccccgtgcgtgacgccagcgtcaggccagccccggcatgctctgcggccgcccgcggtccagctccgacaacaggaattttctccgagagcgggccgggctcagttcagctgctgtccagacccggatcggcaacagtgccgcctccagacgttctcctgccgctcgcccgcccgtcccagcgcccccagccctcccgcgagggcgccccgggacggaaggatccaccagtctgtcggcgcccgccgttctcgtggtcgccgtcgccgtcgtcgtggtggtagtctccgccgtcgcctgggccatggccaattacatccacgtccctcccggctccccggaggtgcccaagctgaacgtcaccgttcaggatcaggaggagcatcgctgccgggagggggccctgagcctcctgcaacacctgcggcctcactgggacccccaggaggtgaccctgcagctcttcacagatggaatcacaaataaacttattggctgttacgtgggaaacaccatggaggatgtagtcctggtgagaatttatggcaataagactgagttattagtcgatcgagatgaggaagtaaagagttttcgagtgttgcaggctcatgggtgtgcaccacaactctactgtaccttcaataatggactatgctatgaatttatacaaggagaagcactggatccaaagcatgtctgcaacccagccattttcaggctaatagctcgtcagcttgctaaaatccatgctattcatgcacacaatggctggatccccaaatctaatctttggctaaagatgggaaagtatttctctctcattcccacaggatttgcagatgaagacattaataaaaggttcctaagtgatatcccaagctctcagattctccaggaagagatgacttggatgaaggagattctttccaacctgggctcacctgttgtgctttgccataatgacctattgtgtaagaatataatctacaatgagaaacaaggtgatgtacagttcattgattatgaatattctggatacaactacctggcatatgatattggaaatcatttcaatgaatttgcaggtgtgagtgatgtagactatagtctgtatccagatagagaactacagagtcagtggctgcgtgcttaccttgaagcctacaaagaatttaagggctttgggactgaagttactgaaaaggaggtagaaatactcttcattcaagtcaatcagtttgcattggcttctcatttcttttggggattgtgggctttgattcaagccaaatactccactattgagtttgatttccttgggtatgcaattgttcgttttaaccagtactttaaaatgaagcctgaggttactgcattaaaagtgcctgagtaaagaagagatttaattattctccagtagctgagcaatgcttgtgaatcttttcttaagaaatcccaaaaagccaatattagttaaaattctgttgtttaatttggttatcttgctttataaattatgcctctaaacaatcaaatctatttttgaaatagactgaatgatgtcaagaaatatacctactgctatccgtatgtggtggattagaaatgtgttaaatctgcaaaaggtataaagatgtcagtttaatttctttgataatttaacctatgttgtatgtgaattatttattataaacttagcacgattctgtgactgtttttctctgtttcacgttcgttgagtgtaagcaatgaaaatgtcccaaataagttttttaagttttactttaataagattattcgtaacatctagtgtcgtgtactttatctgaggctgtagtaagatcttactctgaagcgcatgcggtgatcatgggttcctaacaacggttgggggaacttccgcggggcctcgggatcactaaagatctctgggaaaaaaaacgttctgggggaaaatcaatcggagattgggccgtttgttaaaaaaggcgcttattggtgttttttgtttattacatctcacactctggaaagagaag

SEQ ID NO: 416071 - DNA, 2056 bp, Homo sapiens
aagcttgcggccgccgaggagggcctgcgcgagctgcagcgcagccggcggctctgccacgaggacgtggaggcgctggccgccatctacgaggagaaggaggcctggtaccgcgaggagagcgacagcctgagcctcctgcaacacctgcggcctcactgggacccccaggaggtgaccctgcagctcttcacagatggaatcacaaataaacttattggctgttacgtgggaaacaccatggaggatgtagtcctggtgagaatttatggcaataagactgagttattagtcgatcgagatgaggaagtaaagagttttcgagtgttgcaggctcatgggtgtgcaccacaactctactgtaccttcaataatggactatgctatgaatttatacaaggagaagcactggatccaaagcatgtctgcaacccagccattttcaggctaatagctcgtcagcttgctaaaatccatgctattcatgcacacaatggctggatccccaaatctaatctttggctaaagatgggaaagtatttctctctcattcccacaggatttgcagatgaagacattaataaaaggttcctaagtgatatcccaagctctcagattctccaggaagagatgacttggatgaaggagattctttccaacctgggctcacctgttgtgctttgccataatgacctattgtgtaagaatataatctacaatgagaaacaaggtgatgtacagttcattgattatgaatattctggatacaactacctggcatatgatattggaaatcatttcaatgaatttgcaggtgtgagtgatgtagactatagtctgtatccagatagagaactacagagtcagtggctgcgtgcttaccttgaagcctacaaagaatttaagggctttgggactgaagttactgaaaaggaggtagaaatactcttcattcaagtcaatcagtttgcattggcttctcatttcttttggggattgtgggctttgattcaagccaaatactccactattgagtttgatttccttgggtatgcaattgttcgttttaaccagtactttaaaatgaagcctgaggttactgcattaaaagtgcctgagtaaagaagagatttaattattctccagtagctgagcaatgcttgtgaatcttttcttaagaaatcccaaaaagccaatattagttaaaattctgttgtttaatttggttatcttgctttataaattatgcctctaaacaatcaaatctatttttgaaatagactgaatgatgtcaagaaatatacctactgctatccgtatgtggtggattagaaatgtgttaaatctgcaaaaggtataaagatgtcagtttaatttctttgataatttaacctatgttgtatgtgaattatttattataaacttagcacgattctgtgactgtttttctctgtttcacgttcgttgagtgtaagcaatgaaaatgtcccaaataagttttttaagttttactttaataagattaatttcagtaaacattctagttgttcagtgtaacctttttatcttgatgcattgtaagtaaaatgaatcatttactcttgaaatgccagtcattgactgatgtagataatttaggattttcatataaaaatagctgtttaggaaggtgaaatacattcactgtctctgttggtggtacatcttgttgaattcaatattagaaagtatttctttttggggtaatataacttagaattaaatccctgtttctctatgtagtctggcagtataaatataaatatttaccatataatcttggaataagtattagttaatgttaccaaaatctgtattaaataatgttttcaaatgctaaatatggtcgttactattttcagttttaaaaattttatagtatcaaattgtttctaaccaaaaatttccttttacttctagagatgctttatgtttttgattattaaatagtcactagtattgctaatttttgaaacaaatacacaaaatttatcatatgtagaaataagaaaatatt

SEQ ID NO: 416072 - DNA, 1714 bp, Homo sapiens
gtgaccggagcgagaaaccccgcctcggcaccctgacgcagcgcaggacccaccccgtgcgtgacgccagcgtcaggccagccccggcatgctctgcggccgcccgcggtccagctccgacaacaggaattttctccgagagcgggccgggctcagttcagctgctgtccagacccggatcggcaacagtgccgcctccagacgttctcctgccgctcgcccgcccgtcccagcgcccccagccctcccgcgagggcgccccgggacggaaggatccaccagtctgtcggcgcccgccgttctcgtggtcgccgtcgccgtcgtcgtggtggtagtctccgccgtcgcctgggccatggccaattacatccacgtccctcccggctccccggaggtgcccaagctgaacgtcaccgttcaggatcaggaggagcatcgctgccgggagggggccctgagcctcctgcaacacctgcggcctcactgggacccccaggaggtgaccctgcagctcttcacagatggaatcacaaataaacttattggctgttacgtgggaaacaccatggaggatgtagtcctggtgagaatttatggcaataagactgagttattagtcgatcgagatgaggaagtaaagagttttcgagtgttgcaggctcatgggtgtgcaccacaactctactgtaccttcaataatggactatgctatgaatttatacaaggagaagcactggatccaaagcatgtctgcaacccagccattttcaggctaatagctcgtcagcttgctaaaatccatgctattcatgcacacaatggctggatccccaaatctaatctttggctaaagatgggaaagtatttctctctcattcccacaggatttgcagatgaagacattaataaaaggttcctaagtgatatcccaagctctcagattctccaggaagagatgacttggatgaaggagattctttccaacctgggctcacctgttgtgctttgccataatgacctattgtgtaagaatataatctacaatgagaaacaaggtgatgtacagttcattgattatgaatattctggatacaactacctggcatatgatattggaaatcatttcaatgaatttgcaggtgtgagtgatgtagactatagtctgtatccagatagagaactacagagtcagtggctgcgtgcttaccttgaagcctacaaagaatttaagggctttgggactgaagttactgaaaaggaggtagaaatactcttcattcaagtcaatcagtttgcattggcttctcatttcttttggggattgtgggctttgattcaagccaaatactccactattgagtttgatttccttgggtatgcaattgttcgttttaaccagtactttaaaatgaagcctgaggttactgcattaaaagtgcctgagtaaagaagagatttaattattctccagtagctgagcaatgcttgtgaatcttttcttaagaaatcccaaaaagccaatattagttaaaattctgttgtttaatttggttatcttgctttataaattatgcctctaaacaatcaaatctatttttgaaatagactgaatgatgtcaagaaatatacctactgctatccgtatgtggtggattagaaatgtgttaaatctgcaaaaggtataaagatgtcagtttaatttctttgataattt

SEQ ID NO: 416073 - DNA, 1038 bp, Homo sapiens
gtgaccggagcgagaaaccccgcctcggcaccctgacgcagcgcaggacccaccccgtgcgtgacgccagcgtcaggccagccccggcatgctctgcggccgcccgcggtccagctccgacaacaggaattttctccgagagcgggccgggctcagttcagctgctgtccagacccggatcggcaacagtgccgcctccagacgttctcctgccgctcgcccgcccgtcccagcgcccccagccctcccgcgagggcgccccgggacggaaggatccaccagtctgtcggcgcccgccgttctcgtggtcgccgtcgccgtcgtcgtggtggtagtctccgccgtcgcctgggccatggccaattacatccacgtccctcccggctccccggaggtgcccaagctgaacgtcaccgttcaggatcaggaggagcatcgctgccgggagggggccctgagcctcctgcaacacctgcggcctcactgggacccccaggaggtgaccctgcagctcttcacagatggaatcacaaataaacttattggctgttacgtgggaaacaccatggaggatgtagtcctggtgagaatttatggcaataagactgagttattagtcgatcgagatgaggaagtaaagagttttcgagtgttgcaggctcatgggtgtgcaccacaactctactgtaccttcaataatggactatgctatgaatttatacaaggagaagcactggatccaaagcatgtctgcaacccagccattttcaggctaatagctcgtcagcttgctaaaatccatgctattcatgcacacaatggctggatccccaaatctaatctttggctaaagatgggaaagtatttctctctcattcccacaggatttgcagatgaagacattaataaaaggtaaaattatttttacatttgaaattatgttttacattgctttgctctatgatagggtttcaaaggtaattgtaaagtttcattgtataaaatctggttttctttctttgcattgaagtaaagtaa

SEQ ID NO: 416074 - DNA, 1078 bp, Homo sapiens
gtgaccggagcgagaaaccccgcctcggcaccctgacgcagcgcaggacccaccccgtgcgtgacgccagcgtcaggccagccccggcatgctctgcggccgcccgcggtccagctccgacaacaggaattttctccgagagcgggccgggctcagttcagctgctgtccagacccggatcggcaacagtgccgcctccagacgttctcctgccgctcgcccgcccgtcccagcgcccccagccctcccgcgagggcgccccgggacggaaggatccaccagtctgtcggcgcccgccgttctcgtggtcgccgtcgccgtcgtcgtggtggtagtctccgccgtcgcctgggccatggccaattacatccacgtccctcccggctccccggaggtgcccaagctgaacgtcaccgttcaggatcaggaggagcatcgctgccgggagggggccctgagcctcctgcaacacctgcggcctcactgggacccccaggaggtgaccctgcagctcttcacagatggaatcacaaataaacttattggctgttacgtgggaaacaccatggaggatgtagtcctggtgagaatttatggcaataagactgagttattagtcgatcgagatgaggaagtaaagagttttcgagtgttgcaggctcatgggtgtgcaccacaactctactgtaccttcaataatggactatgctatgaatttatacaaggagaagcactggatccaaagcatgtctgcaacccagccattttcaggctaatagctcgtcagcttgctaaaatccatgctattcatgcacacaatggctggatccccaaatctaatctttggctaaagatgggaaagtatttctctctcattcccacaggatttgcagatgaagacattaataaaaggttcctaagtgatatcccaagctctcagattctccaggaagagatgacttggatgaaggagattctttccaacctgggctcacctgttgtgctttgccataatgacctattgtgtaagaatataatctacaatgagaaacaaggtaggtatttgaccttagcagta

SEQ ID NO: 416075 - DNA, 422 bp, Homo sapiens
gctcagttcagctgctgtccagacccggatcggcaacagtgccgcctccagacgttctcctgccgctcgcccgcccgtcccagcgcccccagccctcccgcgagggcgccccgggacggaaggatccaccagtctgtcggcgcccgccgttctcgtggtcgccgtcgccgtcgtcgtggtggtagtctccgccgtcgcctgggccatggccaattacatccacgtccctcccggctccccggaggtgcccaagctgaacgtcaccgttcaggatcaggaggagcatcgctgccgggagggggccctgagcctcctgcaacacctgcggcctcactgggacccccaggaggtgaccctgcaggtaacgcccacacctcagctctgggtctcttatgcccctcacgcggctctgggggtcctca

SEQ ID NO: 416076 - DNA, 621 bp, Homo sapiens
ttctaaaacgtttttaaaaatctttatttgaaaatttcatataggcattcaaagaacattggctcactgaataggagactttacatctctcatggctgggcagcagctgtgtctggcttccttacttcaagatctgccttgatcacagatcacttaacagtggttaagtttcttattttcaagttcagcaggtaaacctatctcatttttggaggcattttttaagtataaaaagtctgttatttaggaaggttgcacagttcagaggtgaacatttcaatgtatttaaactttcctaaaaatgtaaaaataacaatcaaataggagaggtagcaaatccacagaggtataaataaaacaagaatggaagaatgctgataactgttaaagctgagtgatggaagttcattatatagtctgtttactttgtatatactaaaacttttccagaattaagtctgctacatcaaacagggattttttcctattttaaaaattaaattttttaaattaaaaaattttttcttactaatccttaatttttacctattatttgtttactccaaatttatttttatccttcttaaacagaacatcccaaacctataaccttcaggtttc

SEQ ID NO: 416077 - DNA, 1630 bp, Homo sapiens
acagtaacaaagaattccagcagtgagctgtgagttctgtccttgctggctttcccaagtggaaggctaccctcatctttcactaatggcagactaggacaagcattacccaggcctgcaagcttgttaaggactaggaacccaagcaagaactcaccatgccaatcaaacctgttgggtggatatgtgggcaggtgttgaagaacttttctggaagaatcgaggggatccagaaagcaatcatggaccttgtagatgagtttaaagatgaatttcccaccatcctaagattatcacagtctaatcagaaaagagaacctgcgcagaaaacatccaaaatcaggatggctattgctttagctaagattaatcgagcaacattaattcgtggattaaacagcatatccagatcctccaaatcagtggccaaacttctgcatcctcagcttgcatgcagacttttagagctaagggacatatctggtcgtctgctgagggaagttaatgcgccgaggcaacccctatataacattcaggtcagaaagggttctttgtttgaaatcatctcctttccagcaaagactgctttaactagcataatatatgcttcatatgcagcactaatttatttggcagtctgtgttaatgctgtgctgaagaaggtaaagaacatcttccaggaagaagaatccataaggcaaaacagagaggagagtgaaaattgtagaaaagccttttctgagcctgtgctttcggagcctatgtttgctgaaggtgaaatcaaagcaaaaccttataggtcattgccggagaagccagacatttcagattaccccaagcttcttgctaataagcagagtaataacatccaagttttacattctgtgtttgaccaatcagctgaaatgaatgagcaaatctgaatacaggcattcaaagaacattggctcactgaataggagactttacatctctcatggctgggcagcagctgtgtctggcttccttacttcaagatctgccttgatcacagatcacttaacagtggttaagtttcttattttcaagttcagcaggggcaaactatacacggtcgtccatcaaaatcctggggaagagaataactcatttaatattctgacatgtcaaatgttcttgatagactctgaagagtctgctgcagaagaaccaggttaaaaaaacagtaggtctaaggggttggggtgacaagattctgcatgtctaagaagctcccatgtgacaccaaagttgctggtctatggacaacagtttgaggagcaaggtcttcaagctctcattatggactgaaactggagaaaattctatggaactattatcagctcacacatataaaaactggtcactgagatgacagctgagctgaaatgcccaaaatgcaaatgaactagacatgccaacagcttggggaagagaattccatactgaaagaagagcaaatacaaaagcctgaaggaaagaaaagtcttggtgaatgtgttccagaagactggaacataatatgcaagattggtaaacaggcaggagccaggttgtgcagtgctgtgtatggattttacttctaagagcaaaggaaagcccctgaagaagt

SEQ ID NO: 416078 - DNA, 595 bp, Homo sapiens
acagtaacaaagaattccagcagtgagctgtgagttctgtccttgctggctttcccaagtggaaggctaccctcatctttcactaatggcagactaggacaagcattacccaggcctgcaagcttgttaaggactaggaacccaagcaagaactcaccatgccaatcaaacctgttgggtggatatgtgggcaggtgttgaagaacttttctggaagaatcgaggggatccagaaagcaatcatggaccttgtagatgagtttaaagatgaatttcccaccatcctaagattatcacagtctaatcagaaaagagaacctgcgcagaaaacatccaaaatcaggatggctattgctttagctaagattaatcgagcaacattaattcgtggattaaacagcatatccagatcctccaaatcagtggccaaacttctgcatcctcagcttgcatgcagacttttagagctaagggacatatctggtcgtctgctgagggaagttaatgcgccgaggcaacccctatataacattcaggagaagaaaatggggctccaattgagttaaaccaaaaaagaagatgtattagctcccat

SEQ ID NO: 416079 - DNA, 1506 bp, Homo sapiens
acagtaacaaagaattccagcagtgagctgtgagttctgtccttgctggctttcccaagtggaaggctaccctcatctttcactaatggcagactaggacaagcattacccaggcctgcaagcttgttaaggactaggaacccaagcaagaactcaccatgccaatcaaacctgttgggtggatatgtgggcaggtgttgaagaacttttctggaagaatcgaggggatccagaaagcaatcatggaccttgtagatgagtttaaagatgaatttcccaccatcctaagattatcacagtctaatcagaaaagagaacctgcgcagaaaacatccaaaatcaggatggctattgctttagctaagattaatcgagcaacattaattcgtggattaaacagcatatccagatcctccaaatcagtggccaaacttctgcatcctcagcttgcatgcagacttttagagctaagggacatatctggtcgtctgctgagggaagttaatgcgccgaggcaacccctatataacattcaggtcagaaagggttctttgtttgaaatcatctcctttccagcaaagactgctttaactagcataatatatgcttcatatgcagcactaatttatttggcagtctgtgttaatgctgtgctgaagaaggtaaagaacatcttccaggaagaagaatccataaggcaaaacagagaggagagtgaaaattgtagaaaagccttttctgagcctgtgctttcggagcctatgtttgctgaaggtgaaatcaaagcaaaaccttataggtcattgccggagaagccagacatttcagattaccccaagcttcttgctaataagcagagtaataacatccaagttttacattctgtgtttgaccaatcagctgaaatgaatgagcaaatctgaatacaggcattcaaagaacattggctcactgaataggagactttacatctctcatggctgggcagcagctgtgtctggcttccttacttcaagatctgccttgatcacagatcacttaacagtggttaagtttcttattttcaagttcagcaggtaaacctatctcatttttggaggcattttttaagtataaaaagtctgttatttaggaaggttgcacagttcagaggtgaacatttcaatgtatttaaactttcctaaaaatgtaaaaataacaatcaaataggagaggtagcaaatccacagaggtataaataaaacaagaatggaagaatgctgataactgttaaagctgagtgatggaagttcattatatagtctgtttactttgtatatactaaaacttttccagaattaagtctgctacatcaaacagggattttttcctattttaaaaattaaattttttaaattaaaaaattttttcttactaatccttaatttttacctattatttgtttactccaaatttatttttatccttcttaaacagaacatcccaaacctataaccttcaggtttc

SEQ ID NO: 416080 - DNA, 798 bp, Homo sapiens
acagtaacaaagaattccagcagtgagctgtgagttctgtccttgctggctttcccaagtggaaggctaccctcatctttcactaatggcagactaggacaagcattacccaggcctgcaagcttgttaaggactaggaacccaagcaagaactcaccatgccaatcaaacctgttgggtggatatgtgggcaggtgttgaagaacttttctggaagaatcgaggggatccagaaagcaatcatggaccttgtagatgagtttaaagatgaatttcccaccatcctaagattatcacagtctaatcagaaaagagaacctgcgcagaaaacatccaaaatcaggatggctattgctttagctaagattaatcgagcaacattaattcgtggattaaacagcatatccagatcctccaaatcagtggccaaacttctgcatcctcagcttgcatgcagacttttagagctaagggacatatctggtcgtctgctgagggaagttaatgcgccgaggcaacccctatataacattcaggtcagaaagggttctttgtttgaaatcatctcctttccagcaaagactgctttaactagcataatatatgcttcatatgcagcactaatttatttggaagaaattcttagccaggcatggtggtgtgtgcctataatccctgctactcaggaggctgacgggggaggctgaagcaggaggataccttgagcccaggagtttgagaccagcttgggcaaaatagtgagatccagtcttaaaataaataaaagcatatcataaa

SEQ ID NO: 416081 - DNA, 1082 bp, Homo sapiens
catctcctgacctcaagtgattcacctgcttctgtctcccaaagtgctgggaatacaggcatgagccaccactcctggacaggccacagaaattttaaagaaaagaatcatgccaccacaagtaaacttcattttgtttatattatttaggacttcacatttgtcttccgaaaccatgaagtataattctgctaacagcaagtgttgtgaatgaggaattaggaattaggagaatggtagtacattgggaaaaacatattttagtaatttttatattttaaagataatcacagattttgctgtttgtgcatcaccaaaatcagtgagatctgccagctggtgggggtgtgcctatgagaatttttgattatgatcccctaggagggttatcaaaaaaggagatgggtgaaagatcaggagagtcgagaaattcattttttggacaacattgttttgaaggcactactggggctctgggatcaggcagccagattgaaacctggctcctccttttcctaagttatttaacctccctgtgcctcactttttgtcaaccagataagataagaaatgagagcaggtctgttacctcacaaggtggctgtgagtgttgaagacgtttgttgggggtttgggtgaagcatgcaaactctggttggtatgtggcagccactcagcctgtatttatgatgagggaggcattctaggcaccccttccaggatgttgggttgttggctgggttttactttaaaaagctcagggcctagaacattctagaatccaagtacttgctcacatatataattatttctttaggataatctttgatatagacttacgagtcaaagggtatgtaaaatgtcagcccttttacctgtattgccaaattgccttcaaaagtttctgctgttttgccctcctacccatagtgataaccttaaattggagtcaacacaaatttgagtgtgactgtgttagacagaagggatatattaacaggtaaaactggccatggcccctgcccttgtggagtatatgctctgttggttcatttcctctgcattctaattttctagacttg

SEQ ID NO: 416082 - DNA, 767 bp, Homo sapiens
gcattctgataatgtgtaggcaaagtttccacacttggtaaaagcatcttagtcatggttcaagacgagtgacaagttaccacctatttgcaattcaaggagaatataagacagagaagaaagctgtgaatgaatttcatttgattagcaatagattggacactctactgatcttgcctctctacaacctctcttccacctgacctctaaatgttgaagtgtttcaggaattgtcttagaccttcttccttatctacacttcctctccaagtgagtccatagaattctatgacctggaaactccccagtttttctctctagaaattctcgactttagtctcatatatctggttgttgacttgacatctctacttggatgtctctgagataccttaaactcaatatgtgtaaaatatatatagctcttgattttccattctgcaaaaataccattcatttcttggcctttctcctcacagtctttggcactacagttcacctagctgcacaaacctaaaacttgggagtcatctttatttatttttctgtagcatcttcattcaagttcatcaacccaacttctctgtactataaaattaaaataatacctttttagtaacatggaggattaaaggagttaataaataaatgtagcctttgaatagtgcctggcacatagttaacacaatataattgtagctactactgctactgttgttattactttttatcccctacagcatcaaccccctgcggcaagccaccac

SEQ ID NO: 416083 - DNA, 847 bp, Homo sapiens
gcattctgataatgtgtaggcaaagtttccacacttggtaaaagcatcttagtcatggttcaagacgagtgacaagttaccacctatttgcaattcaaggagaatataagacagagaagaaagctgtgaatgaatttcatttgattagcaatagattggacactctactgatcttgcctctctacaacctctcttccacctgacctctaaatgttgaagtgtttcaggaattgtcttagaccttcttccttatctacacttcctctccaacatgaatcttgatggctctgcacaagatcctgaaaagagggaatattcttctgtgtgtgtgggcagagaagatgacattaaaaaatctgaaagaatgacagctgttgtccatgatagagaagtggtcattttctaccacaagggagaatatcatgctatggatattcgctgttaccactcaggaggacctttacatttgggagatatagaggattttgatggacgaccgtgtatagtttgcccctggcataaatacaaaattactttggcaacaggagaaggtctgtaccagtctataaaccctaaagatccatcagcaaaacccaagtggtgctccaaaggaataaagcaaaggattcacacagtgacagtagacaacggaaatatttatgtgactctttctaatgaaccttttaagtgtgactctgatttttatgccactggagacttcaaagtaattaagagttcttcctgataaaaaatatatagaaatgaaaaatgttgtgtatgcttgaaaacatttttagaataactctgcttcagttttaaaggtgatgaaatttttcaacataggcac

SEQ ID NO: 416084 - DNA, 945 bp, Homo sapiens
gcattctgataatgtgtaggcaaagtttccacacttggtaaaagcatcttagtcatggttcaagacgagtgacaagttaccacctatttgcaattcaaggagaatataagacagagaagaaagctgtgaatgaatttcatttgattagcaatagattggacactctactgatcttgcctctctacaacctctcttccacctgacctctaaatgttgaagtgtttcaggaattgtcttagaccttcttccttatctacacttcctctccaatatggaattctcttccccaagctgttggcatgtctagttcatttgcattttgggcatttcagctcagctgtcatctcagtgaccagtttttatctgagcatgaatcttgatggctctgcacaagatcctgaaaagagggaatattcttctgtgtgtgtgggcagagaagatgacattaaaaaatctgaaagaatgacagctgttgtccatgatagagaagtggtcattttctaccacaagggagaatatcatgctatggatattcgctgttaccactcaggaggacctttacatttgggagatatagaggattttgatggacgaccgtgtatagtttgcccctggcataaatacaaaattactttggcaacaggagaaggtctgtaccagtctataaaccctaaagatccatcagcaaaacccaagtggtgctccaaaggaataaagcaaaggattcacacagtgacagtagacaacggaaatatttatgtgactctttctaatgaaccttttaagtgtgactctgatttttatgccactggagacttcaaagtaattaagagttcttcctgataaaaaatatatagaaatgaaaaatgttgtgtatgcttgaaaacatttttagaataactctgcttcagttttaaaggtgatgaaatttttcaacataggcac

SEQ ID NO: 416085 - DNA, 2763 bp, Homo sapiens
  misc_feature (398)..(398): n is a, c, g, or t
ggcggcgcggaggggcaggccagagggaagcgctttgttccgcgcgtggttcccgcgcctgggggtgcgcgggagaggcgcgaatccgagtgccgcgcgcggcccggggacttgcacgggcgtgcggggtggaaccgcaggaagcggagctctcgggttcccgccccgccccgccccgccggcggcggaggcagcgagcgcgagagcccagcggagtcgctgggagcctgaggcaccgagacacaaaggcaggcgggatgcgggagcaggcaaagggaaagcgaaagccgcgcgcccggccggtgactgggtgaaggcgccgcgcagctttcccgacgccggctgtacccggacctcctggtcgagcctggcgcgccgcagccatggccatcgctcanctggccacggagtacgtgttctcggatttcttgctgaaggagcccacggagcccaagttcaaggggctgcgactggagctggctgtggacaagatggtcacgtgcattgcggtggggctgcccctgctgctcatctcgctggccttcgcgcaggagatctcgattggtacacagataagctgtttctctccaagttctttctcctggcgtcaggctgcctttgtggattcatattgctgggcggctgttcagcagaagaactcactgcagagcgagtctggaaacctcccactgtggctgcataagtttttcccctacatcctgctgctctttgcgatcctcctgtacctgcccccgctgttctggcgtttcgcagctgctcctcatatttgctcagacttgaagtttatcatggaagaacttgacaaagtttacaaccgtgcaattaaggctgcaaagagtgcgcgtgaccttgacatgagagatggagcctgctcagttccaggtgttaccgagaacttagggcaaagtttgtgggaggtatctgaaagccacttcaagtacccaattgtggagcagtacttgaagacaaagaaaaattctaataatttaatcatcaagtacattagctgccgcctgctgacactcatcattatactgttagcgtgtatctacctgggctattacttcagcctctcctcactctcagacgagtttgtgtgcagcatcaaatcagggatcctgagaaacgacagcaccgtgcccgatcagtttcagtgcaaactcattgccgtgggcatcttccagttgctcagtgtcattaaccttgtggtttatgtcctgctggctcccgtggttgtctacacgctgtttgttccattccgacagaagacagatgttctcaaagtgtacgaaatcctccccacttttgatgttctgcatttcaaatctgaagggtacaacgatttgagcctctacaatctcttcttggaggaaaatataagtgaggtcaagtcatacaagtgtcttaaggtactggagaatattaagagcagtggtcaggggatcgacccaatgctactcctgacaaaccttggcatgatcaagatggatgttgttgatggcaaaactcccatgtctgcagagatgagagaggagcaggggaaccagacggcagagctccaaggtatgaacatagacagtgaaactaaagcaaataatggagagaagaatgcccgacagagacttctggattcttcttgctgatgatttttttccttgagctgtaaatctgtgacttctgcgacatgggatttaatttggctaaagcacccctgttggtttcacagctggtttgcaataaatggttcttggtggagatactgagcatgtcttattgagtccctaatggaaatggtgatcaacaaaaggttatggaagaatggtttatgaacttcccataggaagcacctgagagatagtaaactgcagcaagtaactatgtgtaagtcctcatcaaatgaaaagcagaaagacaagaacaattagtcaagagcagtagccctgtcagagcctcggagcaatacctttctgtacccgtggtgagacaagacccagagctactggaaaacaagcactttggaagatttgttttgttttcatggaataataatatgtcaggatataatttaacgtgagtttcttatgtgcccttaaagactgttagacaagaaaagcattcactggctaataatccataggtcgacctatgtcctaagttaggtgtaaggtccgatgccttggcccacactcgagctctctttacattgttagttgtcaaccttggctgatggaaatcccgtaaccactatttgttgcactgtgccttgaagggcagcaggcccaagtgctgctctgactgaaaactgagttaacaagacgaaatctaaaggatattcacagtgacttcaattcaggaagaatgcttccaaaagagcccagtggggaaatctgacatcacagaagacattaattcagtcactttcaaagagtttgtctacaggcggtttctctgttatcaaaggcatttgaaataggattttacttaaacaataatggaacacaggagtatttaaagtgaagaacactttgcctgaatgtgatcagggcacataagtgacattggcgtgcttcatatggcgtgcttggagccagaaaaacttagcggtttattttgtttatatttaagcacagctttaaaaaattcattatcgtttattcagtgtccgaattgaggccatttgggaagaaaattctagcactggtggagaattatagaataaagattataaatggttggataaga

SEQ ID NO: 416086 - DNA, 2706 bp, Homo sapiens
  misc_feature (398)..(398): n is a, c, g, or t
ggcggcgcggaggggcaggccagagggaagcgctttgttccgcgcgtggttcccgcgcctgggggtgcgcgggagaggcgcgaatccgagtgccgcgcgcggcccggggacttgcacgggcgtgcggggtggaaccgcaggaagcggagctctcgggttcccgccccgccccgccccgccggcggcggaggcagcgagcgcgagagcccagcggagtcgctgggagcctgaggcaccgagacacaaaggcaggcgggatgcgggagcaggcaaagggaaagcgaaagccgcgcgcccggccggtgactgggtgaaggcgccgcgcagctttcccgacgccggctgtacccggacctcctggtcgagcctggcgcgccgcagccatggccatcgctcanctggccacggagtacgtgttctcggatttcttgctgaaggagcccacggagcccaagttcaaggggctgcgactggagctggctgtggacaagatggtcacgtgcattgcggtggggctgcccctgctgctcatctcgctggccttcgcgcaggagatctcgattggtacacagataagctgtttctctccaagttctttctcctggcgtcaggctgcctttgtggattcatattgctgggcggctgttcagcagaagaactcactgcagagcgagtctggaaacctcccactgtggctgcataagtttttcccctacatcctgctgctctttgcgatcctcctgtacctgcccccgctgttctggcgtttcgcagctgctcctcatatttgctcagacttgaagtttatcatggaagaacttgacaaagtttacaaccgtgcaattaaggctgcaaagagtgcgcgtgaccttgacatgagagatggagcctgctcagttccaggtgttaccgagaacttagggcaaagtttgtgggaggtatctgaaagccacttcaagtacccaattgtggagcagtacttgaagacaaagaaaaattctaataatttaatcatcaagtacattagctgccgcctgctgacactcatcattatactgttagcgtgtatctacctgggctattacttcagcctctcctcactctcagacgagtttgtgtgcagcatcaaatcagggatcctgagaaacgacagcaccgtgcccgatcagtttcagtgcaaactcattgccgtgggcatcttccagttgctcagtgtcattaaccttgtggtttatgtcctgctggctcccgtggttgtctacacgctgtttgttccattccgacagaagacagatgttctcaaagtgtacgaaatcctccccacttttgatgttctgcatttcaaatctgaagggtacaacgatttgagcctctacaatctcttcttggaggaaaatataagtgaggtcaagtcatacaagtgtcttaaggtactggagaatattaagagcagtggtcaggggatcgacccaatgctactcctgacaaaccttggcatgatcaagatggatgttgttgatggcaaaagtatgaacatagacagtgaaactaaagcaaataatggagagaagaatgcccgacagagacttctggattcttcttgctgatgatttttttccttgagctgtaaatctgtgacttctgcgacatgggatttaatttggctaaagcacccctgttggtttcacagctggtttgcaataaatggttcttggtggagatactgagcatgtcttattgagtccctaatggaaatggtgatcaacaaaaggttatggaagaatggtttatgaacttcccataggaagcacctgagagatagtaaactgcagcaagtaactatgtgtaagtcctcatcaaatgaaaagcagaaagacaagaacaattagtcaagagcagtagccctgtcagagcctcggagcaatacctttctgtacccgtggtgagacaagacccagagctactggaaaacaagcactttggaagatttgttttgttttcatggaataataatatgtcaggatataatttaacgtgagtttcttatgtgcccttaaagactgttagacaagaaaagcattcactggctaataatccataggtcgacctatgtcctaagttaggtgtaaggtccgatgccttggcccacactcgagctctctttacattgttagttgtcaaccttggctgatggaaatcccgtaaccactatttgttgcactgtgccttgaagggcagcaggcccaagtgctgctctgactgaaaactgagttaacaagacgaaatctaaaggatattcacagtgacttcaattcaggaagaatgcttccaaaagagcccagtggggaaatctgacatcacagaagacattaattcagtcactttcaaagagtttgtctacaggcggtttctctgttatcaaaggcatttgaaataggattttacttaaacaataatggaacacaggagtatttaaagtgaagaacactttgcctgaatgtgatcagggcacataagtgacattggcgtgcttcatatggcgtgcttggagccagaaaaacttagcggtttattttgtttatatttaagcacagctttaaaaaattcattatcgtttattcagtgtccgaattgaggccatttgggaagaaaattctagcactggtggagaattatagaataaagattataaatggttggataaga

SEQ ID NO: 416087 - DNA, 3497 bp, Homo sapiens
  misc_feature (398)..(398): n is a, c, g, or t
ggcggcgcggaggggcaggccagagggaagcgctttgttccgcgcgtggttcccgcgcctgggggtgcgcgggagaggcgcgaatccgagtgccgcgcgcggcccggggacttgcacgggcgtgcggggtggaaccgcaggaagcggagctctcgggttcccgccccgccccgccccgccggcggcggaggcagcgagcgcgagagcccagcggagtcgctgggagcctgaggcaccgagacacaaaggcaggcgggatgcgggagcaggcaaagggaaagcgaaagccgcgcgcccggccggtgactgggtgaaggcgccgcgcagctttcccgacgccggctgtacccggacctcctggtcgagcctggcgcgccgcagccatggccatcgctcanctggccacggagtacgtgttctcggatttcttgctgaaggagcccacggagcccaagttcaaggggctgcgactggagctggctgtggacaagatggtcacgtgcattgcggtggggctgcccctgctgctcatctcgctggccttcgcgcaggagatctcgattggtacacagataagctgtttctctccaagttctttctcctggcgtcaggctgcctttgtggattcatattgctgggcggctgttcagcagaagaactcactgcagagcgagtctggaaacctcccactgtggctgcataagtttttcccctacatcctgctgctctttgcgatcctcctgtacctgcccccgctgttctggcgtttcgcagctgctcctcatatttgctcagacttgaagtttatcatggaagaacttgacaaagtttacaaccgtgcaattaaggctgcaaagagtgcgcgtgaccttgacatgagagatggagcctgctcagttccaggtgttaccgagaacttagggcaaagtttgtgggaggtatctgaaagccacttcaagtacccaattgtggagcagtacttgaagacaaagaaaaattctaataatttaatcatcaagtacattagctgccgcctgctgacactcatcattatactgttagcgtgtatctacctgggctattacttcagcctctcctcactctcagacgagtttgtgtgcagcatcaaatcagggatcctgagaaacgacagcaccgtgcccgatcagtttcagtgcaaactcattgccgtgggcatcttccagttgctcagtgtcattaaccttgtggtttatgtcctgctggctcccgtggttgtctacacgctgtttgttccattccgacagaagacagatgttctcaaagtgtacgaaatcctccccacttttgatgttctgcatttcaaatctgaagggtacaacgatttgagcctctacaatctcttcttggaggaaaatataagtgaggtcaagtcatacaagtgtcttaaggtactggagaatattaagagcagtggtcaggggatcgacccaatgctactcctgacaaaccttggcatgatcaagatggatgttgttgatggcaaaactcccatgtctgcagagatgagagaggagcaggggaaccagacggcagagctccaaggtatgaacatagacagtgaaactaaagcaaataatggagagaagaatgcccgacagagacttctggattcttcttgctgatgatttttttccttgagctgtaaatctgtgacttctgcgacatgggatttaatttggctaaagcacccctgttggtttcacagctggtttgcaataaatggttcttggtggagatactgagcatgtcttattgagtccctaatggaaatggtgatcaacaaaaggttatggaagaatggtttatgaacttcccataggaagcacctgagagatagtaaactgcagcaagtaactatgtgtaagtcctcatcaaatgaaaagcagaaagacaagaacaattagtcaagagcagtagccctgtcagagcctcggagcaatacctttctgtacccgtggtgagacaagacccagagctactggaaaacaagcactttggaagatttgttttgttttcatggaataataatatgtcaggatataatttaacgtgagtttcttatgtgcccttaaagactgttagacaagaaaagcattcactggctaataatccataggtcgacctatgtcctaagttaggtgtaaggtccgatgccttggcccacactcgagctctctttacattgttagttgtcaaccttggctgatggaaatcccgtaaccactatttgttgcactgtgccttgaagggcagcaggcccaagtgctgctctgactgaaaactgagttaacaagacgaaatctaaaggatattcacagtgacttcaattcaggaagaatgcttccaaaagagcccagtggggaaatctgacatcacagaagacattaattcagtcactttcaaagagtttgtctacaggcggtttctctgttatcaaaggcatttgaaataggattttacttaaacaataatggaacacaggagtatttaaagtgaagaacactttgcctgaatgtgatcagggcacataagtgacattggcgtgcttcatatggcgtgcttggagccagaaaaacttagcggtttattttgtttatatttaagcacagctttaaaaaattcattatcgtttattcagtgtccgaattgaggccatttgggaagaaaattctagcactggtggagaattatagaataaagattataaatggttggataagaaaaatgtaagcttatttcataaacatttaaagctgattcagaacatgttaaaaactgttcccaattccaactatgtaaatagatcctatgttcacattttacacacacacacaaaaatctttaacatctgtggaacttcccagttttagtcttagaaagttagcatgttgcataagttcagtaatcctcaggaacctccaagtttacttttagctcttacggacagttgtttacataatctaattactgttttctgaagaacggaaattatataagctgctgtctgccttttggaatattcagaaaagcagattttatttgtacttctgtgatgttttctgaaatggaaagctgatgataaatatcaaagtagcaatcagtgcgttaaattattctgttacatgatatttattactgttgaattattctgtgacttagaaatggcagtaacctaaataatggaatttgcaaaattattatattgccgtatctgagatgttccatcacaagtttctacactggtttcttttgaaaatttaaaaagatttacgagatacattttctaggatatgattttttttttacaaaaagcttcatcttctgtagactatccttaatttctattttgaaacggtaaaaattgatattttaggacaccaggaagtctccaagccattcccactctctgaactccagtagggtctgtgatgtcccaggcaccagtaccaagttgg

SEQ ID NO: 416088 - DNA, 3443 bp, Homo sapiens
  misc_feature (398)..(398): n is a, c, g, or t
ggcggcgcggaggggcaggccagagggaagcgctttgttccgcgcgtggttcccgcgcctgggggtgcgcgggagaggcgcgaatccgagtgccgcgcgcggcccggggacttgcacgggcgtgcggggtggaaccgcaggaagcggagctctcgggttcccgccccgccccgccccgccggcggcggaggcagcgagcgcgagagcccagcggagtcgctgggagcctgaggcaccgagacacaaaggcaggcgggatgcgggagcaggcaaagggaaagcgaaagccgcgcgcccggccggtgactgggtgaaggcgccgcgcagctttcccgacgccggctgtacccggacctcctggtcgagcctggcgcgccgcagccatggccatcgctcanctggccacggagtacgtgttctcggatttcttgctgaaggagcccacggagcccaagttcaaggggctgcgactggagctggctgtggacaagatggtcacgtgcattgcggtggggctgcccctgctgctcatctcgctggccttcgcgcaggagatctcgattggtacacagataagctgtttctctccaagttctttctcctggcgtcaggctgcctttgtggattcatattgctgggcggctgttcagcagaagaactcactgcagagcgagtctggaaacctcccactgtggctgcataagtttttcccctacatcctgctgctctttgcgatcctcctgtacctgcccccgctgttctggcgtttcgcagctgctcctcatatttgctcagacttgaagtttatcatggaagaacttgacaaagtttacaaccgtgcaattaaggctgcaaagagtgcgcgtgaccttgacatgagagatggagcctgctcagttccaggtgttaccgagaacttagggcaaagtttgtgggaggtatctgaaagccacttcaagtacccaattgtggagcagtacttgaagacaaagaaaaattctaataatttaatcatcaagtacattagctgccgcctgctgacactcatcattatactgttagcgtgtatctacctgggctattacttcagcctctcctcactctcagacgagtttgtgtgcagcatcaaatcagggatcctgagaaacgacagcaccgtgcccgatcagtttcagtgcaaactcattgccgtgggcatcttccagttgctcagtgtcattaaccttgtggtttatgtcctgctggctcccgtggttgtctacacgctgtttgttccattccgacagaagacagatgttctcaaagtgtacgaaatcctccccacttttgatgttctgcatttcaaatctgaagggtacaacgatttgagcctctacaatctcttcttggaggaaaatataagtgaggtcaagtcatacaagtgtcttaaggtactggagaatattaagagcagtggtcaggggatcgacccaatgctactcctgacaaaccttggcatgatcaagatggatgttgttgatggcaaaactcccatgtctgcagagatgagagaggagcaggggaaccagacggcagagctccaaggtatgaacatagacagtgaaactaaagcaaataatggagagaagaatgcccgacagagacttctggattcttcttgctgatgatttttttccttgagctgtaaatctgtgacttctgcgacatgggatttaatttggctaaagcacccctgttggtttcacagctggtttgcaataaatggttcttggtggagatactgagcatgtcttattgagtccctaatggaaatggtgatcaacaaaaggttatggaagaatggtttatgaacttcccataggaagcacctgagagatagtaaactgcagcaagtaactatgtgtaagtcctcatcaaatgaaaagcagaaagacaagaacaattagtcaagagcagtagccctgtcagagcctcggagcaatacctttctgtacccgtggtgagacaagacccagagctactggaaaacaagcactttggaagatttgttttgttttcatggaataataatatgtcaggatataatttaacgtgagtttcttatgtgcccttaaagactgttagacaagaaaagcattcactggctaataatccataggtcgacctatgtcctaagttaggtgtaaggtccgatgccttggcccacactcgagctctctttacattgttagttgtcaaccttggctgatggaaatcccgtaaccactatttgttgcactgtgccttgaagggcagcaggcccaagtgctgctctgactgaaaactgagttaacaagacgaaatctaaaggatattcacagtgacttcaattcaggaagaatgcttcctcaaagagtttgtctacaggcggtttctctgttatcaaaggcatttgaaataggattttacttaaacaataatggaacacaggagtatttaaagtgaagaacactttgcctgaatgtgatcagggcacataagtgacattggcgtgcttcatatggcgtgcttggagccagaaaaacttagcggtttattttgtttatatttaagcacagctttaaaaaattcattatcgtttattcagtgtccgaattgaggccatttgggaagaaaattctagcactggtggagaattatagaataaagattataaatggttggataagaaaaatgtaagcttatttcataaacatttaaagctgattcagaacatgttaaaaactgttcccaattccaactatgtaaatagatcctatgttcacattttacacacacacacaaaaatctttaacatctgtggaacttcccagttttagtcttagaaagttagcatgttgcataagttcagtaatcctcaggaacctccaagtttacttttagctcttacggacagttgtttacataatctaattactgttttctgaagaacggaaattatataagctgctgtctgccttttggaatattcagaaaagcagattttatttgtacttctgtgatgttttctgaaatggaaagctgatgataaatatcaaagtagcaatcagtgcgttaaattattctgttacatgatatttattactgttgaattattctgtgacttagaaatggcagtaacctaaataatggaatttgcaaaattattatattgccgtatctgagatgttccatcacaagtttctacactggtttcttttgaaaatttaaaaagatttacgagatacattttctaggatatgattttttttttacaaaaagcttcatcttctgtagactatccttaatttctattttgaaacggtaaaaattgatattttaggacaccaggaagtctccaagccattcccactctctgaactccagtagggtctgtgatgtcccaggcaccagtaccaagttgg

SEQ ID NO: 416089 - DNA, 416 bp, Homo sapiens
ggggcacacagtttatgtagatgtaaatgtggattttgttttaaaacacagaataccttccaccataaaactgacttcgggagagacatatcattctcaaattataggtgaatttaaagattttacttactacttttcctgacagaacatagatattaaaaataagcaagttttagtggataaaatcaggagaattataccaaatgcaaaactattaatccacttgtaaagaatacttgaagctctagctcccaaaacccaattgtaaagctgacaataaatttgttaaattaggttgtaaattaagcataatttaagtcctccaaaactgaattatattctgcagaactgtgagcaaatgctactataattttagtattcactcagtatgtttcttgttttgcttgtgtattgaa

SEQ ID NO: 416090 - DNA, 341 bp, Homo sapiens
  misc_feature (25)..(25): n is a, c, g, or t
  misc_feature (27)..(27): n is a, c, g, or t
gcggccgcctactactactaaattngnggccgctcgttcaccgcgctgctggtgcaccgtgaggcccgggatgagcggcagtgcctgcagaagtacggcctggcctggcaggagtactgccggcgtgtgccttaccgcatcatgccctacatctactgaagcggctccaccaccccaggtgggggcatgtgcccactcatccaccagcacacccaggaccaggagcctcgacacacttgggactcaagggcttgcaccccacccagccctgaggatgaacaacctcagagaagaggtggtttagagcaaggaaaaaaatgaaaccagtgaccaaaatcgga

SEQ ID NO: 416091 - DNA, 1606 bp, Homo sapiens
accctgggacgagagcggtccttgtctgcgttccgtgtccaggcaggtgcaggcgccgcggggccggatcctccgcgcggccgagtccatctcctgggaaatggggcggacagtgtttccttgactgactattgtgagcgccctctctctccggcggagcggagaccatggcccccactcagggcccccgggccccgctggaattcggagggcccctgggcgccgcggctctgctactgctgctgcccgccaccatgttccacctgctcctggcggcccgttcgggccccgcgcgcctgctgggtccacccgcgtccctgcccgggctggaggtgctgtggagcccacgggcgctgctgctgtggctcgcctggctcggcctgcaggcggcgctctacctactgccggcgcgcaaggtggccgaggggcaggaattgaaggacaagagtcgcctgcgctatcctattaacggcttccaggccctggtgctgacagccctgttggtggggctggggatgtcagcggggctgcctctgggggcgctcccggaaatgctcctgcccttggcgtttgtcgccaccctcaccgctttcatcttcagcctctttctctacatgaaggcgcaggtagccccagtttcggccctggcacctggggggaactcaggcaatccgatttacgacttttttctgggacgagagctcaaccctcgtatctgtttcttcgacttcaaatatttctgtgaactgcgacccggcctcatcggctgggtcctcatcaacctggccctgttgatgaaggaggcagagcttcgaggcagtccctcactggccatgtggctggtcaatggcttccagttgctctacgtgggtgatgccctctggcacgaggaggccgtcctcaccaccatggatatcacacatgacgggtttggcttcatgctggcgtttggggacatggcctgggtgcccttcacctacagcctgcaggcccagttcctgctgcaccacccgcagcccctggggttgcccatggcctctgtcatctgcctcatcaatgctactggttactacatcttccgtggggcgaattcccagaaaaacactttccgaaagaatccttctgaccccagagtggctgggcttgagaccatctctacagccacagggcggaaactgctggtgtctgggtggtggggtatggtccgccatcccaactatcttggagacctcatcatggctctggcttggtccttgccctgcggggtgtcacacctgctgccctacttctacctcctctacttcaccgcgctgctggtgcaccgtgaggcccgggatgagcggcagtgcctgcagaagtacggcctggcctggcaggagtactgccggcgtgtgccttaccgcatcatgccctacatctactgaagcggctccaccaccccaggtgggggcatgtgcccactcatccaccagcacacccaggaccaggagcctcgacacacttgggactcaagggcttgcaccccacccagccctgaggatgaacaacctcagagaagaggtggtttagagcaaggaaaaaaatgaaaccagtgaccaaaatcgga

SEQ ID NO: 416092 - DNA, 2139 bp, Homo sapiens
gcctcgtgccgattcggcacgagggtccaggcaggtgcaggcgccgcggggccggatcctccgcgcggccgagtccatctcctgggaaatggggcggacagtgtttccttgactgactattgtgagcgccctctctctccggcggagcggagaccatggcccccactcagggcccccgggccccgctggaattcggagggcccctgggtaatggggcagagagatgggacctggggcaaaggctaagcgaaggagagctggagcgggtgaactaagagcgggggcgagatctgaggatggaaggctttgggggtgtcggaggcagagggacccgggggtttgcagcgaagggtgtctggagagggagagctgaggaggggccggttctgggggctgcagaacggggatttatggtgtcgactgggagcaggaggagggtcttcgaggggcctgggggcgggggactaagatggacgcctgggaagggaactgggaggcagcggggtgcctgggggccgagggctgaggacggggtgcggaggcgcactctgggaatgccgagagggtcccgcagagacgtcagggcgcccgtgcgggccggcggggagctggggggctaggggcggacgccgacgtgatggcccttcccgcaggcgccgcggctctgctactgctgctgcccgccaccatgttccacctgctcctggcggcccgttcgggccccgcgcgcctgctgggtccacccgcgtccctgcccgggctggaggtgctgtggagcccacgggcgctgctgctgtggctcgcctggctcggcctgcaggcggcgctctacctactgccggcgcgcaaggtgcgggccccgctcgcggacgctcgggggagggaagcgaatgggctcggcgagggaaaggacgccccgggccttatcagagcccccttggacccgcaggtggccgaggggcaggaattgaaggacaagagtcgcctgcgctatcctattaacggcttccaggccctggtgctgacagccctgttggtggggctggggatgtcagcggggctgcctctgggggcgctcccggaaatgctcctgcccttggcgtttgtcgccaccctcaccgctttcatcttcagcctctttctctacatgaaggcgcaggtagccccagtttcggccctggcacctggggggaactcaggcaatccgatttacgacttttttctgggacgagagctcaaccctcgtatctgtttcttcgacttcaaatatttctgtgaactgcgacccggcctcatcggctgggtcctcatcaacctggccctgttgatgaaggaggcagagcttcgaggcagtccctcactggccatgtggctggtcaatggcttccagttgctctacgtgggtgatgccctctggcacgaggaggccgtcctcaccaccatggatatcacacatgacgggtttggcttcatgctggcgtttggggacatggcctgggtgcccttcacctacagcctgcaggcccagttcctgctgcaccacccgcagcccctggggttgcccatggcctctgtcatctgcctcatcaatgctactggttactacatcttccgtggggcgaattcccagaaaaacactttccgaaagaatccttctgaccccagagtggctgggcttgagaccatctctacagccacagggcggaaactgctggtgtctgggtggtggggtatggtccgccatcccaactatcttggagacctcatcatggctctggcttggtccttgccctgcggggtgtcacacctgctgccctacttctacctcctctacttcaccgcgctgctggtgcaccgtgaggcccgggatgagcggcagtgcctgcagaagtacggcctggcctggcaggagtactgccggcgtgtgccttaccgcatcatgccctacatctactgaagcggctccaccaccccaggtgggggcatgtgcccactcatccaccagcacacccaggaccaggagcctcgacacacttgggactcaagggcttgcaccccacccagccctgaggatgaacaacctcagagaagaggtggtttagagcaaggaaaaaaatgaaaccagtgaccaaaatcgga

SEQ ID NO: 416093 - DNA, 1493 bp, Homo sapiens
accctgggacgagagcggtccttgtctgcgttccgtgtccaggcaggtgcaggcgccgcggggccggatcctccgcgcggccgagtccatctcctgggaaatggggcggacagtgtttccttgactgactattgtgagcgccctctctctccggcggagcggagaccatggcccccactcagggcccccgggccccgctggaattcggagggcccctgggcgccgcggctctgctactgctgctgcccgccaccatgttccacctgctcctggcggcccgttcgggccccgcgcgcctgctgggtccacccgcgtccctgcccgggctggaggtgctgtggagcccacgggcgctgctgctgtggctcgcctggctcggcctgcaggcggcgctctacctactgccggcgcgcaaggtggccgaggggcaggaattgaaggacaagagtcgcctgcgctatcctattaacggcttccaggccctggtgctgacagccctgttggtggggctggggatgtcagcggggctgcctctgggggcgctcccggaaatgctcctgcccttggcgtttgtcgccaccctcaccgctttcatcttcagcctctttctctacatgaaggcgcaggtagccccagtttcggccctggcacctggggggaactcaggcaatccgatttacgacttttttctgggacgagagctcaaccctcgtatctgtttcttcgacttcaaatatttctgtgaactgcgacccggcctcatcggctgggtcctcatcaacctggccctgttgatgaaggaggcagagcttcgaggcagtccctcactggccatgtggctggtcaatggcttccagttgctctacgtgggtgatgccctctggcacgaggaggccgtcctcaccaccatggatatcacacatgacgggtttggcttcatgctggcgtttggggacatggcctgggtgcccttcacctacagcctgcaggcccagttcctgctgcaccacccgcagcccctggggttgcccatggcctctgtcatctgcctcatcaatgctactggttactacatcttccgtggggcgaattcccagaaaaacactttccgaaagaatccttctgaccccagagtggctgggcttgagaccatctctacagccacagggcggaaactgctggtgtctgggtggtggggtatggtccgccatcccaactatcttggagacctcatcatggctctggcttggtccttgccctgcggggtgtcacacctgctgccctacttctacctcctctacttcaccgcgctgctggtgcaccgtgaggcccgggatgagcggcagtgcctgcagaagtacggcctggcctggcaggagtactgccggcgtgtgccttaccgcatcatgccctacatctactgaggatgaacaacctcagagaagaggtggtttagagcaaggaaaaaaatgaaaccagtgaccaaaatcgga

SEQ ID NO: 416094 - DNA, 1911 bp, Homo sapiens
accctgggacgagagcggtccttgtctgcgttccgtgtccaggcaggtgcaggcgccgcggggccggatcctccgcgcggccgagtccatctcctgggaaatggggcggacagtgtttccttgactgactattgtgagcgccctctctctccggcggagcggagaccatggcccccactcagggcccccgggccccgctggaattcggagggcccctgggcgccgcggctctgctactgctgctgcccgccaccatgttccacctgctcctggcggcccgttcgggccccgcgcgcctgctgggtccacccgcgtccctgcccgggctggaggtgctgtggagcccacgggcgctgctgctgtggctcgcctggctcggcctgcaggcggcgctctacctactgccggcgcgcaaggtggccgaggggcaggaattgaaggacaagagtcgcctgcgctatcctattaacggcttccaggccctggtgctgacagccctgttggtggggctggggatgtcagcggggctgcctctgggggcgctcccggaaatgctcctgcccttggcgtttgtcgccaccctcaccgctttcatcttcagcctctttctctacatgaaggcgcaggtagccccagtttcggccctggcacctggggggaactcaggcaatccgatttacgacttttttctgggacgagagctcaaccctcgtatctgtttcttcgacttcaaatatttctgtgaactgcgacccggcctcatcggctgggtcctcatcaacctggccctgttgatgaaggaggcagagcttcgaggcagtccctcactggccatgtggctggtcaatggcttccagttgctctacgtgggtgatgccctctggcacgaggaggccgtcctcaccaccatggatatcacacatgacgggtttggcttcatgctggcgtttggggacatggcctgggtgcccttcacctacagcctgcaggcccagttcctgctgcaccacccgcagcccctggggttgcccatggcctctgtcatctgcctcatcaatgctactggttactacatcttccgtggggcgaattcccagaaaaacactttccgaaagaatccttctgaccccagagtggctgggcttgagaccatctctacagccacagggcggaaactgctggtgtctgggtggtggggtatggtccgccatcccaactatcttggagacctcatcatggctctggcttggtccttgccctgcggggtgtcacacctgctgccctacttctacctcctctacttcaccgcgctgctggtgcaccgtgaggcccgggatgagcggcagtgcctgcagaagtacggcctggcctggcaggagtactgccggcgtgtgccttaccgcatcatgccctacatctactgaagcggctccaccaccccaggtgggggcatgtgcccactcatccaccagcacacccaggaccaggagcctcgacacacttgggactcaagggcttgcaccccacccagccctgaggatgaacaacctcagagaagaggtggtttagagcaaggaaaaaaatgaaaccagtgaccaaaatcggaaaaaaaaaaaaaaaaaaaaaaaaaaaaaaaaaaactctagagagggaatttattttggggggtgggagaaaaagaggggagaagtagagaagaggggcaaagtggggcaaaggggtgtttctgtgtgaccaagtttttgtgtgtgtaaaaggggggaaaattgttggcggggctccccctatattggggaggccggaatttaaatttcgcgaaataacccgggttaccccgggtttaagaggactgcggcaaacaacccccacaacaacagccaacaccacacacccgaccacagcagccgacgc

SEQ ID NO: 416095 - DNA, 1919 bp, Homo sapiens
accctgggacgagagcggtccttgtctgcgttccgtgtccaggcaggtgcaggcgccgcggggccggatcctccgcgcggccgagtccatctcctgggaaatggggcggacagtgtttccttgactgactattgtgagcgccctctctctccggcggagcggagaccatggcccccactcagggcccccgggccccgctggaattcggagggcccctgggcgccgcggctctgctactgctgctgcccgccaccatgttccacctgctcctggcggcccgttcgggccccgcgcgcctgctgggtccacccgcgtccctgcccgggctggaggtgctgtggagcccacgggcgctgctgctgtggctcgcctggctcggcctgcaggcggcgctctacctactgccggcgcgcaaggtggccgaggggcaggaattgaaggacaagagtcgcctgcgctatcctattaacggcttccaggccctggtgctgacagccctgttggtggggctggggatgtcagcggggctgcctctgggggcgctcccggaaatgctcctgcccttggcgtttgtcgccaccctcaccgctttcatcttcagcctctttctctacatgaaggcgcaggtagccccagtttcggccctggcacctggggggaactcaggcaatccgatttacgacttttttctgggacgagagctcaaccctcgtatctgtttcttcgacttcaaatatttctgtgaactgcgacccggcctcatcggctgggtcctcatcaacctggccctgttgatgaaggaggcagagcttcgaggcagtccctcactggccatgtggctggtcaatggcttccagttgctctacgtgggtgatgccctctggcacgaggaggccgtcctcaccaccatggatatcacacatgacgggtttggcttcatgctggcgtttggggacatggcctgggtgcccttcacctacagcctgcaggcccagttcctgctgcaccacccgcagcccctggggttgcccatggcctctgtcatctgcctcatcaatggtcagtcaggaaggggcagcaggctgggcccatcttccccctatccctttgattcatgctctgtttacacgcaccaccacataggtgctaacccccagggttctctaaagccagggcagggtcctgggggtccaggcagagtctgggctgcagacaagttgggcagatgttcggggtcaggcaggaggctgcaacccttgaccttgaccaccggttcacactctctcaccagctactggttactacatcttccgtggggcgaattcccagaaaaacactttccgaaagaatccttctgaccccagagtggctggtgagctggttctctagggccatgggtgaggtggggcagctgggcttcctgggaactctccaccctgctgtctttccccagggcttgagaccatctctacagccacagggcggaaactgctggtgtctgggtggtggggtatggtccgccatcccaactatcttggagacctcatcatggctctggcttggtccttgccctgcggggtgtcacacctgctgccctacttctacctcctctacttcaccgcgctgctggtgcaccgtgaggcccgggatgagcggcagtgcctgcagaagtacggcctggcctggcaggagtactgccggcgtgtgccttaccgcatcatgccctacatctactgaagcggctccaccaccccaggtgggggcatgtgcccactcatccaccagcacacccaggaccaggagcctcgacacacttgggactcaagggcttgcaccccacccagccctgaggatgaacaacctcagagaagaggtggtttagagcaaggaaaaaaatgaaaccagtgaccaaaatcgga

SEQ ID NO: 416096 - DNA, 1551 bp, Homo sapiens
accctgggacgagagcggtccttgtctgcgttccgtgtccaggcaggtgcaggcgccgcggggccggatcctccgcgcggccgagtccatctcctgggaaatggggcggacagtgtttccttgactgactattgtgagcgccctctctctccggcggagcggagaccatggcccccactcagggcccccgggccccgctggaattcggagggcccctgggcgccgcggctctgctactgctgctgcccgccaccatgttccacctgctcctggcggcccgttcgggccccgcgcgcctgctgggtccacccgcgtccctgcccgggctggaggtgctgtggagcccacgggcgctgctgctgtggctcgcctggctcggcctgcaggcggcgctctacctactgccggcgcgcaaggcttccaggccctggtgctgacagccctgttggtggggctggggatgtcagcggggctgcctctgggggcgctcccggaaatgctcctgcccttggcgtttgtcgccaccctcaccgctttcatcttcagcctctttctctacatgaaggcgcaggtagccccagtttcggccctggcacctggggggaactcaggcaatccgatttacgacttttttctgggacgagagctcaaccctcgtatctgtttcttcgacttcaaatatttctgtgaactgcgacccggcctcatcggctgggtcctcatcaacctggccctgttgatgaaggaggcagagcttcgaggcagtccctcactggccatgtggctggtcaatggcttccagttgctctacgtgggtgatgccctctggcacgaggaggccgtcctcaccaccatggatatcacacatgacgggtttggcttcatgctggcgtttggggacatggcctgggtgcccttcacctacagcctgcaggcccagttcctgctgcaccacccgcagcccctggggttgcccatggcctctgtcatctgcctcatcaatgctactggttactacatcttccgtggggcgaattcccagaaaaacactttccgaaagaatccttctgaccccagagtggctgggcttgagaccatctctacagccacagggcggaaactgctggtgtctgggtggtggggtatggtccgccatcccaactatcttggagacctcatcatggctctggcttggtccttgccctgcggggtgtcacacctgctgccctacttctacctcctctacttcaccgcgctgctggtgcaccgtgaggcccgggatgagcggcagtgcctgcagaagtacggcctggcctggcaggagtactgccggcgtgtgccttaccgcatcatgccctacatctactgaagcggctccaccaccccaggtgggggcatgtgcccactcatccaccagcacacccaggaccaggagcctcgacacacttgggactcaagggcttgcaccccacccagccctgaggatgaacaacctcagagaagaggtggtttagagcaaggaaaaaaatgaaaccagtgaccaaaatcgga

SEQ ID NO: 416097 - DNA, 1536 bp, Homo sapiens
accctgggacgagagcggtccttgtctgcgttccgtgtccaggcaggtgcaggcgccgcggggccggatcctccgcgcggccgagtccatctcctgggaaatggggcggacagtgtttccttgactgactattgtgagcgccctctctctccggcggagcggagaccatggcccccactcagggcccccgggccccgctggaattcggagggcccctgggcgccgcggctctgctactgctgctgcccgccaccatgttccacctgctcctggcggcccgttcgggccccgcgcgcctgctgggtccacccgcgtccctgcccgggctggaggtgctgtggagcccacgggcgctgctgctgtggctcgcctggctcggcctgcaggcggcgctctacctactgccggcgcgcaaggtggccgaggggcaggaattgaaggacaagagtcgcctgcgctatcctattaacggctcccggaaatgctcctgcccttggcgtttgtcgccaccctcaccgctttcatcttcagcctctttctctacatgaaggcgcaggtagccccagtttcggccctggcacctggggggaactcaggcaatccgatttacgacttttttctgggacgagagctcaaccctcgtatctgtttcttcgacttcaaatatttctgtgaactgcgacccggcctcatcggctgggtcctcatcaacctggccctgttgatgaaggaggcagagcttcgaggcagtccctcactggccatgtggctggtcaatggcttccagttgctctacgtgggtgatgccctctggcacgaggaggccgtcctcaccaccatggatatcacacatgacgggtttggcttcatgctggcgtttggggacatggcctgggtgcccttcacctacagcctgcaggcccagttcctgctgcaccacccgcagcccctggggttgcccatggcctctgtcatctgcctcatcaatgctactggttactacatcttccgtggggcgaattcccagaaaaacactttccgaaagaatccttctgaccccagagtggctgggcttgagaccatctctacagccacagggcggaaactgctggtgtctgggtggtggggtatggtccgccatcccaactatcttggagacctcatcatggctctggcttggtccttgccctgcggggtgtcacacctgctgccctacttctacctcctctacttcaccgcgctgctggtgcaccgtgaggcccgggatgagcggcagtgcctgcagaagtacggcctggcctggcaggagtactgccggcgtgtgccttaccgcatcatgccctacatctactgaagcggctccaccaccccaggtgggggcatgtgcccactcatccaccagcacacccaggaccaggagcctcgacacacttgggactcaagggcttgcaccccacccagccctgaggatgaacaacctcagagaagaggtggtttagagcaaggaaaaaaatgaaaccagtgaccaaaatcgga

SEQ ID NO: 416098 - DNA, 1573 bp, Homo sapiens
accctgggacgagagcggtccttgtctgcgttccgtgtccaggcaggtgcaggcgccgcggggccggatcctccgcgcggccgagtccatctcctgggaaatggggcggacagtgtttccttgactgactattgtgagcgccctctctctccggcggagcggagaccatggcccccactcagggcccccgggccccgctggaattcggagggcccctgggcgccgcggctctgctactgctgctgcccgccaccatgttccacctgctcctggcggcccgttcgggccccgcgcgcctgctgggtccacccgcgtccctgcccgggctggaggtgctgtggagcccacgggcgctgctgctgtggctcgcctggctcggcctgcaggcggcgctctacctactgccggcgcgcaaggtggccgaggggcaggaattgaaggacaagagtcgcctgcgctatcctattaacggcttccaggccctggtgctgacagccctgttggtggggctggggatgtcagcggggctgcctctgggggcgctcccggaaatgctcctgcccttggcgtttgtcgccaccctcaccgctttcatcttcagcctctttctctacatgaaggcgcaggtagccccagtttcggccctggcacctggggggaactcagagctcaaccctcgtatctgtttcttcgacttcaaatatttctgtgaactgcgacccggcctcatcggctgggtcctcatcaacctggccctgttgatgaaggaggcagagcttcgaggcagtccctcactggccatgtggctggtcaatggcttccagttgctctacgtgggtgatgccctctggcacgaggaggccgtcctcaccaccatggatatcacacatgacgggtttggcttcatgctggcgtttggggacatggcctgggtgcccttcacctacagcctgcaggcccagttcctgctgcaccacccgcagcccctggggttgcccatggcctctgtcatctgcctcatcaatgctactggttactacatcttccgtggggcgaattcccagaaaaacactttccgaaagaatccttctgaccccagagtggctgggcttgagaccatctctacagccacagggcggaaactgctggtgtctgggtggtggggtatggtccgccatcccaactatcttggagacctcatcatggctctggcttggtccttgccctgcggggtgtcacacctgctgccctacttctacctcctctacttcaccgcgctgctggtgcaccgtgaggcccgggatgagcggcagtgcctgcagaagtacggcctggcctggcaggagtactgccggcgtgtgccttaccgcatcatgccctacatctactgaagcggctccaccaccccaggtgggggcatgtgcccactcatccaccagcacacccaggaccaggagcctcgacacacttgggactcaagggcttgcaccccacccagccctgaggatgaacaacctcagagaagaggtggtttagagcaaggaaaaaaatgaaaccagtgaccaaaatcgga

SEQ ID NO: 416099 - DNA, 1236 bp, Homo sapiens
  misc_feature (1077)..(1077): n is a, c, g, or t
  misc_feature (1079)..(1079): n is a, c, g, or t
  misc_feature (1099)..(1099): n is a, c, g, or t
  misc_feature (1104)..(1104): n is a, c, g, or t
  misc_feature (1107)..(1107): n is a, c, g, or t
accctgggacgagagcggtccttgtctgcgttccgtgtccaggcaggtgcaggcgccgcggggccggatcctccgcgcggccgagtccatctcctgggaaatggggcggacagtgtttccttgactgactattgtgagcgccctctctctccggcggagcggagaccatggcccccactcagggcccccgggccccgctggaattcggagggcccctgggcgccgcggctctgctactgctgctgcccgccaccatgttccacctgctcctggcggcccgttcgggccccgcgcgcctgctgggtccacccgcgtccctgcccgggctggaggtgctgtggagcccacgggcgctgctgctgtggctcgcctggctcggcctgcaggcggcgctctacctactgccggcgcgcaaggtggccgaggggcaggaattgaaggacaagagtcgcctgcgctatcctattaacggcttccaggccctggtgctgacagccctgttggtggggctggggatgtcagcggggctgcctctgggggcgctcccggaaatgctcctgcccttggcgtttgtcgccaccctcaccgctttcatcttcagcctctttctctacatgaaggcgcaggtagccccagtttcggccctggcacctggggggaactcaggcaatccgatttacgacttttttctgggacgagagctcaaccctcgtatctgtttcttcgacttcaaatatttctgtgaactgcgacccggcctcatcggctgggtcctcatcaacctggccctgttgatgaaggaggcagagcttcgaggcagtccctcactggccatgtggctggtcaatggcttccagttgctctacgtgggtgatgccctctggcacgaggaggccgtcctcaccaccatggatatcacacatgacgggtttggcttcatgctggcgtttggggacatggcctgggtgcccttcacctacagcctgcaggcccagttcctgctgcaccacccgcagcccctggggttgcccatggcctctgtcatctgcctcatcaatgtatggtactacatcttcngnggggcgaattccagaaaacnttcgnaanatctttgaaccaagtggtggttgaaccttttaagcacggcgaactgtgggcgggggcgatgccaccacattggcccatggctgtgcgccgggtgacggcaattactcaaccggtgcacgacgaaggaaa

SEQ ID NO: 416100 - DNA, 2042 bp, Homo sapiens
accctgggacgagagcggtccttgtctgcgttccgtgtccaggcaggtgcaggcgccgcggggccggatcctccgcgcggccgagtccatctcctgggaaatggggcggacagtgtttccttgactgactattgtgagcgccctctctctccggcggagcggagaccatggcccccactcagggcccccgggccccgctggaattcggagggcccctgggcgccgcggctctgctactgctgctgcccgccaccatgttccacctgctcctggcggcccgttcgggccccgcgcgcctgctgggtccacccgcgtccctgcccgggctggaggtgctgtggagcccacgggcgctgctgctgtggctcgcctggctcggcctgcaggcggcgctctacctactgccggcgcgcaaggtggccgaggggcaggaattgaaggacaagagtcgcctgcgctatcctattaacgacggtgcctaggggacgggccctcgcgctggagttaagcggccgggggtggagctccaggcctagcggggaggtccacggagattggcccccacccaggctcctttgtgtgcctctgttacgcccaggacagacgccgggggctctccctatgcccctcgtccccacagccttaccccatttactgctactccgtgcaccacagcagtggctggggtgatcctctgaaggccagggtggcagcctaatgcttggggcagggtctgtggcccccctgagttttgggctctgcgtgtgtttgcggggtggggatgtggaggcgcgcagccccagggctcactgtgcgctgtggttcaggcttccaggccctggtgctgacagccctgttggtggggctggggatgtcagcggggctgcctctgggggcgctcccggaaatgctcctgcccttggcgtttgtcgccaccctcaccgctttcatcttcagcctctttctctacatgaaggcgcaggtagccccagtttcggccctggcacctggggggaactcaggcaatccgatttacgacttttttctgggacgagagctcaaccctcgtatctgtttcttcgacttcaaatatttctgtgaactgcgacccggcctcatcggctgggtcctcatcaacctggccctgttgatgaaggaggcagagcttcgaggcagtccctcactggccatgtggctggtcaatggcttccagttgctctacgtgggtgatgccctctggcacgaggtgaggctggactggacgagggtgggtgtctgagggccgcatagggactaagccagtgtgtctgggtcttgtccctgcaggaggccgtcctcaccaccatggatatcacacatgacgggtttggcttcatgctggcgtttggggacatggcctgggtgcccttcacctacagcctgcaggcccagttcctgctgcaccacccgcagcccctggggttgcccatggcctctgtcatctgcctcatcaatgctactggttactacatcttccgtggggcgaattcccagaaaaacactttccgaaagaatccttctgaccccagagtggctgggcttgagaccatctctacagccacagggcggaaactgctggtgtctgggtggtggggtatggtccgccatcccaactatcttggagacctcatcatggctctggcttggtccttgccctgcggggtgtcacacctgctgccctacttctacctcctctacttcaccgcgctgctggtgcaccgtgaggcccgggatgagcggcagtgcctgcagaagtacggcctggcctggcaggagtactgccggcgtgtgccttaccgcatcatgccctacatctactgaagcggctccaccaccccaggtgggggcatgtgcccactcatccaccagcacacccaggaccaggagcctcgacacacttgggactcaagggcttgcaccccacccagccctgaggatgaacaacctcagagaagaggtggtttagagcaaggaaaaaaatgaaaccagtgaccaaaatcgga

SEQ ID NO: 416101 - DNA, 1594 bp, Homo sapiens
gcctcgtgccgattcggcacgagggtccaggcaggtgcaggcgccgcggggccggatcctccgcgcggccgagtccatctcctgggaaatggggcggacagtgtttccttgactgactattgtgagcgccctctctctccggcggagcggagaccatggcccccactcagggcccccgggccccgctggaattcggagggcccctgggcgccgcggctctgctactgctgctgcccgccaccatgttccacctgctcctggcggcccgttcgggccccgcgcgcctgctgggtccacccgcgtccctgcccgggctggaggtgctgtggagcccacgggcgctgctgctgtggctcgcctggctcggcctgcaggcggcgctctacctactgccggcgcgcaaggtggccgaggggcaggaattgaaggacaagagtcgcctgcgctatcctattaacggcttccaggccctggtgctgacagccctgttggtggggctggggatgtcagcggggctgcctctgggggcgctcccggaaatgctcctgcccttggcgtttgtcgccaccctcaccgctttcatcttcagcctctttctctacatgaaggcgcaggtagccccagtttcggccctggcacctggggggaactcaggcaatccgatttacgacttttttctgggacgagagctcaaccctcgtatctgtttcttcgacttcaaatatttctgtgaactgcgacccggcctcatcggctgggtcctcatcaacctggccctgttgatgaaggaggcagagcttcgaggcagtccctcactggccatgtggctggtcaatggcttccagttgctctacgtgggtgatgccctctggcacgaggaggccgtcctcaccaccatggatatcacacatgacgggtttggcttcatgctggcgtttggggacatggcctgggtgcccttcacctacagcctgcaggcccagttcctgctgcaccacccgcagcccctggggttgcccatggcctctgtcatctgcctcatcaatgctactggttactacatcttccgtggggcgaattcccagaaaaacactttccgaaagaatccttctgaccccagagtggctgggcttgagaccatctctacagccacagggcggaaactgctggtgtctgggtggtggggtatggtccgccatcccaactatcttggagacctcatcatggctctggcttggtccttgccctgcggggtgtcacacctgctgccctacttctacctcctctacttcaccgcgctgctggtgcaccgtgaggcccgggatgagcggcagtgcctgcagaagtacggcctggcctggcaggagtactgccggcgtgtgccttaccgcatcatgccctacatctactgaagcggctccaccaccccaggtgggggcatgtgcccactcatccaccagcacacccaggaccaggagcctcgacacacttgggactcaagggcttgcaccccacccagccctgaggatgaacaacctcagagaagaggtggtttagagcaaggaaaaaaatgaaaccagtgaccaaaatcgga

SEQ ID NO: 416102 - DNA, 1838 bp, Homo sapiens
accctgggacgagagcggtccttgtctgcgttccgtgtccaggcaggtgcaggcgccgcggggccggatcctccgcgcggccgagtccatctcctgggaaatggggcggacagtgtttccttgactgactattgtgagcgccctctctctccggcggagcggagaccatggcccccactcagggcccccgggccccgctggaattcggagggcccctgggcgccgcggctctgctactgctgctgcccgccaccatgttccacctgctcctggcggcccgttcgggccccgcgcgcctgctgggtccacccgcgtccctgcccgggctggaggtgctgtggagcccacgggcgctgctgctgtggctcgcctggctcggcctgcaggcggcgctctacctactgccggcgcgcaaggtggccgaggggcaggaattgaaggacaagagtcgcctgcgctatcctattaacggcttccaggccctggtgctgacagccctgttggtggggctggggatgtcagcggggctgcctctgggggcgctcccggaaatgctcctgcccttggcgtttgtcgccaccctcaccgctttcatcttcagcctctttctctacatgaaggcgcaggtagccccagtttcggccctggcacctggggggaactcaggcaatccgatttacgacttttttctgggacgagagctcaaccctcgtatctgtttcttcgacttcaaatatttctgtgaactgcgacccggcctcatcggctgggtcctcatcaacctggccctgttgatgaaggaggcagagcttcgaggcagtccctcactggccatgtggctggtcaatggcttccagttgctctacgtgggtgatgccctctggcacgaggaggccgtcctcaccaccatggatatcacacatgacgggtttggcttcatgctggcgtttggggacatggcctgggtgcccttcacctacagcctgcaggcccagttcctgctgcaccacccgcagcccctggggttgcccatggcctctgtcatctgcctcatcaatggtcagtcaggaaggggcagcaggctgggcccatcttccccctatccctttgattcatgctctgtttacacgcaccaccacataggtgctaacccccagggttctctaaagccagggcagggtcctgggggtccaggcagagtctgggctgcagacaagttgggcagatgttcggggtcaggcaggaggctgcaacccttgaccttgaccaccggttcacactctctcaccagctactggttactacatcttccgtggggcgaattcccagaaaaacactttccgaaagaatccttctgaccccagagtggctgggcttgagaccatctctacagccacagggcggaaactgctggtgtctgggtggtggggtatggtccgccatcccaactatcttggagacctcatcatggctctggcttggtccttgccctgcggggtgtcacacctgctgccctacttctacctcctctacttcaccgcgctgctggtgcaccgtgaggcccgggatgagcggcagtgcctgcagaagtacggcctggcctggcaggagtactgccggcgtgtgccttaccgcatcatgccctacatctactgaagcggctccaccaccccaggtgggggcatgtgcccactcatccaccagcacacccaggaccaggagcctcgacacacttgggactcaagggcttgcaccccacccagccctgaggatgaacaacctcagagaagaggtggtttagagcaaggaaaaaaatgaaaccagtgaccaaaatcgga

SEQ ID NO: 416103 - DNA, 2011 bp, Homo sapiens
  misc_feature (1964)..(1964): n is a, c, g, or t
accctgggacgagagcggtccttgtctgcgttccgtgtccaggcaggtgcaggcgccgcggggccggatcctccgcgcggccgagtccatctcctgggaaatggggcggacagtgtttccttgactgactattgtgagcgccctctctctccggcggagcggagaccatggcccccactcagggcccccgggccccgctggaattcggagggcccctgggcgccgcggctctgctactgctgctgcccgccaccatgttccacctgctcctggcggcccgttcgggccccgcgcgcctgctgggtccacccgcgtccctgcccgggctggaggtgctgtggagcccacgggcgctgctgctgtggctcgcctggctcggcctgcaggcggcgctctacctactgccggcgcgcaaggtggccgaggggcaggaattgaaggacaagagtcgcctgcgctatcctattaacggcttccaggccctggtgctgacagccctgttggtggggctggggatgtcagcggggctgcctctgggggcgctcccggaaatgctcctgcccttggcgtttgtcgccaccctcaccgctttcatcttcagcctctttctctacatgaaggcgcaggtagccccagtttcggccctggcacctggggggaactcaggcaatccgatttacgacttttttctgggacgagagctcaaccctcgtatctgtttcttcgacttcaaatatttctgtgaactgcgacccggcctcatcggctgggtcctcatcaacctggccctgttgatgaaggaggcagagcttcgaggcagtccctcactggccatgtggctggtcaatggcttccagttgctctacgtgggtgatgccctctggcacgaggaggccgtcctcaccaccatggatatcacacatgacgggtttggcttcatgctggcgtttggggacatggcctgggtgcccttcacctacagcctgcaggcccagttcctgctgcaccacccgcagcccctggggttgcccatggcctctgtcatctgcctcatcaatgctactggttactacatcttccgtggggcgaattcccagaaaaacactttccgaaagaatccttctgaccccagagtggctgggcttgagaccatctctacagccacagggcggaaactgctggtgtctgggtggtggggtatggtccgccatcccaactatcttggagacctcatcatggctctggcttggtccttgccctgcggggtgtcacacctgctgccctacttctacctcctctacttcaccgcgctgctggtgcaccgtgaggcccgggatgagcggcagtgcctgcagaagtacggcctggcctggcaggagtactgccggcgtgtgccttaccgcatcatgccctacatctactgaagcggctccaccaccccaggtgggggcatgtgcccactcatccaccagcacacccaggaccaggagcctcgacacacttgggactcaagggcttgcaccccacccagccctgaggatgaacaacctcagagaagaggtggtttagagcaaggaaaaaaatgaaaccagtgaccaaaatcggaaaaaaaggagaagaatacaaagaaataacaagaaaagactgggaccgggggtgctgttctgtgtggcggcgtggggaacgagcgggtgaccagtaccaggggcggatgtcgtgcgcctcgagagggttcgcccaggctcgcctgattctccttgtgtatgccacgtgggtgcgagcatcgggggggcgctccccgtatctgtgggcagggtcaattccctggcagcacacggcgcccgtgtgtgtgtccccgcgcgcttgttctcaatttgggggggaacctcctgacgtccccgagggacgggctgccttattgtgtgccctgttgtccccgggggcgacttcctcccaggaccggncactgccgagacacgggggctgggttgggagacagtcacgcgagggg

SEQ ID NO: 416104 - DNA, 1962 bp, Homo sapiens
accctgggacgagagcggtccttgtctgcgttccgtgtccaggcaggtgcaggcgccgcggggccggatcctccgcgcggccgagtccatctcctgggaaatggggcggacagtgtttccttgactgactattgtgagcgccctctctctccggcggagcggagaccatggcccccactcagggcccccgggccccgctggaattcggagggcccctgggcgccgcggctctgctactgctgctgcccgccaccatgttccacctgctcctggcggcccgttcgggccccgcgcgcctgctgggtccacccgcgtccctgcccgggctggaggtgctgtggagcccacgggcgctgctgctgtggctcgcctggctcggcctgcaggcggcgctctacctactgccggcgcgcaaggtggccgaggggcaggaattgaaggacaagagtcgcctgcgctatcctattaacgacggtgcctaggggacgggccctcgcgctggagttaagcggccgggggtggagctccaggcctagcggggaggtccacggagattggcccccacccaggctcctttgtgtgcctctgttacgcccaggacagacgccgggggctctccctatgcccctcgtccccacagccttaccccatttactgctactccgtgcaccacagcagtggctggggtgatcctctgaaggccagggtggcagcctaatgcttggggcagggtctgtggcccccctgagttttgggctctgcgtgtgtttgcggggtggggatgtggaggcgcgcagccccagggctcactgtgcgctgtggttcaggcttccaggccctggtgctgacagccctgttggtggggctggggatgtcagcggggctgcctctgggggcgctcccggaaatgctcctgcccttggcgtttgtcgccaccctcaccgctttcatcttcagcctctttctctacatgaaggcgcaggtagccccagtttcggccctggcacctggggggaactcaggcaatccgatttacgacttttttctgggacgagagctcaaccctcgtatctgtttcttcgacttcaaatatttctgtgaactgcgacccggcctcatcggctgggtcctcatcaacctggccctgttgatgaaggaggcagagcttcgaggcagtccctcactggccatgtggctggtcaatggcttccagttgctctacgtgggtgatgccctctggcacgaggaggccgtcctcaccaccatggatatcacacatgacgggtttggcttcatgctggcgtttggggacatggcctgggtgcccttcacctacagcctgcaggcccagttcctgctgcaccacccgcagcccctggggttgcccatggcctctgtcatctgcctcatcaatgctactggttactacatcttccgtggggcgaattcccagaaaaacactttccgaaagaatccttctgaccccagagtggctgggcttgagaccatctctacagccacagggcggaaactgctggtgtctgggtggtggggtatggtccgccatcccaactatcttggagacctcatcatggctctggcttggtccttgccctgcggggtgtcacacctgctgccctacttctacctcctctacttcaccgcgctgctggtgcaccgtgaggcccgggatgagcggcagtgcctgcagaagtacggcctggcctggcaggagtactgccggcgtgtgccttaccgcatcatgccctacatctactgaagcggctccaccaccccaggtgggggcatgtgcccactcatccaccagcacacccaggaccaggagcctcgacacacttgggactcaagggcttgcaccccacccagccctgaggatgaacaacctcagagaagaggtggtttagagcaaggaaaaaaatgaaaccagtgaccaaaatcgga

SEQ ID NO: 416105 - DNA, 2061 bp, Homo sapiens
accctgggacgagagcggtccttgtctgcgttccgtgtccaggcaggtgcaggcgccgcggggccggatcctccgcgcggccgagtccatctcctgggaaatggggcggacagtgtttccttgactgactattgtgagcgccctctctctccggcggagcggagaccatggcccccactcagggcccccgggccccgctggaattcggagggcccctgggcgccgcggctctgctactgctgctgcccgccaccatgttccacctgctcctggcggcccgttcgggccccgcgcgcctgctgggtccacccgcgtccctgcccgggctggaggtgctgtggagcccacgggcgctgctgctgtggctcgcctggctcggcctgcaggcggcgctctacctactgccggcgcgcaaggtgcgggccccgctcgcggacgctcgggggagggaagcgaatgggctcggcgagggaaaggacgccccgggccttatcagagcccccttggacccgcaggtggccgaggggcaggaattgaaggacaagagtcgcctgcgctatcctattaacgacggtgcctaggggacgggccctcgcgctggagttaagcggccgggggtggagctccaggcctagcggggaggtccacggagattggcccccacccaggctcctttgtgtgcctctgttacgcccaggacagacgccgggggctctccctatgcccctcgtccccacagccttaccccatttactgctactccgtgcaccacagcagtggctggggtgatcctctgaaggccagggtggcagcctaatgcttggggcagggtctgtggcccccctgagttttgggctctgcgtgtgtttgcggggtggggatgtggaggcgcgcagccccagggctcactgtgcgctgtggttcaggcttccaggccctggtgctgacagccctgttggtggggctggggatgtcagcggggctgcctctgggggcgctcccggaaatgctcctgcccttggcgtttgtcgccaccctcaccgctttcatcttcagcctctttctctacatgaaggcgcaggtagccccagtttcggccctggcacctggggggaactcaggcaatccgatttacgacttttttctgggacgagagctcaaccctcgtatctgtttcttcgacttcaaatatttctgtgaactgcgacccggcctcatcggctgggtcctcatcaacctggccctgttgatgaaggaggcagagcttcgaggcagtccctcactggccatgtggctggtcaatggcttccagttgctctacgtgggtgatgccctctggcacgaggaggccgtcctcaccaccatggatatcacacatgacgggtttggcttcatgctggcgtttggggacatggcctgggtgcccttcacctacagcctgcaggcccagttcctgctgcaccacccgcagcccctggggttgcccatggcctctgtcatctgcctcatcaatgctactggttactacatcttccgtggggcgaattcccagaaaaacactttccgaaagaatccttctgaccccagagtggctgggcttgagaccatctctacagccacagggcggaaactgctggtgtctgggtggtggggtatggtccgccatcccaactatcttggagacctcatcatggctctggcttggtccttgccctgcggggtgtcacacctgctgccctacttctacctcctctacttcaccgcgctgctggtgcaccgtgaggcccgggatgagcggcagtgcctgcagaagtacggcctggcctggcaggagtactgccggcgtgtgccttaccgcatcatgccctacatctactgaagcggctccaccaccccaggtgggggcatgtgcccactcatccaccagcacacccaggaccaggagcctcgacacacttgggactcaagggcttgcaccccacccagccctgaggatgaacaacctcagagaagaggtggtttagagcaaggaaaaaaatgaaaccagtgaccaaaatcgga

SEQ ID NO: 416106 - DNA, 1993 bp, Homo sapiens
gcctcgtgccgattcggcacgagggtccaggcaggtgcaggcgccgcggggccggatcctccgcgcggccgagtccatctcctgggaaatggggcggacagtgtttccttgactgactattgtgagcgccctctctctccggcggagcggagaccatggcccccactcagggcccccgggccccgctggaattcggagggcccctgggtaatggggcagagagatgggacctggggcaaaggctaagcgaaggagagctggagcgggtgaactaagagcgggggcgagatctgaggatggaaggctttgggggtgtcggaggcagagggacccgggggtttgcagcgaagggtgtctggagagggagagctgaggaggggccggttctgggggctgcagaacggggatttatggtgtcgactgggagcaggaggagggtcttcgaggggcctgggggcgggggactaagatggacgcctgggaagggaactgggaggcagcggggtgcctgggggccgagggctgaggacggggtgcggaggcgcactctgggaatgccgagagggtcccgcagagacgtcagggcgcccgtgcgggccggcggggagctggggggctaggggcggacgccgacgtgatggcccttcccgcaggcgccgcggctctgctactgctgctgcccgccaccatgttccacctgctcctggcggcccgttcgggccccgcgcgcctgctgggtccacccgcgtccctgcccgggctggaggtgctgtggagcccacgggcgctgctgctgtggctcgcctggctcggcctgcaggcggcgctctacctactgccggcgcgcaaggtgcgggccccgctcgcggacgctcgggggagggaagcgaatgggctcggcgagggaaaggacgccccgggccttatcagagcccccttggacccgcaggtggccgaggggcaggaattgaaggacaagagtcgcctgcgctatcctattaacgaaggcgcaggtagccccagtttcggccctggcacctggggggaactcaggcaatccgatttacgacttttttctgggacgagagctcaaccctcgtatctgtttcttcgacttcaaatatttctgtgaactgcgacccggcctcatcggctgggtcctcatcaacctggccctgttgatgaaggaggcagagcttcgaggcagtccctcactggccatgtggctggtcaatggcttccagttgctctacgtgggtgatgccctctggcacgaggaggccgtcctcaccaccatggatatcacacatgacgggtttggcttcatgctggcgtttggggacatggcctgggtgcccttcacctacagcctgcaggcccagttcctgctgcaccacccgcagcccctggggttgcccatggcctctgtcatctgcctcatcaatgctactggttactacatcttccgtggggcgaattcccagaaaaacactttccgaaagaatccttctgaccccagagtggctgggcttgagaccatctctacagccacagggcggaaactgctggtgtctgggtggtggggtatggtccgccatcccaactatcttggagacctcatcatggctctggcttggtccttgccctgcggggtgtcacacctgctgccctacttctacctcctctacttcaccgcgctgctggtgcaccgtgaggcccgggatgagcggcagtgcctgcagaagtacggcctggcctggcaggagtactgccggcgtgtgccttaccgcatcatgccctacatctactgaagcggctccaccaccccaggtgggggcatgtgcccactcatccaccagcacacccaggaccaggagcctcgacacacttgggactcaagggcttgcaccccacccagccctgaggatgaacaacctcagagaagaggtggtttagagcaaggaaaaaaatgaaaccagtgaccaaaatcgga

SEQ ID NO: 416107 - DNA, 1025 bp, Homo sapiens
  misc_feature (25)..(25): n is a, c, g, or t
  misc_feature (27)..(27): n is a, c, g, or t
gcggccgcctactactactaaattngnggccgctcgaaggcgcaggtagccccagtttcggccctggcacctggggggaactcaggcaatccgatttacgacttttttctgggacgagagctcaaccctcgtatctgtttcttcgacttcaaatatttctgtgaactgcgacccggcctcatcggctgggtcctcatcaacctggccctgttgatgaaggaggcagagcttcgaggcagtccctcactggccatgtggctggtcaatggcttccagttgctctacgtgggtgatgccctctggcacgaggaggccgtcctcaccaccatggatatcacacatgacgggtttggcttcatgctggcgtttggggacatggcctgggtgcccttcacctacagcctgcaggcccagttcctgctgcaccacccgcagcccctggggttgcccatggcctctgtcatctgcctcatcaatgctactggttactacatcttccgtggggcgaattcccagaaaaacactttccgaaagaatccttctgaccccagagtggctgggcttgagaccatctctacagccacagggcggaaactgctggtgtctgggtggtggggtatggtccgccatcccaactatcttggagacctcatcatggctctggcttggtccttgccctgcggggtgtcacacctgctgccctacttctacctcctctacttcaccgcgctgctggtgcaccgtgaggcccgggatgagcggcagtgcctgcagaagtacggcctggcctggcaggagtactgccggcgtgtgccttaccgcatcatgccctacatctactgaagcggctccaccaccccaggtgggggcatgtgcccactcatccaccagcacacccaggaccaggagcctcgacacacttgggactcaagggcttgcaccccacccagccctgaggatgaacaacctcagagaagaggtggtttagagcaaggaaaaaaatgaaaccagtgaccaaaatcgga

SEQ ID NO: 416108 - DNA, 1138 bp, Homo sapiens
  misc_feature (979)..(979): n is a, c, g, or t
  misc_feature (981)..(981): n is a, c, g, or t
  misc_feature (1001)..(1001): n is a, c, g, or t
  misc_feature (1006)..(1006): n is a, c, g, or t
  misc_feature (1009)..(1009): n is a, c, g, or t
gcctcgtgccgattcggcacgagggtccaggcaggtgcaggcgccgcggggccggatcctccgcgcggccgagtccatctcctgggaaatggggcggacagtgtttccttgactgactattgcgccgcggctctgctactgctgctgcccgccaccatgttccacctgctcctggcggcccgttcgggccccgcgcgcctgctgggtccacccgcgtccctgcccgggctggaggtgctgtggagcccacgggcgctgctgctgtggctcgcctggctcggcctgcaggcggcgctctacctactgccggcgcgcaaggtggccgaggggcaggaattgaaggacaagagtcgcctgcgctatcctattaacggcttccaggccctggtgctgacagccctgttggtggggctggggatgtcagcggggctgcctctgggggcgctcccggaaatgctcctgcccttggcgtttgtcgccaccctcaccgctttcatcttcagcctctttctctacatgaaggcgcaggtagccccagtttcggccctggcacctggggggaactcaggcaatccgatttacgacttttttctgggacgagagctcaaccctcgtatctgtttcttcgacttcaaatatttctgtgaactgcgacccggcctcatcggctgggtcctcatcaacctggccctgttgatgaaggaggcagagcttcgaggcagtccctcactggccatgtggctggtcaatggcttccagttgctctacgtgggtgatgccctctggcacgaggaggccgtcctcaccaccatggatatcacacatgacgggtttggcttcatgctggcgtttggggacatggcctgggtgcccttcacctacagcctgcaggcccagttcctgctgcaccacccgcagcccctggggttgcccatggcctctgtcatctgcctcatcaatgtatggtactacatcttcngnggggcgaattccagaaaacnttcgnaanatctttgaaccaagtggtggttgaaccttttaagcacggcgaactgtgggcgggggcgatgccaccacattggcccatggctgtgcgccgggtgacggcaattactcaaccggtgcacgacgaaggaaa

SEQ ID NO: 416109 - DNA, 440 bp, Homo sapiens
  misc_feature (310)..(310): n is a, c, g, or t
  misc_feature (420)..(421): n is a, c, g, or t
  misc_feature (423)..(423): n is a, c, g, or t
  misc_feature (428)..(428): n is a, c, g, or t
  misc_feature (436)..(436): n is a, c, g, or t
atttttcttccttgtgtagtgacagtgtttattgttgttccgaagccaatttgaagcttaactttagaaacattatatattaatctgaccatatttggttttaaaaaagtctctatgagtgaaataaagattttctgtttaatgatgattaataacctattcggatggattcatctgaggaactgaagataattttgccatcaggccacttgtatatgggcacaaacagatgggtcttactccagcctgggcaacagagcgagactccaactcagaaaaagcaaaacaaaacaaacaaacaagcaaaaanccacaattagactgacagctgacttttttaggagcaacattggaaggctaaatgcaatagaaagatgtctttgatgccttaagagaaataaatgttgttttagaaagcannanacttnaaaaaaanaaaa

SEQ ID NO: 416110 - DNA, 1198 bp, Homo sapiens
gggttcccgcgcggcgctccaaagctcggggagtggttgtctccctttcctggagtcatttgtgggagttagggtcttatcctgatctttcctcgtcccccgctcccccgtcctccgaggtggcagctgcgtagatcgggggtcatactacacatcgatcgggaccttagtcatgttgtgatatggacagctttcttaccagtactcataagcctgcttcattttttacgtggcggcaccactgagtggttgacgaagtctggaacgttttttcttagagttccagaattgtgactgaagtgtacccagagacacaaagaaatacagaagtccagaatgatcaaatgagatcactacccaatgaaatgataggccgaggagccagaaattgtcctactacctgctttccaggtccagattccacgagagccttctgggctcccaccagagaccctcagtgaagactctgttgaagactttaagaccatgctagaaagcctcccggcagaggttcaggaagttctgctatgaggatgcagctggccccagggatgtcctcaggcatctctaggaccttgctggacggtggtggctgagacctgatatccacacaaaggagcagactgtggaaatgctggtgcaggagcaattccaggctgtcctgcccgaggagctcagagctcaagcacagagatgtcatcctggaatcagaatcactggctaagtcttgctgcttgcttcttgctcagcctgcatatgagaagtcaaccaagcattctcttggatgcaagatccaactgcacccatgggaaatctgaacttccactttctttgagcttgtctttggttgtaataagaatccatcaaaacccatgtctggatctctctttggctgaggcagctttatttcctacagagtttctctgtcctcttgttaggacaatcagcctgctgctttgggcttttccaagagcctatttttcatctgctggatgcctctttttttttttttttttgcactttgtgacatgctttaatatatatattttttatgtatccaaagaggtaatcaactttaactttcagaattcatgaatcttggtttggtggcatgaatgaaaggttatgtaaccccaccagtaactcatttggggtgcccttgaaatattaaagtttggtcctcaataaaaaaaaaaaa

SEQ ID NO: 416111 - DNA, 1077 bp, Homo sapiens
gggttcccgcgcggcgctccaaagctcggggagtggttgtctccctttcctggagtcatttgtgggagttagggtcttatcctgatctttcctcgtcccccgctcccccgtcctccgaggtggcagctgcgtagaagtctggaacgttttttcttagagttccagaattgtgactgaagtgtacccagagacacaaagaaatacagaagtccagaatgatcaaatgagatcactacccaatgaaatgataggccgaggagccagaaattgtcctactacctgctttccaggtccagattccacgagagccttctgggctcccaccagagaccctcagtgaagactctgttgaagactttaagaccatgctagaaagcctcccggcagaggttcaggaagttctgctatgaggatgcagctggccccagggatgtcctcaggcatctctaggaccttgctggacggtggtggctgagacctgatatccacacaaaggagcagactgtggaaatgctggtgcaggagcaattccaggctgtcctgcccgaggagctcagagctcaagcacagagatgtcatcctggaatcagaatcactggctaagtcttgctgcttgcttcttgctcagcctgcatatgagaagtcaaccaagcattctcttggatgcaagatccaactgcacccatgggaaatctgaacttccactttctttgagcttgtctttggttgtaataagaatccatcaaaacccatgtctggatctctctttggctgaggcagctttatttcctacagagtttctctgtcctcttgttaggacaatcagcctgctgctttgggcttttccaagagcctatttttcatctgctggatgcctctttttttttttttttttgcactttgtgacatgctttaatatatatattttttatgtatccaaagaggtaatcaactttaactttcagaattcatgaatcttggtttggtggcatgaatgaaaggttatgtaaccccaccagtaactcatttggggtgcccttgaaatattaaagtttggtcctcaataaaaaaaaaaaa

SEQ ID NO: 416112 - DNA, 3162 bp, Homo sapiens
gtagtgagccggctgagaggcatggagacgcaggaacttcggggggccctggctcttctcctcctttgctttttcacatctgccagtcaggatctgcaggtaattgacctgctgactgtgggcgagtctcggcagatggtagctgtggcagagaagatccggacagccttgctcactgctggggacatctacctcttatccaccttccgcctgccccccaagcagggtggtgtcctctttggcctctattctcgccaagacaacactcgatggctggaggcctctgttgtaggcaagatcaacaaagtactggtgcgataccagcgggaggatggcaaagtccacgccgtgaacctacagcaagcgggcctggctgatgggcgcacacacacagttctcctgcgactccgaggtccctccagacccagccctgccctacatctctacgtggactgcaaactgggtgaccaacatgcaggccttccagcactggcccccattcctccagcggaggtcgatgggctggagattaggactggacagaaggcgtatttgaggatgcagggctttgtggaatctatgaaaattattctgggtgggtccatggcccgggtaggagccctgagtgagtgtccattccaaggggacgagtccatccacagtgcagtgaccaatgcactgcactccattctaggggagcagaccaaggcgctggtcacccaactcaccctcttcaaccagatcctggtggagctgcgggatgatatacgagaccaggtgaaggaaatgtccctgatccgaaacaccattatggagtgtcaggtgtgcggcttccatgagcagcgttcccactgcagccccaatccctgcttccgaggtgtggactgcatggaagtgtacgagtacccaggctaccgctgtgggccctgcccccctggcctgcagggcaacggcacccactgcagtgacatcaatgagtgtgctcacgctgacccctgtttcccgggctccagctgcatcaacaccatgcccggcttccactgtgaggcctgtcctcgagggtacaagggcacacaggtgtctggtgtgggcattgactatgcccgggccagcaaacaggtctgcaatgacatcgatgaatgcaacgatggcaacaatggtggctgtgacccaaactccatctgcaccaacactgtgggctctttcaagtgtggtccctgccgcctgggtttcctgggcaaccagagccagggctgcctcccagcccggacctgccacagcccagcccacagcccctgccacatccatgctcactgtctctttgaacgcaatggtgcagtgtcctgccagtgtaacgtgggctgggctgggaatgggaacgtgtgtgggactgacacagacatcgatggctacccagaccaagcactgccctgcatggacaacaacaaacactgcaaacaggacaactgccttttgacacccaactctgggcaggaagatgctgataatgatggtgtgggggaccagtgtgatgatgatgctgatggggatgggatcaagaatgttgaggacaactgccggctgttccccaacaaagaccagcagaactcagatacagattcatttggtgatgcctgtgacaattgccccaacgttcccaacaatgaccagaaggacacagatggcaatggggaaggagatgcctgtgacaacgacgtggatggggatggcatccccaatggattggacaattgccctaaagtccccaacccactacagacagacagggatgaggacggggtgggagatgcttgcgacagctgccctgaaatgagcaatcctacccagacagatgcagacagcgacctggtgggggatgtctgtgatactaatgaagacagtgattagcgatggggatgggcatcaggacaccaaggacaactgcccacagctgccaaatagctcccagctggactctgataacgatggacttggagatgagtgtgatggggatgatgacaatgatggcatcccagattatgtgcctcctggtcccgataactgccgcctggtacccaatcccaatcagaaggactcagatggcaatggcgttggtgatgtgtgtgaggatgactttgacaatgatgctgtggtcgaccccctggatgtgtgtcctgaaagtgcagaggtaacgcttacggattttcgggcctatcagaccgtcgtcctggatcctgagggtgatgctcagattgacccaaactgggttgtgctcaaccagggcatggaaatcgttcagaccatgaacagtgaccctggcttggcagttggatacacggccttcaatggtgtggactttgaaggcaccttccatgtgaacacagtgactgatgatgactacgcaggctttctcttcagttatcaagacagtggccgcttctacgtagtcatgtggaagcagaccgagcagacctactggcaggctacacccttccgggcggttgcccagcccgggctgcagctcaaggcagtgacatcagtgtctggcccaggtgagcacctccgaaatgccctgtggcatactggccacacccctgatcaggtacgactgctgtggacagacccacgaaatgtgggctggcgggacaagacctcctatcgctggcagcttctgcaccggcctcaagttggctacattcgggtgaagctctatgagggaccccagcttgtggcggattctggggtgatcattgacacatccatgcgaggggggcgtcttggtgtattctgcttctcccaagaaaacataatttggtccaatctccagtatcgatgcaatgacacagtgcctgaggactttgagccattccggaggcagctgctccagggaagggtgtgaggaggaggccaccagattcagaattcagaattttagaccctttggccttggggtccatcctggagaccctgaggtctaagctacagcccctcagccaaccacagacccttctctggctcccaaaaggagttcagtcccagaggggtggtcaccccacccttcaggggatgagaagttttcaaggggtattactcaggcactaaccccaggaaagatgacagcacattgccataaagttttggttgttttctaaaaaaaaaaaa

SEQ ID NO: 416113 - DNA, 1078 bp, Homo sapiens
gacctggaacctgtcttatcaacgtggatagggatcatctgacctggaaggcatcatcatttacagaagagaaaatcaaggccctgacttcacaggcctcggttcaacactttgtccacaactttgcatttctctccaacaagtagccctagttggtggagatgaacaggaagggaggggaaatgggtctgcttagaggctggactttccatggccaagagcccagagtccaggaacctgggttggttcccctttaaggtgcctggggctgtggggtgccaggacaggggataaaagggggtggactagagcctgggaagcgggtgacttcaccccccagcccattgtgcttattgtcatggcaacccaatcctcgcttggaatgcggctggtgctttgagatgcaaaaggagctggacaaagagctaggggccccaggcctgagaaaagcaccccccttccctctccttcctgcctccctttccctccctcccttctctctcaggcctggtgagctcaaggggggctggggaaaagcaaggccccaggcatggtggcacagtgcccactggcaccctagcaccaatggatactcctatcctggaatcctggacagggtgaagctctatgagggaccccagcttgtggcggattctggggtgatcattgacacatccatgcgaggggggcgtcttggtgtattctgcttctcccaagaaaacataatttggtccaatctccagtatcgatgcaatgacacagtgcctgaggactttgagccattccggaggcagctgctccagggaagggtgtgaggaggaggccaccagattcagaattcagaattttagaccctttggccttggggtccatcctggagaccctgaggtctaagctacagcccctcagccaaccacagacccttctctggctcccaaaaggagttcagtcccagaggggtggtcaccccacccttcaggggatgagaagttttcaaggggtattactcaggcactaaccccaggaaagatgacagcacattgccataaagttttggttgttttctaaaaaaaaaaaa

SEQ ID NO: 416114 - DNA, 539 bp, Homo sapiens
aggcttgtggacgttggcctgggtgaggagagattacctgcagcagatgtcaataggaatgtgaggtagggcgtagtgttaggcagagtgtggaactagagggtgagacaagaaacaggcagatttcctggccagttgtcctctgggtggggagacaaagttcgggactttcaccaactgattagcgatggggatgggcatcaggacaccaaggacaactgcccacagctgccaaatagctcccagctggactctgataacgatggacttggagatgagtgtgatggggatgatgacaatgatggcatcccagattatgtgcctcctggtcccgataactgccgcctggtacccaatcccaatcagaaggactcagatgctgtgggactcaggccgggcctgtccttcctctttagctgggattcaccagtgacctctccatgggtgggaactgcagccacttctctccatcacccttctcaccacggacacaagcacctatgagtgatgttggtgaagtcactcctcccctcgtgccg

SEQ ID NO: 416115 - DNA, 538 bp, Homo sapiens
ttttgagatggagtcttgctctgtcactcaagctggagtgcagtgatatcggctcactgcaacctccacctccagggttcaagcgattttcctgcctcagcctcccgagtagctgggattacaggcgcgtgctaccaagctcagctaatttttgtgtttttagtagagacagggtttcatcgtgttggccaggctggtctcgaactcctgacctcaggtgatctgcccgccttggcctcccaaagtactgggaatacaggcatgagccactgtgcccaggccatagtatattctaaattccttctatgatttagccttaattctctattgctattcagcaggaatttattcttacagtcatccctccattcctactgccagaccttcacctcacctggctgactgccaggggtctgattgtatggagagcaggctccagagactcccaggcagaagcgaagggaaggacaaggagtacctttaaatcctttatttggtacctgttcttctcgacgcggccgcgaatttagtagtagta

SEQ ID NO: 416116 - DNA, 1470 bp, Homo sapiens
gttctagtaacaaccttgtgctacccatgtcttctaggcatccccaatggattggacaattgccctaaagtccccaacccactacagacagacagggatgaggacggggtgggagatgcttgcgacagctgccctgaaatgagcaatcctacccagacagatgcagacagcgacctggtgggggatgtctgtgatactaatgaagacagtgattagcgatggggatgggcatcaggacaccaaggacaactgcccacagctgccaaatagctcccagctggactctgataacgatggacttggagatgagtgtgatggggatgatgacaatgatggcatcccagattatgtgcctcctggtcccgataactgccgcctggtacccaatcccaatcagaaggactcagatggcaatggcgttggtgatgtgtgtgaggatgactttgacaatgatgctgtggtcgaccccctggatgtgtgtcctgaaagtgcagaggtaacgcttacggattttcgggcctatcagaccgtcgtcctggatcctgagggtgatgctcagattgacccaaactgggttgtgctcaaccagggcatggaaatcgttcagaccatgaacagtgaccctggcttggcagttggatacacggccttcaatggtgtggactttgaaggcaccttccatgtgaacacagtgactgatgatgactacgcaggctttctcttcagttatcaagacagtggccgcttctacgtagtcatgtggaagcagaccgagcagacctactggcaggctacacccttccgggcggttgcccagcccgggctgcagctcaaggcagtgacatcagtgtctggcccaggtgagcacctccgaaatgccctgtggcatactggccacacccctgatcaggtacgactgctgtggacagacccacgaaatgtgggctggcgggacaagacctcctatcgctggcagcttctgcaccggcctcaagttggctacattcgggtgaagctctatgagggaccccagcttgtggcggattctggggtgatcattgacacatccatgcgaggggggcgtcttggtgtattctgcttctcccaagaaaacataatttggtccaatctccagtatcgatgcaatgacacagtgcctgaggactttgagccattccggaggcagctgctccagggaagggtgtgaggaggaggccaccagattcagaattcagaattttagaccctttggccttggggtccatcctggagaccctgaggtctaagctacagcccctcagccaaccacagacccttctctggctcccaaaaggagttcagtcccagaggggtggtcaccccacccttcaggggatgagaagttttcaaggggtattactcaggcactaaccccaggaaagatgacagcacattgccataaagttttggttgttttctaaaaaaaaaaaa

SEQ ID NO: 416117 - DNA, 1495 bp, Homo sapiens
agcgtacacacgattgcatggcgaaggagatctccttctataacttggttgtcctgctaatggcatccccaatggattggacaattgccctaaagtccccaacccactacagacagacagggatgaggacggggtgggagatgcttgcgacagctgccctgaaatgagcaatcctacccagacagatgcagacagcgacctggtgggggatgtctgtgatactaatgaagacagtgattagcgatggggatgggcatcaggacaccaaggacaactgcccacagctgccaaatagctcccagctggactctgataacgatggacttggagatgagtgtgatggggatgatgacaatgatggcatcccagattatgtgcctcctggtcccgataactgccgcctggtacccaatcccaatcagaaggactcagatggcaatggcgttggtgatgtgtgtgaggatgactttgacaatgatgctgtggtcgaccccctggatgtgtgtcctgaaagtgcagaggtaacgcttacggattttcgggcctatcagaccgtcgtcctggatcctgagggtgatgctcagattgacccaaactgggttgtgctcaaccagggcatggaaatcgttcagaccatgaacagtgaccctggcttggcagttggatacacggccttcaatggtgtggactttgaaggcaccttccatgtgaacacagtgactgatgatgactacgcaggctttctcttcagttatcaagacagtggccgcttctacgtagtcatgtggaagcagaccgagcagacctactggcaggctacacccttccgggcggttgcccagcccgggctgcagctcaaggcagtgacatcagtgtctggcccaggtgagcacctccgaaatgccctgtggcatactggccacacccctgatcaggtacgactgctgtggacagacccacgaaatgtgggctggcgggacaagacctcctatcgctggcagcttctgcaccggcctcaagttggctacattcgggtgaagctctatgagggaccccagcttgtggcggattctggggtgatcattgacacatccatgcgaggggggcgtcttggtgtattctgcttctcccaagaaaacataatttggtccaatctccagtatcgatgcaatgacacagtgcctgaggactttgagccattccggaggcagctgctccagggaagggtgtgaggaggaggccaccagattcagaattcagaattttagaccctttggccttggggtccatcctggagaccctgaggtctaagctacagcccctcagccaaccacagacccttctctggctcccaaaaggagttcagtcccagaggggtggtcaccccacccttcaggggatgagaagttttcaaggggtattactcaggcactaaccccaggaaagatgacagcacattgccataaagttttggttgttttctaaaaaaaaaaaa

SEQ ID NO: 416118 - DNA, 1957 bp, Homo sapiens
ttttgagatggagtcttgctctgtcactcaagctggagtgcagtgatatcggctcactgcaacctccacctccagggttcaagcgattttcctgcctcagcctcccgagtagctgggattacaggcgcgtgctaccaagctcagctaatttttgtgtttttagtagagacagggtttcatcgtgttggccaggctggtctcgaactcctgacctcaggtgatctgcccgccttggcctcccaaagtactgggaatacaggcatgagccactgtgcccaggccatagtatattctaaattccttctatgatttagccttaattctctattgctattcagcaggaatttattcttacagtcatccctccattcctactgccagaccttcacctcacctggctgactgccaggggtctgattgtatggagagcaggctccagagactcccaggcagaagcgaagggaaggacaaggagtacctttaaatcctttatttggtacctgttcttctgattagcgatggggatgggcatcaggacaccaaggacaactgcccacagctgccaaatagctcccagctggactctgataacgatggacttggagatgagtgtgatggggatgatgacaatgatggcatcccagattatgtgcctcctggtcccgataactgccgcctggtacccaatcccaatcagaaggactcagatgtaagcctgcggacccagagcacgttagactggtgttgcctttgcccaggtggaggcagcaagccctgttgggaagtgaggaagggcaaggtggggaaagatgtcaggaatgcaggcccaacagatggtattgttgcctaatggcagtggccagggccttcctgagcacccagcctcactctgcccaggcaatggcgttggtgatgtgtgtgaggatgactttgacaatgatgctgtggtcgaccccctggatgtgtgtcctgaaagtgcagaggtaacgcttacggattttcgggcctatcagaccgtcgtcctggatcctgagggtgatgctcagattgacccaaactgggttgtgctcaaccagggcatggaaatcgttcagaccatgaacagtgaccctggcttggcagttggatacacggccttcaatggtgtggactttgaaggcaccttccatgtgaacacagtgactgatgatgactacgcaggctttctcttcagttatcaagacagtggccgcttctacgtagtcatgtggaagcagaccgagcagacctactggcaggctacacccttccgggcggttgcccagcccgggctgcagctcaaggcagtgacatcagtgtctggcccaggtgagcacctccgaaatgccctgtggcatactggccacacccctgatcaggtacgactgctgtggacagacccacgaaatgtgggctggcgggacaagacctcctatcgctggcagcttctgcaccggcctcaagttggctacattcgggtgaagctctatgagggaccccagcttgtggcggattctggggtgatcattgacacatccatgcgaggggggcgtcttggtgtattctgcttctcccaagaaaacataatttggtccaatctccagtatcgatgcaatgacacagtgcctgaggactttgagccattccggaggcagctgctccagggaagggtgtgaggaggaggccaccagattcagaattcagaattttagaccctttggccttggggtccatcctggagaccctgaggtctaagctacagcccctcagccaaccacagacccttctctggctcccaaaaggagttcagtcccagaggggtggtcaccccacccttcaggggatgagaagttttcaaggggtattactcaggcactaaccccaggaaagatgacagcacattgccataaagttttggttgttttctaaaaaaaaaaaa

SEQ ID NO: 416119 - DNA, 1626 bp, Homo sapiens
aggcttgtggacgttggcctgggtgaggagagattacctgcagcagatgtcaataggaatgtgaggtagggcgtagtgttaggcagagtgtggaactagagggtgagacaagaaacaggcagatttcctggccagttgtcctctgggtggggagacaaagttcgggactttcaccaactgattagcgatggggatgggcatcaggacaccaaggacaactgcccacagctgccaaatagctcccagctggactctgataacgatggacttggagatgagtgtgatggggatgatgacaatgatggcatcccagattatgtgcctcctggtcccgataactgccgcctggtacccaatcccaatcagaaggactcagatgtaagcctgcggacccagagcacgttagactggtgttgcctttgcccaggtggaggcagcaagccctgttgggaagtgaggaagggcaaggtggggaaagatgtcaggaatgcaggcccaacagatggtattgttgcctaatggcagtggccagggccttcctgagcacccagcctcactctgcccaggcaatggcgttggtgatgtgtgtgaggatgactttgacaatgatgctgtggtcgaccccctggatgtgtgtcctgaaagtgcagaggtaacgcttacggattttcgggcctatcagaccgtcgtcctggatcctgagggtgatgctcagattgacccaaactgggttgtgctcaaccagggcatggaaatcgttcagaccatgaacagtgaccctggcttggcagttggatacacggccttcaatggtgtggactttgaaggcaccttccatgtgaacacagtgactgatgatgactacgcaggctttctcttcagttatcaagacagtggccgcttctacgtagtcatgtggaagcagaccgagcagacctactggcaggctacacccttccgggcggttgcccagcccgggctgcagctcaaggcagtgacatcagtgtctggcccaggtgagcacctccgaaatgccctgtggcatactggccacacccctgatcaggtacgactgctgtggacagacccacgaaatgtgggctggcgggacaagacctcctatcgctggcagcttctgcaccggcctcaagttggctacattcgggtgaagctctatgagggaccccagcttgtggcggattctggggtgatcattgacacatccatgcgaggggggcgtcttggtgtattctgcttctcccaagaaaacataatttggtccaatctccagtatcgatgcaatgacacagtgcctgaggactttgagccattccggaggcagctgctccagggaagggtgtgaggaggaggccaccagattcagaattcagaattttagaccctttggccttggggtccatcctggagaccctgaggtctaagctacagcccctcagccaaccacagacccttctctggctcccaaaaggagttcagtcccagaggggtggtcaccccacccttcaggggatgagaagttttcaaggggtattactcaggcactaaccccaggaaagatgacagcacattgccataaagttttggttgttttctaaaaaaaaaaaa

SEQ ID NO: 416120 - DNA, 1977 bp, Homo sapiens
gtagtgagccggctgagaggcatggagacgcaggaacttcggggggccctggctcttctcctcctttgctttttcacatctgccagtcaggatctgcaggtaattgacctgctgactgtgggcgagtctcggcagatggtagctgtggcagagaagatccggacagccttgctcactgctggggacatctacctcttatccaccttccgcctgccccccaagcagggtggtgtcctctttggcctctattctcgccaagacaacactcgatggctggaggcctctgttgtaggcaagatcaacaaagtactggtgcgataccagcgggaggatggcaaagtccacgccgtgaacctacagcaagcgggcctggctgatgggcgcacacacacagttctcctgcgactccgaggtccctccagacccagccctgccctacatctctacgtggactgcaaactgggtgaccaacatgcaggccttccagcactggcccccattcctccagcggaggtcgatgggctggagattaggactggacagaaggcgtatttgaggatgcagggctttgtggaatctatgaaaattattctgggtgggtccatggcccgggtaggagccctgagtgagtgtccattccaaggggacgagtccatccacagtgcagtgaccaatgcactgcactccattctaggggagcagaccaaggcgctggtcacccaactcaccctcttcaaccagatcctggtggagctgcgggatgatatacgagaccaggtttgggtgggctggcgaagggtggcactgattctggggtagggtggcagatgtcaagtgctgactcctccccatccttctccaggtgaaggaaatgtccctgatccgaaacaccattatggagtgtcaggtgtgcggcttccatgagcagcgttcccactgcagccccaatccctgcttccgaggtgtggactgcatggaagtgtacgagtacccaggctaccgctgtgggccctgcccccctggcctgcagggcaacggcacccactgcagtgacatcaatgagtgtgctcacgctgacccctgtttcccgggctccagctgcatcaacaccatgcccggcttccactgtgaggcctgtcctcgagggtacaagggcacacaggtgtctggtgtgggcattgactatgcccgggccagcaaacaggtctgcaatgacatcgatgaatgcaacgatggcaacaatggtggctgtgacccaaactccatctgcaccaacactgtgggctctttcaagtgtggtccctgccgcctgggtttcctgggcaaccagagccagggctgcgcagtgacatcagtgtctggcccaggtgagcacctccgaaatgccctgtggcatactggccacacccctgatcaggtacgactgctgtggacagacccacgaaatgtgggctggcgggacaagacctcctatcgctggcagcttctgcaccggcctcaagttggctacattcgggtgaagctctatgagggaccccagcttgtggcggattctggggtgatcattgacacatccatgcgaggggggcgtcttggtgtattctgcttctcccaagaaaacataatttggtccaatctccagtatcgatgcaatgacacagtgcctgaggactttgagccattccggaggcagctgctccagggaagggtgtgaggaggaggccaccagattcagaattcagaattttagaccctttggccttggggtccatcctggagaccctgaggtctaagctacagcccctcagccaaccacagacccttctctggctcccaaaaggagttcagtcccagaggggtggtcaccccacccttcaggggatgagaagttttcaaggggtattactcaggcactaaccccaggaaagatgacagcacattgccataaagttttggttgttttctaaaaaaaaaaaa

SEQ ID NO: 416121 - DNA, 1024 bp, Homo sapiens
gtagtgagccggctgagaggcatggagacgcaggaacttcggggggccctggctcttctcctcctttgctttttcacatctgccagtcaggatctgcaggtaattgacctgctgactgtgggcgagtctcggcagatggtagctgtggcagagaagatccggacagccttgctcactgctggggacatctacctcttatccaccttccgcctgccccccaagcagggtggtgtcctctttggcctctattctcgccaagacaacactcgatggctggaggcctctgttgtaggcaagatcaacaaagtactggtgcgataccagcgggaggatggcaaagtccacgccgtgaacctacagcaagcgggcctggctgatgggcgcacacacacagttctcctgcgactccgaggtccctccagacccagccctgccctacatctctacgtggactgcaaactgggtgaccaacatgcaggccttccagcactggcccccattcctccagcggaggtcgatgggctggagattaggactggacagaaggcgtatttgaggatgcagggctttgtggaatctatgaaaattattctgggtgggtccatggcccgggtaggagccctgagtgagtgtccattccaaggggacgagtccatccacagtgcagtgaccaatgcactgcactccattctaggggagcagaccaaggcgctggtcacccaactcaccctcttcaaccagatcctggtggagctgcgggatgatatacgagaccaggtttgggtgggctggcgaagggtggcactgattctggggtagggtggcagatgtcaagtgctgactcctccccatccttctccaggtgaaggaaatgtccctgatccgaaacaccattatggagtgtcaggtgtgcggtgagtgggagagcaggggaggctccacatgaccgtgccacgttccccacccaatggctttggctttcccttctggtggcttaaatagtgaccaccgggtagctctgact

SEQ ID NO: 416122 - DNA, 679 bp, Homo sapiens
gtagtgagccggctgagaggcatggagacgcaggaacttcggggggccctggctcttctcctcctttgctttttcacatctgccagtcaggatctgcaggtaattgacctgctgactgtgggcgagtctcggcagatggtagctgtggcagagaagatccggacagccttgctcactgctggggacatctacctcttatccaccttccgcctgccccccaagcagggtggtgtcctctttggcctctattctcgccaagacaacactcgatggctggaggcctctgttgtaggcaagatcaacaaaggtgactggtgggcatctcctttcttgcaatggtgacctccttaagcactctccctcatccctacttcccaagtgcttcctcattctccttggcctccactagggaccaaggtcccatcaggctgtgcccagacatcaggggcacctggtatggggtgcttataaggtgctttaggagcccatgtaccaaacaatagggtgaggcttgagtcctgatatttatagggatgggaggttgtacttggggatgcctggaaggagggtgaggcatgtctctgtgcctcagcggtgatacagaaaggtctttcagatccctggaacaggtcagtggccacaaaaccagctgtcaccctaggagaggatacagtcatct

SEQ ID NO: 416123 - DNA, 286 bp, Homo sapiens
gaactcctgaccttaggcgatccacctgcctcaacctcccaaggtgttgggattacaggtgcgagccaccatgcccagccaagggttgaattttgaggtgactaacgctgcctggtggtgggggtagggggtgatgtgggctcgggggagggcataccttagcatttgatcccattctctaaccttgataacccctgcctgaccagtaattgacctgctgactgtgggcgagtctcggcagatggtagctgtggcagagaagatccggacagccttgctcactgct

SEQ ID NO: 416124 - DNA, 301 bp, Homo sapiens
tgggacggggggcctgggagggatagcacacctgcatcacagctttttctttactatacaaccccagggcatggaaatcgttcagaccatgaacagtgaccctggcttggcagttggtatgtaagggatatgcagttcaatcacttccaaatggaggaatcctataggggcagagggtaggggaggaaacagacagggagaatgggcaaagtggcgagagagaaggcagtggcacaagctggccacatacatagcaggcatcccttcccaactttaccccatgatgggccgccagtagctt

SEQ ID NO: 416125 - DNA, 1116 bp, Homo sapiens
ttttcttttctactacatggcaggttgaaaattttccaagcttttatactctgctttccttttaaatataagttccaatatcaaaccacctcttcggaaatgcatatgagcatatgctgttagaagcagccaggtcacttcttgaatgctttgctgctttgaaatttcttccaccagatactctaaataatctctctcaagttcaaagtttcacagatccctagagcaggggcacaatgccaccagtctctttgctgaagcatagcaagaatgacctttactccagttcccaataagttcctcatctccctctaagacctccttggcctggacttcattgtccatatctcactatcagtattttggtcaaagccattcaacaagtctctaggaagttccaaactttcccttatcttcttgtcttcttctgagccttccaaactgttccaacctctgcccatccaaagctgcttccacattttcaggtatcttttgtagcaatgccccacttctctgataccaatttcctatattagtccattctcacactgctataaagaactatctgagactgggtaatctatgaagaaaagaggtttaattgactcacaattctgcaggctgtacaggaggcatggctggggaggcctcagaaaacttacaatcatggcagaaggtgaaggggaagccagcacatcttcatatgatggcaggaactttatatgttatagaagttagccccaagaatgaaatcgtgtcctttgccaaaacatggatggagctagaggcctttatcctaagtgagttaacgcaggaacagaaagccaaatagtgcatgttctcactgataagtgggagctaaactatgggttcacaaaggcatgcagagtggtactgtggacattggagactcagaatgggggaggctaggagggaggtaagggatgaaaaagtacctgttgggtacaatgtacactacttgggtgacgatgggtccactaaaatcccagatttaaccactgtacaattcatccatgtaaccaaaacccacctgtaccccaatgctatgaaaataaataaaaccaaattagctctgtttctgttagatgagatgca

SEQ ID NO: 416126 - DNA, 2789 bp, Homo sapiens
  misc_feature (44)..(44): n is a, c, g, or t
  misc_feature (384)..(384): n is a, c, g, or t
  misc_feature (392)..(392): n is a, c, g, or t
  misc_feature (491)..(491): n is a, c, g, or t
  misc_feature (1017)..(1017): n is a, c, g, or t
  misc_feature (1539)..(1539): n is a, c, g, or t
  misc_feature (1838)..(1838): n is a, c, g, or t
  misc_feature (1843)..(1843): n is a, c, g, or t
  misc_feature (1898)..(1898): n is a, c, g, or t
  misc_feature (1970)..(1970): n is a, c, g, or t
  misc_feature (2492)..(2492): n is a, c, g, or t
  misc_feature (2716)..(2716): n is a, c, g, or t
gagacaggctttcactctgtcaccaggctggagtgcagtagccngatctcagctcactgcaacctctgcctcccgggctcaagcgattctcccgcctcagccttccgagcagctgggactacgggcgcccgccaccacgcctggctaattttttctatttttagtggagacggggttttgtcatgttgcccaggctggtctcaaactcctgagctcaggcaattcgcctgcctcggcctcccaaagtgctgagatttcagacgtgagccaccatgccaacaatcacatacattaaagttagatactccttggtgttttgagacatgcattttaaatttaagaacttaaaaaaatttaaagtattaataaaattttcatttaagnaagtagtntcccagattgatagactgatagactgtggtgtacaaaacacaaaaacaaaagggcttttttatatcgggagagagtgatgtaaatactcgcagcactcntctgtctcacagatgacagaagacacggatttattcagtttcattagatacatgtatctgagagagtggaactatgacaaaagcattttgcattttatattttcactgtgattctgagtcagttggagacattctgaagcattttattgcctggacttggcaaacagatggtgagatcataagttggggatttctcatcagtaagcagaacaaaccttgttgttcaggtccttctgggcttcaaatgacaggctctggtcattctccagggtgagcatgttgggtccaatgcagatggccagattgctggagtccatcctgttcacctcagagttcttgctgatgaggtgcagcacatagaccaagtgcttgagtagcaggaggttgggccgggggagcttatctgcaaccctggaataaagtgaagggatgttagttttcaaaaaggctaatggtcttcagtgtagcaagctgagagtttctgccgaaaccagacttcctttaaaatgaggaaggtgcattttcncaagtaatattgtgaaatgctcattcagacacttccagtggcaactgacacagagtgagactggttaaccacaaggtcttgaggagctaagaaactggcctttgtaattgggacaccaataacacagccctttattatttatacagagcttaaattatgaagccaatctgcattaaacaccatagtttgcctttatgtttagaaaatagttttgttgagtaatcatttagtcatgtagaatttctttctgtttctaacacgactagactggttttcttgccttaaaacaaagacggaaacaaaactataattaccaaacgaagatgacacatttttacaacattctgagaaagctttatgaagactaaatcagtttctaagggcatgttcatataaggcggcacttaaatcgcaacattgtttctaatgataagaaattagacttcttaaagtctcactttttcaaaaacgaaatggtgattattttcatttctcagaagaaggaattgttataaaaatgcnttatgtctaggtagaaactcattgtgataatcttagaattttcattttgggacagacattttaatgtcttcaattctatacatatgtcattgaaagtatttagccatgtgggacaattataacatttagataaactttcataggatgtgacaaccatgctgacatttcaaagcttgggttttagaattctctagtcactaacagatcacactttccattgcatatgttattatttttactctcactggaatgtgttattatatagttttcatttgggttaattataagaagatgaaatntgctntgaagttttatgaacaaaacaactgccccccaccacactgtctggctgcatcctnagggatgttttatgggagaactgttgccttgcatgacaccagtcagtgtagcttaaagataatcccgaattnctacactttgctggtgagcctgtgttaaagttctcaggtctgattttatctcatacctttttgaacatcttacattttcagacttccctacctcttgggatttgtgaggattgaagttcgctttctactttttgaagaaatatttcatttggctaaaattaaaattcaaaagtccagggcaccctctggtttttgttctgggagtggacgagcaattccactcggattccctaaacatcacaattctcatggaacagggatcatgaagcatttagaaagctgtgtaaagaatcaaaagacggaggtgatgtggcctggcaatgaccgatgactttgatgacttactgtttcagggcctcgattctgtcctcctcgtcctgcatctccagagcacccatccactcctcaaagaggtcgcttgaaagtagcttccgggggatacttctgaggaagtcctgggggatgagagtgggctgttggcctattggtactgtatgatgtcccatgtccttgttttcaccnggttttcgttccatcgcagggtgctctatgcttagcccatcatagattgtggcccttcattcctgcatttgatgaatccagggaaccctctctccaacacccttggcctctctgcaactttctaacatcaggcagagtcagaggcaccatccccaggtgggtgtgttctgaggggccactggattttgacgtatggattctgccacggaacaatcaaattgccngtacttggcaaagttttgggagagcagaatgcatcactttctgttggaatctgaggtcacagaaacagaggtg

SEQ ID NO: 416127 - DNA, 1682 bp, Homo sapiens
tctgacgttacgaaaatatcacccctgtccctcctggtcatctcactccctcctggcctgtacagtttccactgagaagtctgctgccagatggattggagctccttcatggggagtgaagccagcctgcttctatgctgccattttggaactcctgaaaaatattttcactggattagaattagagcttgatagttctttaaggacttgaaaaatattgtgccactttcttgtctccatgttttaggctgtacaggaggcatggctggggaggcctcagaaaacttacaatcatggcagaaggtgaaggggaagccagcacatcttcatatgatggcaggaactttatatgttatagaagttagccccaagaatgaaatcgtgtcctttgccaaaacatggatggagctagaggcctttatcctaaaagctacaaatcttcagcattctccactctgtgaagtcagaggaatggcgggaccatagctctgagctcattggcaaatacaactaatttcaatttctggaatggaagcagtcagatattcttctgactgcacgcgtatgtgggagtgccatgttgaagagtggaaaatatggaagatcagtccctacaaacttaataggagaatgacattcagatttcccgagtattttgcatgtccaactgaaaactgaagtaggtttatgagagaatgcacgcctacctggatgggtctggggagtgtgtcactgtcaccgcagataattgacaagggctgatcaaatagcgatgctttcaagtctgtctccaaagccccagaaaaatctgatgcaggggagagccttctcatgagaaagggccaggacagcaccttctttctcttcttaacttctacagccaagaaaacaaggcaacgagaaaaattagactacagtgttaagaagcaaagatccaggtaagaaaatgggtatcgttggccgcataatgtggtcaatagtatgcgatgtgagaaaaataattttgaaaacttgagaaagcaaagggcgtgaatcttaatctagaaaaaccaaccgataaacaaccacactgttaccagggcaaccagttccctaaacagcaacaccagagttcctcaaggcctccacctttcctgttttcactctttccagctgtttgctacagaaaattagcaaaacctaactgtgctgatcataaacaaccatcttaacctactggcctgaataactatagaggaaatttctgatatgaaatagattattttgatttcctcctttaactggcgaagaaaacgaaacttaaaaggtgaggaagtgacttgctgaatatcttttcgaaggcacatagcagggctggctccaaccctttgcagccacgcaggcactaaacagccactagagggagctaacaccatttttccttccaggtgactggtcaccttgggttttccaggttgctgctttaggacagaggcaaatacgaatcgctgcgggaagccttgaacctagatctggcaactgggaattatcagcaaaacgttatcaagatattctgtccttctgaaatccacaagatgtgtgtgcaatggatattgcaatctcaaacatttccttctttcttttcttttccttccttccttccttctcctttcttactaattataaaggctatattttctaaa

SEQ ID NO: 416128 - DNA, 557 bp, Homo sapiens
tctgacgttacgaaaatatcacccctgtccctcctggtcatctcactccctcctggcctgtacagtttccactgagaagtctgctgccagatggattggagctccttcatggggagtgaagccagcctgcttctatgctgccattttggaactcctgaaaaatattttcactggattagaattagagcttgatagttctttaaggacttgaaaaatattgtgccactttcttgtctccatgttttaggaatgactggaaattttaagaagttactatctctgctatggggatggatagtcagacagcaatgttcacaaattactcttgaaacttgatgcaaacaacctgtttaaaaactgatgtaacgagaggaatttcatggatgcaaatgaacacctgtgaaaattcttcggcaagaactgtttcatttagcaacaccaggttagcagtttgagagaggatcttttttgggtctacatgcccaaatttacagactgttttgctacttgaatctgccataatgtttgttgaataaataatctctatctttgaggga

SEQ ID NO: 416129 - DNA, 863 bp, Homo sapiens
tccttggcccggctttggaatgtggctttgcagggctggtgttggcgccattctcgcaggcccacgtgctcctgctcttccagggtgtcctcggctgtttctcctgccgcggcgcagcagcgctcccaggctgcccccgcgataacacgcccctggcagccaggctcccagctctgttacgtgcccgggcggggaagagcttcctggtgtctcccggctcctgcccttctcccgccccaggggcgggctgccgccgccctctgcagctgagtcagtgcagttcctcacctaccttctctgctcaccgctgtgtgctagcaatcggaggacccttggcacacggagcgacaggggcctcccccacagacacctcattttgggaaagaagtgagcaatttattgagtcttaaaaaatacaaaggcatagttccccttaatctatcaggcttccagctctaaagaatgtctctagtattgcggggtggggctgcgcttaaaaacgcagacgctttggttttagtaccagcaacgttaaaaatcttctatcttgtatgagtgaatgtgtatcccttgtgatcagttatttgcatttgcagttacaccttcattcagctaattgctgtcttgatttgaatccaggttctagaatgtactagctccgaaacctcaggcaagttaaatgtttttgtgcttcattttcctaatccacaaagtggcaatagaagaatttatctctttaggttgctgaggataaacgttatattagagtggctggaatgcagctttataagaatgacggcggcttgaaggtgaccaacaagggcttttagaccacctagggtgaccgcaagcgaaaccccctt

SEQ ID NO: 416130 - DNA, 979 bp, Homo sapiens
tccttggcccggctttggaatgtggctttgcagggctggtgttggcgccattctcgcaggcccacgtgctcctgctcttccagggtgtcctcggctgtttctcctgccgcggcgcagcagcgctcccaggctgcccccgcgataacacgcccctggcagccaggctcccagctctgttacgtgcccgggcggggaagagcttcctggtgtctcccggctcctgcccttctcccgccccaggggcgggctgccgccgccctctgcagctgagtcagtgcagttcctcacctaccttctctgctcaccgctgtgtgctagcaatcggaggacccttggcacacggagcgacaggggcctcccccacagacacctcattttgggaaagaagctgtacaggaggcatggctggggaggcctcagaaaacttacaatcatggcagaaggtgaaggggaagccagcacatcttcatatgatggcaggaactttatatgttatagaagttagccccaagaatgaaatcgtgtcctttgccaaaacatggatggagctagaggcctttatcctaagtgagttaacgcaggaacagaaagccaaatagtgcatgttctcactgataagtgggagctaaactatgggttcacaaaggcatgcagagtggtactgtggacattggagactcagaatgggggaggctaggagggaggtaagggatgaaaaagtacctgttgggtacaatgtacactacttgggtgacgatgggtccactaaaatccgatttatcccgggcaattctccggttacaaaacccctggtccccagcgttaaatatttacccattgttgttcgttaaaaagcaaattccccgcgattgtacgtcaagtgagggaacccgacaaattatcagtaataggcaatatatcgcgtgctcaaacgatgacgacccactatatatcataagatagtatcacacaccgagtg

SEQ ID NO: 416131 - DNA, 2192 bp, Homo sapiens
ttttcttttctactacatggcaggttgaaaattttccaagcttttatactctgctttccttttaaatataagttccaatatcaaaccacctcttcggaaatgcatatgagcatatgctgttagaagcagccaggtcacttcttgaatgctttgctgctttgaaatttcttccaccagatactctaaataatctctctcaagttcaaagtttcacagatccctagagcaggggcacaatgccaccagtctctttgctgaagcatagcaagaatgacctttactccagttcccaataagttcctcatctccctctaagacctccttggcctggacttcattgtccatatctcactatcagtattttggtcaaagccattcaacaagtctctaggaagttccaaactttcccttatcttcttgtcttcttctgagccttccaaactgttccaacctctgcccatccaaagctgcttccacattttcaggtatcttttgtagcaatgccccacttctctgataccaatttcctatattagtccattctcacactgctataaagaactatctgagactgggtaatctatgaagaaaagaggtttaattgactcacaattctgcaggctgtacaggaggcatggctggggaggcctcagaaaacttacaatcatggcagaaggtgaaggggaagccagcacatcttcatatgatggcaggaactttatatgttatagaagttagccccaagaatgaaatcgtgtcctttgccaaaacatggatggagctagaggcctttatcctaaggtgctctatgcttagcccatcatagattgtggcccttcattcctgcatttgatgaatccagggaaccctctctccaacacccttggcctctctgcaactttctaacatcaggcagagtcagaggcaccatccccagaagctacaaatcttcagcattctccactctgtgaagtcagaggaatggcgggaccatagctctgagctcattggcaaatacaactaatttcaatttctggaatggaagcagtcagatattcttctgactgcacgcgtatgtgggagtgccatgttgaagagtggaaaatatggaagatcagtccctacaaacttaataggagaatgacattcagatttcccgagtattttgcatgtccaactgaaaactgaagtaggtttatgagagaatgcacgcctacctggatgggtctggggagtgtgtcactgtcaccgcagataattgacaagggctgatcaaatagcgatgctttcaagtctgtctccaaagccccagaaaaatctgatgcaggggagagccttctcatgagaaagggccaggacagcaccttctttctcttcttaacttctacagccaagaaaacaaggcaacgagaaaaattagactacagtgttaagaagcaaagatccaggtaagaaaatgggtatcgttggccgcataatgtggtcaatagtatgcgatgtgagaaaaataattttgaaaacttgagaaagcaaagggcgtgaatcttaatctagaaaaaccaaccgataaacaaccacactgttaccagggcaaccagttccctaaacagcaacaccagagttcctcaaggcctccacctttcctgttttcactctttccagctgtttgctacagaaaattagcaaaacctaactgtgctgatcataaacaaccatcttaacctactggcctgaataactatagaggaaatttctgatatgaaatagattattttgatttcctcctttaactggcgaagaaaacgaaacttaaaaggtgaggaagtgacttgctgaatatcttttcgaaggcacatagcagggctggctccaaccctttgcagccacgcaggcactaaacagccactagagggagctaacaccatttttccttccaggtgactggtcaccttgggttttccaggttgctgctttaggacagaggcaaatacgaatcgctgcgggaagccttgaacctagatctggcaactgggaattatcagcaaaacgttatcaagatattctgtccttctgaaatccacaagatgtgtgtgcaatggatattgcaatctcaaacatttccttctttcttttcttttccttccttccttccttctcctttcttactaattataaaggctatattttctaaa

SEQ ID NO: 416132 - DNA, 2165 bp, Homo sapiens
ttttcttttctactacatggcaggttgaaaattttccaagcttttatactctgctttccttttaaatataagttccaatatcaaaccacctcttcggaaatgcatatgagcatatgctgttagaagcagccaggtcacttcttgaatgctttgctgctttgaaatttcttccaccagatactctaaataatctctctcaagttcaaagtttcacagatccctagagcaggggcacaatgccaccagtctctttgctgaagcatagcaagaatgacctttactccagttcccaataagttcctcatctccctctaagacctccttggcctggacttcattgtccatatctcactatcagtattttggtcaaagccattcaacaagtctctaggaagttccaaactttcccttatcttcttgtcttcttctgagccttccaaactgttccaacctctgcccatccaaagctgcttccacattttcaggtatcttttgtagcaatgccccacttctctgataccaatttcctatattagtccattctcacactgctataaagaactatctgagactgggtaatctatgaagaaaagaggtttaattgactcacaattctgcaggctgtacaggaggcatggctggggaggcctcagaaaacttacaatcatggcagaaggtgaaggggaagccagcacatcttcatatgatggcagggcctcgattctgtcctcctcgtcctgcatctccagagcacccatccactcctcaaagagggtgctctatgcttagcccatcatagattgtggcccttcattcctgcatttgatgaatccagggaaccctctctccaacacccttggcctctctgcaactttctaacatcaggcagagtcagaggcaccatccccagaagctacaaatcttcagcattctccactctgtgaagtcagaggaatggcgggaccatagctctgagctcattggcaaatacaactaatttcaatttctggaatggaagcagtcagatattcttctgactgcacgcgtatgtgggagtgccatgttgaagagtggaaaatatggaagatcagtccctacaaacttaataggagaatgacattcagatttcccgagtattttgcatgtccaactgaaaactgaagtaggtttatgagagaatgcacgcctacctggatgggtctggggagtgtgtcactgtcaccgcagataattgacaagggctgatcaaatagcgatgctttcaagtctgtctccaaagccccagaaaaatctgatgcaggggagagccttctcatgagaaagggccaggacagcaccttctttctcttcttaacttctacagccaagaaaacaaggcaacgagaaaaattagactacagtgttaagaagcaaagatccaggtaagaaaatgggtatcgttggccgcataatgtggtcaatagtatgcgatgtgagaaaaataattttgaaaacttgagaaagcaaagggcgtgaatcttaatctagaaaaaccaaccgataaacaaccacactgttaccagggcaaccagttccctaaacagcaacaccagagttcctcaaggcctccacctttcctgttttcactctttccagctgtttgctacagaaaattagcaaaacctaactgtgctgatcataaacaaccatcttaacctactggcctgaataactatagaggaaatttctgatatgaaatagattattttgatttcctcctttaactggcgaagaaaacgaaacttaaaaggtgaggaagtgacttgctgaatatcttttcgaaggcacatagcagggctggctccaaccctttgcagccacgcaggcactaaacagccactagagggagctaacaccatttttccttccaggtgactggtcaccttgggttttccaggttgctgctttaggacagaggcaaatacgaatcgctgcgggaagccttgaacctagatctggcaactgggaattatcagcaaaacgttatcaagatattctgtccttctgaaatccacaagatgtgtgtgcaatggatattgcaatctcaaacatttccttctttcttttcttttccttccttccttccttctcctttcttactaattataaaggctatattttctaaa

SEQ ID NO: 416133 - DNA, 696 bp, Homo sapiens
tctgacgttacgaaaatatcacccctgtccctcctggtcatctcactccctcctggcctgtacagtttccactgagaagtctgctgccagatggattggagctccttcatggggagtgaagccagcctgcttctatgctgccattttggaactcctgaaaaatattttcactggattagaattagagcttgatagttctttaaggacttgaaaaatattgtgccactttcttgtctccatgttttaggtaagaaatccactgccatttaaatcattgttctcctttagctaacgtgtaatttctttctggctaatttcaaaatgtttttttttttaattttcaaaagtttgatcttgatttgtctcgggtagatttctttgggtttatcctcttggggggtcacttggcttcttggatctgtaggccttttgccaaatttgtggaattttcaagcacgatttcttcaaatatttttccatctcatagttttcctcctctccttctaggattccaacaacatgaatgtaaatctttgtgattgttcttcagctctctcagccttttttttttttttttggtctattttctctctgttcagctggataacttccgttcttcattgattcttcttcaaatttactgactgtttcctatgccatttccaatgtactactgagtccatccagtgagtttat

SEQ ID NO: 416134 - DNA, 461 bp, Homo sapiens
agactgtttaaaaaaaattgcgtggggaagacagctgagacaaggatattaaataagaagacattttataagcctggccatttgaagatataggcttagaccagtagattgtaatttaaattttacttttttattttccaactctttaatctctaggaatgactggaaattttaagaagttactatctctgctatggggatggatagtcagacagcaatgttcacaaattactcttgaaacttgatgcaaacaacctgtttaaaaactgatgtaacgagaggaatttcatggatgcaaatgaacacctgtgaaaattcttcggcaagaactgtttcatttagcaacaccaggttagcagtttgagagaggatcttttttgggtctacatgcccaaatttacagactgttttgctacttgaatctgccataatgtttgttgaataaataatctctatctttg

SEQ ID NO: 416135 - DNA, 2157 bp, Homo sapiens
  misc_feature (712)..(712): n is a, c, g, or t
tggtcttgcacaagacttcagatagggccacaattatgggagctggaaagaatctggctcccttaccaccagtgggtcctttcccctgcctcacaggcatgcacatgctctctctgtaggtaaaaagtacagcatctggcttagcttcagatacttccagttttctaaagaccagtgctttgaatgctttttgttacttaggtaagctccatcaactgtaaaataagtattggtggatttatggatttcaaaaggcagaacaactaacatactgaattcctgattccagtctatgttctactggagttgtcagaatgccaaatgctaacgcaaacagtgcttttttcttctaaaaggaggaaagagggtgggaatgagaggatgaattcctatcagtttaggaggatgttgccattgggagttcttgcgtaatttgagattgtaaaacctagaaggtttcttgtctttgttatgtaggaggaaacaggaattcttggtttaacttaggctgggcctgggaggagtttgctgtttacaatgagatctaaccccttattggagatgattttaaaaatctctggccacctctatggccatctttggcaagatctgcatttggaatttaatagcaaccacatttattaaagcaaagaaatttccctcatttgttgtcccatgtagtccagtagtatgatatgcggggacatttttngccttttgtccctcccgggtatccctgggtttcctcagaatccttcacaatcatccttgcaagaattacagcataatgcggctgcgcagtcagcattgttacagcaggtccattcagcttcggctctggaaagctatccagctcagcctgatgggtttcctagttatccttcagcgccaggaacaccattttctttgcaaccaagcctgtcccagagtgggtggcagtgaatacttttaacttttattctccttcagagcaacatcagaattgcctgagaactgcaatgaacaatctgacaaatgtgaagctggccaaaagtcggaaaatgagaatgagggtaatcctggagaaattgtgacaacaatttgaaaattgtggttgcattttaaagtgtgaacactcccctatgtaaatatgctgacaataaattgtatggagaatggtatttaaaaagtgtttggagacttttcacctgtcctataaaattttgaattgtgtatgtgatctacatagaaagaatattaaagagtaggttgaactctttatagccgaatacagccttaaatatgcttgtatagcatccactggcagaagtaatagttgtgcctcagacttgggggttgcatgtggccctgggggagttactacccttggtatgcatgagcggttcctattagcatcagtgggaactcagtactctgtatgtatccacaaaagggaacttgagacccacagttattcttaatttctgatattaacaaccgtacatactgctgaatttaactcaaaatatttcaggtaagtgaaagtggtgcttaatgtagactatagaatgactttcaggtgttttcaactgaaagtatatatccagaactgcatccttatagaaatacaagtaagacttaggataatttgccttcaaaacagttttcctaatctcagcagtatccagtgagtgaagaacacttgactgactcttgggccacctctgttacttactgtactatggaagctcctggtgaatgtttacaattatgggatgtagtatttctatttgtactttaagtcaaatgcttatatgaaatatgtgacaacaaatagagaagactggctctgttagtaattatgcagtatgtactctatttaaggatctgtggtagtataacatgagtgaatgtcattaattttgaagtaataactgccacatgtgggaagtaggggagtaaggagaatgaattccaatctgtgattaaaagtgtaaactatagactctactgtagtacatttcaggatctagaagttttacttttataaagatggtgtccggaagatgttgctaatgtattttacttcaacatagggaacaaactttttaagtatattaataaacctgtatggttagtttttaacagttttttaaaataaactatggatatgacaaa

SEQ ID NO: 416136 - DNA, 4579 bp, Homo sapiens
cctgctgccggggccgaggtatccaggagtcgggcggagcggctggggatgagcgcgagccggaccatgcgtccgggttcgcggcggtgagggtcgcggccggcggccgaggcgcaggtgcgggtcgagagaccggcgcctccctccccgccgcccgtggactctgagcgcaggtgtttctactctgccggccgctccacctgggaaagcgccttcaagagctacctctggcggcacctggccctcagctgcagggaaaccgcactcaaacctgccgccgagcccgggtttttctgcaaaactcagaggacctggctcttgcccgaggtgccctgaaccattgtgtgaataagctggggaagcctgactggagtgttttttctttttaataaaaagagtttttctgaatctcaatttttagaaattttttttgcgaagtttgcaatactctctacctcttcgcatcctctcttgctcgtggagtctttttcctcctcagctataaatattttttactatcggcggagcagaccagggatgaacgtcttttaattgcaagtataactgttaaaaccacgtcgggatagtagtcaagatggataaaaagtcctttgaaatggtgctggatgaaattagaaaggtggttgatttgctgagatatttttcctgggccgagccccagttgaaggcaatgaaagcattacagcataaaatggtggctgtccagccaacagaagtggtcaatatactcaactgtttcactttcagtaaagacaaactagttgctcttgaactgttagcctcgaacattattgatgcacagaattctcgtcctattgaagatttattcagggtaaatatgtctgagaagaaacggtgcaagagaatacttgaacaggctttcaaggggggctgcaaagctcctcatgctatgatatcttcttgtggaacaatcccaggaaatccatatcccaaaggaagacctagccgcataaatggaattttcccaggaactcctttgaaaaaagatggtgaagaatgtactaacgaaggcaaaggaatagctgcacgaattcttgggccatccaaaccacctccttcaacatataatccacataaacctgttccttatccgatacctccatgccgaccacatgcaactattgcaccaagtgcttataacaatgcaggtctggtaccattagcgaatgtcatagctccacctccacctccatatactcctaatcctgtaggaacagagaatgaagacctttcgaatccgtcaaaacctatacagaatcaaacattttccaccccagcaagtcaactcttttctcctcatggttctaatccttcaacacctgctgcaactcctgttcctactgcatccccagtcaaggcaattaatcatccatcagcatcagcagctgccaccgtttctggaatgaacctgctgaatactgtccttcctgtgttcccagggcaggtctcctcagccgttcacacacctcagccatcaataccaaacccaacagttatcagaaccccttcattgcccactgcacctgttacatccatccacagtacaaccaccactcctgttccttccattttttctggcctagtgtcactgccaggtccttctgccactcctaccgcagccactcctaccccaggacctacaccacggtccactcttggttccagtgaagcatttgcttctacttctgcacctttcactagcctccccttttccaccagctcttctgctgcttctaccagcaacccaaattctgcttcattgtcatcagtttttgcagggctccctttgcccttaccaccaacatcccaaggcctatccaacccgactcctgtaattgctggtggctctactcccagcgttgccggtccacttggtgtgaacagtcctcttttgtctgcgttaaaaggttttctgacatccaatgacaccaatttaatcaactcctctgctttatcctctgctgtcacaagtgggctggcttcactatcttctcttactcttcagaactcggactcttctgcttcagcccctaacaagtgctatgccccatcagccatccctaccccacagaggacttccactccagggttggccctgttcccaggcctgccgtctcccgtggctaactcaacttccactcccctgacattgcctgtacagtctcctttagccactgctgcatcagcttccacgtcagcgccagttagctgtggctcctcagcctcccttttgcgtggcccccacccaggtacctcagatctgcatatttcatctacccctgctgcaacaactcttcctgttatgatcaaaactgagcccacaagtcctactccctcggccttcaaaggtccatctcattctgggaatccctctcatggcactttaggtttgtcagggacattgggccgtgcatatacttcaacatccgtgcccatcagtttatctgcttgccttaatcctgcattgtcaggtctctccagcttgagtactcctttaaatggttcaaatcctctttcctctatttcccttccaccacatggttcctccactcccattgcaccagtattcactgctcttccttcttttacttctttgaccaacaattttcctttaactggcaacccatctcttaatccgtcagtatctctcccagggtcattaatagccacctcatctaccgctgccacctccacatctctccctcatcctagctcaacggcagctgttctctcagggctttctgcttcagcaccagtctcagcagcacctttccccctcaacctgtccactgctgttccctcacttttctctgttactcaaggacctctgtcatcttcaaatccctcctatccaggcttttctgtctctaataccccaagcgttacccctgctcttccctcattcccggggctgcaggcgccctctacagtcgcagctgtcacaccactacctgtggctgccacagccccatccccagctccagtcctcccaggattcgcctcagcattcagttccaatttcaactccgctcttgttgcacaagccggtttatcatctggacttcaagctgcaggcagttctgtttttccaggccttttgtccctcccgggtatccctgggtttcctcagaatccttcacaatcatccttgcaagaattacagcataatgcggctgcgcagtcagcattgttacagcaggtccattcagcttcggctctggaaagctatccagctcagcctgatgggtttcctagttatccttcagcgccaggaacaccattttctttgcaaccaagcctgtcccagagtgggtggcagtgaatacttttaacttttattctccttcagagcaacatcagaattgcctgagaactgcaatgaacaatctgacaaatgtgaagctggccaaaagtcggaaaatgagaatgagggtaatcctggagaaattgtgacaacaatttgaaaattgtggttgcattttaaagtgtgaacactcccctatgtaaatatgctgacaataaattgtatggagaatggtatttaaaaagtgtttggagacttttcacctgtcctataaaattttgaattgtgtatgtgatctacatagaaagaatattaaagagtaggttgaactctttatagccgaatacagccttaaatatgcttgtatagcatccactggcagaagtaatagttgtgcctcagacttgggggttgcatgtggccctgggggagttactacccttggtatgcatgagcggttcctattagcatcagtgggaactcagtactctgtatgtatccacaaaagggaacttgagacccacagttattcttaatttctgatattaacaaccgtacatactgctgaatttaactcaaaatatttcaggtaagtgaaagtggtgcttaatgtagactatagaatgactttcaggtgttttcaactgaaagtatatatccagaactgcatccttatagaaatacaagtaagacttaggataatttgccttcaaaacagttttcctaatctcagcagtatccagtgagtgaagaacacttgactgactcttgggccacctctgttacttactgtactatggaagctcctggtgaatgtttacaattatgggatgtagtatttctatttgtactttaagtcaaatgcttatatgaaatatgtgacaacaaatagagaagactggctctgttagtaattatgcagtatgtactctatttaaggatctgtggtagtataacatgagtgaatgtcattaattttgaagtaataactgccacatgtgggaagtaggggagtaaggagaatgaattccaatctgtgattaaaagtgtaaactatagactctactgtagtacatttcaggatctagaagttttacttttataaagatggtgtccggaagatgttgctaatgtattttacttcaacatagggaacaaactttttaagtatattaataaacctgtatggttagtttttaacagttttttaaaataaactatggatatgacaaa

SEQ ID NO: 416137 - DNA, 4645 bp, Homo sapiens
cctgctgccggggccgaggtatccaggagtcgggcggagcggctggggatgagcgcgagccggaccatgcgtccgggttcgcggcggtgagggtcgcggccggcggccgaggcgcaggtgcgggtcgagagaccggcgcctccctccccgccgcccgtggactctgagcgcaggtgtttctactctgccggccgctccacctgggaaagcgccttcaagagctacctctggcggcacctggccctcagctgcagggaaaccgcactcaaacctgccgccgagcccgggtttttctgcaaaactcagaggacctggctcttgcccgaggtgccctgaaccattgtgtgaataagctggggaagcctgactggagtgttttttctttttaataaaaagagtttttctgaatctcaatttttagaaattttttttgcgaagtttgcaatactctctacctcttcgcatcctctcttgctcgtggagtctttttcctcctcagctataaatattttttactatcggcggagcagaccagggatgaacgtcttttaattgcaagtataactgttaaaaccacgtcgggatagtagtcaagatggataaaaagtcctttgaaatggtgctggatgaaattagaaaggctgttttgacagaatacaaattaaaagcaattgaatatgtgcatggatacttttctagtgaacaggtggttgatttgctgagatatttttcctgggccgagccccagttgaaggcaatgaaagcattacagcataaaatggtggctgtccagccaacagaagtggtcaatatactcaactgtttcactttcagtaaagacaaactagttgctcttgaactgttagcctcgaacattattgatgcacagaattctcgtcctattgaagatttattcagggtaaatatgtctgagaagaaacggtgcaagagaatacttgaacaggctttcaaggggggctgcaaagctcctcatgctatgatatcttcttgtggaacaatcccaggaaatccatatcccaaaggaagacctagccgcataaatggaattttcccaggaactcctttgaaaaaagatggtgaagaatgtactaacgaaggcaaaggaatagctgcacgaattcttgggccatccaaaccacctccttcaacatataatccacataaacctgttccttatccgatacctccatgccgaccacatgcaactattgcaccaagtgcttataacaatgcaggtctggtaccattagcgaatgtcatagctccacctccacctccatatactcctaatcctgtaggaacagagaatgaagacctttcgaatccgtcaaaacctatacagaatcaaacattttccaccccagcaagtcaactcttttctcctcatggttctaatccttcaacacctgctgcaactcctgttcctactgcatccccagtcaaggcaattaatcatccatcagcatcagcagctgccaccgtttctggaatgaacctgctgaatactgtccttcctgtgttcccagggcaggtctcctcagccgttcacacacctcagccatcaataccaaacccaacagttatcagaaccccttcattgcccactgcacctgttacatccatccacagtacaaccaccactcctgttccttccattttttctggcctagtgtcactgccaggtccttctgccactcctaccgcagccactcctaccccaggacctacaccacggtccactcttggttccagtgaagcatttgcttctacttctgcacctttcactagcctccccttttccaccagctcttctgctgcttctaccagcaacccaaattctgcttcattgtcatcagtttttgcagggctccctttgcccttaccaccaacatcccaaggcctatccaacccgactcctgtaattgctggtggctctactcccagcgttgccggtccacttggtgtgaacagtcctcttttgtctgcgttaaaaggttttctgacatccaatgacaccaatttaatcaactcctctgctttatcctctgctgtcacaagtgggctggcttcactatcttctcttactcttcagaactcggactcttctgcttcagcccctaacaagtgctatgccccatcagccatccctaccccacagaggacttccactccagggttggccctgttcccaggcctgccgtctcccgtggctaactcaacttccactcccctgacattgcctgtacagtctcctttagccactgctgcatcagcttccacgtcagcgccagttagctgtggctcctcagcctcccttttgcgtggcccccacccaggtacctcagatctgcatatttcatctacccctgctgcaacaactcttcctgttatgatcaaaactgagcccacaagtcctactccctcggccttcaaaggtccatctcattctgggaatccctctcatggcactttaggtttgtcagggacattgggccgtgcatatacttcaacatccgtgcccatcagtttatctgcttgccttaatcctgcattgtcaggtctctccagcttgagtactcctttaaatggttcaaatcctctttcctctatttcccttccaccacatggttcctccactcccattgcaccagtattcactgctcttccttcttttacttctttgaccaacaattttcctttaactggcaacccatctcttaatccgtcagtatctctcccagggtcattaatagccacctcatctaccgctgccacctccacatctctccctcatcctagctcaacggcagctgttctctcagggctttctgcttcagcaccagtctcagcagcacctttccccctcaacctgtccactgctgttccctcacttttctctgttactcaaggacctctgtcatcttcaaatccctcctatccaggcttttctgtctctaataccccaagcgttacccctgctcttccctcattcccggggctgcaggcgccctctacagtcgcagctgtcacaccactacctgtggctgccacagccccatccccagctccagtcctcccaggattcgcctcagcattcagttccaatttcaactccgctcttgttgcacaagccggtttatcatctggacttcaagctgcaggcagttctgtttttccaggccttttgtccctcccgggtatccctgggtttcctcagaatccttcacaatcatccttgcaagaattacagcataatgcggctgcgcagtcagcattgttacagcaggtccattcagcttcggctctggaaagctatccagctcagcctgatgggtttcctagttatccttcagcgccaggaacaccattttctttgcaaccaagcctgtcccagagtgggtggcagtgaatacttttaacttttattctccttcagagcaacatcagaattgcctgagaactgcaatgaacaatctgacaaatgtgaagctggccaaaagtcggaaaatgagaatgagggtaatcctggagaaattgtgacaacaatttgaaaattgtggttgcattttaaagtgtgaacactcccctatgtaaatatgctgacaataaattgtatggagaatggtatttaaaaagtgtttggagacttttcacctgtcctataaaattttgaattgtgtatgtgatctacatagaaagaatattaaagagtaggttgaactctttatagccgaatacagccttaaatatgcttgtatagcatccactggcagaagtaatagttgtgcctcagacttgggggttgcatgtggccctgggggagttactacccttggtatgcatgagcggttcctattagcatcagtgggaactcagtactctgtatgtatccacaaaagggaacttgagacccacagttattcttaatttctgatattaacaaccgtacatactgctgaatttaactcaaaatatttcaggtaagtgaaagtggtgcttaatgtagactatagaatgactttcaggtgttttcaactgaaagtatatatccagaactgcatccttatagaaatacaagtaagacttaggataatttgccttcaaaacagttttcctaatctcagcagtatccagtgagtgaagaacacttgactgactcttgggccacctctgttacttactgtactatggaagctcctggtgaatgtttacaattatgggatgtagtatttctatttgtactttaagtcaaatgcttatatgaaatatgtgacaacaaatagagaagactggctctgttagtaattatgcagtatgtactctatttaaggatctgtggtagtataacatgagtgaatgtcattaattttgaagtaataactgccacatgtgggaagtaggggagtaaggagaatgaattccaatctgtgattaaaagtgtaaactatagactctactgtagtacatttcaggatctagaagttttacttttataaagatggtgtccggaagatgttgctaatgtattttacttcaacatagggaacaaactttttaagtatattaataaacctgtatggttagtttttaacagttttttaaaataaactatggatatgacaaa

SEQ ID NO: 416138 - DNA, 4017 bp, Homo sapiens
tataatttcaagtactgaaatcttatagaaatgtttgcaaacatgctgtcattagagctgttagttctttgttttcaggtggttgatttgctgagatatttttcctgggccgagccccagttgaaggcaatgaaagcattacagcataaaatggtggctgtccagccaacagaagtggtcaatatactcaactgtttcactttcagtaaagacaaactagttgctcttgaactgttagcctcgaacattattgatgcacagaattctcgtcctattgaagatttattcagggtaaatatgtctgagaagaaacggtgcaagagaatacttgaacaggctttcaaggggggctgcaaagctcctcatgctatgatatcttcttgtggaacaatcccaggaaatccatatcccaaaggaagacctagccgcataaatggaattttcccaggaactcctttgaaaaaagatggtgaagaatgtactaacgaaggcaaaggaatagctgcacgaattcttgggccatccaaaccacctccttcaacatataatccacataaacctgttccttatccgatacctccatgccgaccacatgcaactattgcaccaagtgcttataacaatgcaggtctggtaccattagcgaatgtcatagctccacctccacctccatatactcctaatcctgtaggaacagagaatgaagacctttcgaatccgtcaaaacctatacagaatcaaacattttccaccccagcaagtcaactcttttctcctcatggttctaatccttcaacacctgctgcaactcctgttcctactgcatccccagtcaaggcaattaatcatccatcagcatcagcagctgccaccgtttctggaatgaacctgctgaatactgtccttcctgtgttcccagggcaggtctcctcagccgttcacacacctcagccatcaataccaaacccaacagttatcagaaccccttcattgcccactgcacctgttacatccatccacagtacaaccaccactcctgttccttccattttttctggcctagtgtcactgccaggtccttctgccactcctaccgcagccactcctaccccaggacctacaccacggtccactcttggttccagtgaagcatttgcttctacttctgcacctttcactagcctccccttttccaccagctcttctgctgcttctaccagcaacccaaattctgcttcattgtcatcagtttttgcagggctccctttgcccttaccaccaacatcccaaggcctatccaacccgactcctgtaattgctggtggctctactcccagcgttgccggtccacttggtgtgaacagtcctcttttgtctgcgttaaaaggttttctgacatccaatgacaccaatttaatcaactcctctgctttatcctctgctgtcacaagtgggctggcttcactatcttctcttactcttcagaactcggactcttctgcttcagcccctaacaagtgctatgccccatcagccatccctaccccacagaggacttccactccagggttggccctgttcccaggcctgccgtctcccgtggctaactcaacttccactcccctgacattgcctgtacagtctcctttagccactgctgcatcagcttccacgtcagcgccagttagctgtggctcctcagcctcccttttgcgtggcccccacccaggtacctcagatctgcatatttcatctacccctgctgcaacaactcttcctgttatgatcaaaactgagcccacaagtcctactccctcggccttcaaaggtccatctcattctgggaatccctctcatggcactttaggtttgtcagggacattgggccgtgcatatacttcaacatccgtgcccatcagtttatctgcttgccttaatcctgcattgtcaggtctctccagcttgagtactcctttaaatggttcaaatcctctttcctctatttcccttccaccacatggttcctccactcccattgcaccagtattcactgctcttccttcttttacttctttgaccaacaattttcctttaactggcaacccatctcttaatccgtcagtatctctcccagggtcattaatagccacctcatctaccgctgccacctccacatctctccctcatcctagctcaacggcagctgttctctcagggctttctgcttcagcaccagtctcagcagcacctttccccctcaacctgtccactgctgttccctcacttttctctgttactcaaggacctctgtcatcttcaaatccctcctatccaggcttttctgtctctaataccccaagcgttacccctgctcttccctcattcccggggctgcaggcgccctctacagtcgcagctgtcacaccactacctgtggctgccacagccccatccccagctccagtcctcccaggattcgcctcagcattcagttccaatttcaactccgctcttgttgcacaagccggtttatcatctggacttcaagctgcaggcagttctgtttttccaggccttttgtccctcccgggtatccctgggtttcctcagaatccttcacaatcatccttgcaagaattacagcataatgcggctgcgcagtcagcattgttacagcaggtccattcagcttcggctctggaaagctatccagctcagcctgatgggtttcctagttatccttcagcgccaggaacaccattttctttgcaaccaagcctgtcccagagtgggtggcagtgaatacttttaacttttattctccttcagagcaacatcagaattgcctgagaactgcaatgaacaatctgacaaatgtgaagctggccaaaagtcggaaaatgagaatgagggtaatcctggagaaattgtgacaacaatttgaaaattgtggttgcattttaaagtgtgaacactcccctatgtaaatatgctgacaataaattgtatggagaatggtatttaaaaagtgtttggagacttttcacctgtcctataaaattttgaattgtgtatgtgatctacatagaaagaatattaaagagtaggttgaactctttatagccgaatacagccttaaatatgcttgtatagcatccactggcagaagtaatagttgtgcctcagacttgggggttgcatgtggccctgggggagttactacccttggtatgcatgagcggttcctattagcatcagtgggaactcagtactctgtatgtatccacaaaagggaacttgagacccacagttattcttaatttctgatattaacaaccgtacatactgctgaatttaactcaaaatatttcaggtaagtgaaagtggtgcttaatgtagactatagaatgactttcaggtgttttcaactgaaagtatatatccagaactgcatccttatagaaatacaagtaagacttaggataatttgccttcaaaacagttttcctaatctcagcagtatccagtgagtgaagaacacttgactgactcttgggccacctctgttacttactgtactatggaagctcctggtgaatgtttacaattatgggatgtagtatttctatttgtactttaagtcaaatgcttatatgaaatatgtgacaacaaatagagaagactggctctgttagtaattatgcagtatgtactctatttaaggatctgtggtagtataacatgagtgaatgtcattaattttgaagtaataactgccacatgtgggaagtaggggagtaaggagaatgaattccaatctgtgattaaaagtgtaaactatagactctactgtagtacatttcaggatctagaagttttacttttataaagatggtgtccggaagatgttgctaatgtattttacttcaacatagggaacaaactttttaagtatattaataaacctgtatggttagtttttaacagttttttaaaataaactatggatatgacaaa

SEQ ID NO: 416139 - DNA, 4876 bp, Homo sapiens
cctgctgccggggccgaggtatccaggagtcgggcggagcggctggggatgagcgcgagccggaccatgcgtccgggttcgcggcggtgagggtcgcggccggcggccgaggcgcaggtgcgggtcgagagaccggcgcctccctccccgccgcccgtggactctgagcgcaggtgtttctactctgccggccgctccacctgggaaagcgccttcaagagctacctctggcggcacctggccctcagctgcagggaaaccgcactcaaacctgccgccgagcccgggtttttctgcaaaactcagaggacctggctcttgcccgaggtgccctgaaccattgtgtgaataagctggggaagcctgactggagtgttttttctttttaataaaaagagtttttctgaatctcaatttttagaaattttttttgcgaagtttgcaatactctctacctcttcgcatcctctcttgctcgtggagtctttttcctcctcagctataaatattttttactatcggcggagcagaccagggatgaacgtcttttaattgcaagtataactgttaaaaccacgtcgggatagtagtcaagatggataaaaagtcctttgaaatggtgctggatgaaattagaaaggtggttgatttgctgagatatttttcctgggccgagccccagttgaaggcaatgaaagcattacagcataaaatggtggctgtccagccaacagaagtggtcaatatactcaactgtttcactttcagtaaagacaaactagttgctcttgaactgttagcctcgaacattattgatgcacagaattctcgtcctattgaagatttattcagggtaaatatgtctgagaagaaacggtgcaagagaatacttgaacaggctttcaaggggggctgcaaagctcctcatgctatgatatcttcttgtggaacaatcccaggaaatccatatcccaaaggaagacctagccgcataaatggaattttcccaggaactcctttgaaaaaagatggtgaagaatgtactaacgaaggcaaaggaatagctgcacgaattcttgggccatccaaaccacctccttcaacatataatccacataaacctgttccttatccgatacctccatgccgaccacatgcaactattgcaccaagtgcttataacaatgcaggtctggtaccattagcgaatgtcatagctccacctccacctccatatactcctaatcctgtaggaacagagaatgaagacctttcgaatccgtcaaaacctatacagaatcaaacattttccaccccagcaagtcaactcttttctcctcatggttctaatccttcaacacctgctgcaactcctgttcctactgcatccccagtcaaggcaattaatcatccatcagcatcagcagctgccaccgtttctggaatgaacctgctgaatactgtccttcctgtgttcccagggcaggtctcctcagccgttcacacacctcagccatcaataccaaacccaacagttatcagaaccccttcattgcccactgcacctgttacatccatccacagtacaaccaccactcctgttccttccattttttctggcctagtgtcactgccaggtccttctgccactcctaccgcagccactcctaccccaggacctacaccacggtccactcttggttccagtgaagcatttgcttctacttctgcacctttcactagcctccccttttccaccagctcttctgctgcttctaccagcaacccaaattctgcttcattgtcatcagtttttgcagggctccctttgcccttaccaccaacatcccaaggcctatccaacccgactcctgtaattgctggtggctctactcccagcgttgccggtccacttggtgtgaacagtcctcttttgtctgcgttaaaaggttttctgacatccaatgacaccaatttaatcaactcctctgctttatcctctgctgtcacaagtgggctggcttcactatcttctcttactcttcagaactcggactcttctgcttcagcccctaacaagtgctatgccccatcagccatccctaccccacagaggacttccactccagggttggccctgttcccaggcctgccgtctcccgtggctaactcaacttccactcccctgacattgcctgtacagtctcctttagccactgctgcatcagcttccacgtcagcgccagttagctgtggctcctcagcctcccttttgcgtggcccccacccaggtacctcagatctgcatatttcatctacccctgctgcaacaactcttcctgttatgatcaaaactgagcccacaagtcctactccctcggccttcaaaggtccatctcattctgggaatccctctcatggcactttaggtttgtcagggacattgggccgtgcatatacttcaacatccgtgcccatcagtttatctgcttgccttaatcctgcattgtcaggtctctccagcttgagtactcctttaaatggttcaaatcctctttcctctatttcccttccaccacatggttcctccactcccattgcaccagtattcactgctcttccttcttttacttctttgaccaacaattttcctttaactggcaacccatctcttaatccgtcagtatctctcccagggtcattaatagccacctcatctaccgctgccacctccacatctctccctcatcctagctcaacggcagctgttctctcagggctttctgcttcagcaccagtctcagcagcacctttccccctcaacctgtccactgctgttccctcacttttctctgttactcaaggacctctgtcatcttcaaatccctcctatccaggcttttctgtctctaataccccaagcgttacccctgctcttccctcattcccggggctgcaggcgccctctacagtcgcagctgtcacaccactacctgtggctgccacagccccatccccagctccagtcctcccaggattcgcctcagcattcagttccaatttcaactccgctcttgttgcacaagccggtttatcatctggacttcaagctgcaggcagttctgtttttccaggccttttgtccctcccgggtatccctgggtttcctcagaatccttcacaatcatccttgcaagaattacagcataatgcggctgcgcagtcagcattgttacagcaggtccattcagcttcggctctggaaagctatccagctcagcctgatgggtttcctagttatccttcagcgccaggaacaccattttctttgcaaccaagcctgtcccagagtgggtggcagtgaatacttttaacttttattctccttcagagcaacatcagaattgcctgagaactgcaatgaacaatctgacaaatgtgaagctggccaaaagtcggaaaatgagaatgagggtaatcctggagaaattgtgacaacaatttgaaaattgtggttgcattttaaagtgtgaacactcccctatgtaaatatgctgacaataaattgtatggagaatggtatttaaaaagtgtttggagacttttcacctgtcctataaaattttgaattgtgtatgtgatctacatagaaagaatattaaagagtaggttgaactctttatagccgaatacagccttaaatatgcttgtatagcatccactggcagaagtaatagttgtgcctcagacttgggggttgcatgtggccctgggggagttactacccttggtatgcatgagcggttcctattagcatcagtgggaactcagtactctgtatgtatccacaaaagggaacttgagacccacagttattcttaatttctgatattaacaaccgtacatactgctgaatttaactcaaaatatttcaggtaagtgaaagtggtgcttaatgtagactatagaatgactttcaggtgttttcaactgaaagtatatatccagaactgcatccttatagaaatacaagtaagacttaggataatttgccttcaaaacagttttcctaatctcagcagtatccagtgagtgaagaacacttgactgactcttgggccacctctgttacttactgtactatggaagctcctggtgaatgtttacaattatgggatgtagtatttctatttgtactttaagtcaaatgcttatatgaaatatgtgacaacaaatagagaagactggctctgttagtaattatgcagtatgtactctatttaaggatctgtggtagtataacatgagtgaatgtcattaattttgaagtaataactgccacatgtgggaagtaggggagtaaggagaatgaattccaatctgtgattaaaagtgtaaactatagactctactgtagtacatttcaggatctagaagttttacttttataaagatggtgtccggaagatgttgctaatgtattttacttcaacatagggaacaaactttttaagtatattaataaacctgtatggttagtttttaacagttttttaaaataaactatggatatgacaaatgacaaatattctgtgttttactaagtgcttggataggctttctaattttgtatacgtgctagagttaattattgaacatttttatccaaatttagttgtaactctgtttatactactgattgctcattcgtttaaatgatattttaatgtaaaagtcataaccaacatatgaacagacagatttatgtctttaaacacagaatgtaagctatagtttaatctgataccagttgctggaagttgccatttgtttttcttaaatctatacccataaaacttcttttaagattatattg

SEQ ID NO: 416140 - DNA, 3777 bp, Homo sapiens
tctacgagcggcattataccgttgacacacctcatggtatatttgcagccagtactctatatgaacaatccgtctggatcacggatgtaggaagtggctttcaaggggggctgcaaagctcctcatgctatgatatcttcttgtggaacaatcccaggaaatccatatcccaaaggaagacctagccgcataaatggaattttcccaggaactcctttgaaaaaagatggtgaagaatgtactaacgaaggcaaaggaatagctgcacgaattcttgggccatccaaaccacctccttcaacatataatccacataaacctgttccttatccgatacctccatgccgaccacatgcaactattgcaccaagtgcttataacaatgcaggtctggtaccattagcgaatgtcatagctccacctccacctccatatactcctaatcctgtaggaacagagaatgaagacctttcgaatccgtcaaaacctatacagaatcaaacattttccaccccagcaagtcaactcttttctcctcatggttctaatccttcaacacctgctgcaactcctgttcctactgcatccccagtcaaggcaattaatcatccatcagcatcagcagctgccaccgtttctggaatgaacctgctgaatactgtccttcctgtgttcccagggcaggtctcctcagccgttcacacacctcagccatcaataccaaacccaacagttatcagaaccccttcattgcccactgcacctgttacatccatccacagtacaaccaccactcctgttccttccattttttctggcctagtgtcactgccaggtccttctgccactcctaccgcagccactcctaccccaggacctacaccacggtccactcttggttccagtgaagcatttgcttctacttctgcacctttcactagcctccccttttccaccagctcttctgctgcttctaccagcaacccaaattctgcttcattgtcatcagtttttgcagggctccctttgcccttaccaccaacatcccaaggcctatccaacccgactcctgtaattgctggtggctctactcccagcgttgccggtccacttggtgtgaacagtcctcttttgtctgcgttaaaaggttttctgacatccaatgacaccaatttaatcaactcctctgctttatcctctgctgtcacaagtgggctggcttcactatcttctcttactcttcagaactcggactcttctgcttcagcccctaacaagtgctatgccccatcagccatccctaccccacagaggacttccactccagggttggccctgttcccaggcctgccgtctcccgtggctaactcaacttccactcccctgacattgcctgtacagtctcctttagccactgctgcatcagcttccacgtcagcgccagttagctgtggctcctcagcctcccttttgcgtggcccccacccaggtacctcagatctgcatatttcatctacccctgctgcaacaactcttcctgttatgatcaaaactgagcccacaagtcctactccctcggccttcaaaggtccatctcattctgggaatccctctcatggcactttaggtttgtcagggacattgggccgtgcatatacttcaacatccgtgcccatcagtttatctgcttgccttaatcctgcattgtcaggtctctccagcttgagtactcctttaaatggttcaaatcctctttcctctatttcccttccaccacatggttcctccactcccattgcaccagtattcactgctcttccttcttttacttctttgaccaacaattttcctttaactggcaacccatctcttaatccgtcagtatctctcccagggtcattaatagccacctcatctaccgctgccacctccacatctctccctcatcctagctcaacggcagctgttctctcagggctttctgcttcagcaccagtctcagcagcacctttccccctcaacctgtccactgctgttccctcacttttctctgttactcaaggacctctgtcatcttcaaatccctcctatccaggcttttctgtctctaataccccaagcgttacccctgctcttccctcattcccggggctgcaggcgccctctacagtcgcagctgtcacaccactacctgtggctgccacagccccatccccagctccagtcctcccaggattcgcctcagcattcagttccaatttcaactccgctcttgttgcacaagccggtttatcatctggacttcaagctgcaggcagttctgtttttccaggccttttgtccctcccgggtatccctgggtttcctcagaatccttcacaatcatccttgcaagaattacagcataatgcggctgcgcagtcagcattgttacagcaggtccattcagcttcggctctggaaagctatccagctcagcctgatgggtttcctagttatccttcagcgccaggaacaccattttctttgcaaccaagcctgtcccagagtgggtggcagtgaatacttttaacttttattctccttcagagcaacatcagaattgcctgagaactgcaatgaacaatctgacaaatgtgaagctggccaaaagtcggaaaatgagaatgagggtaatcctggagaaattgtgacaacaatttgaaaattgtggttgcattttaaagtgtgaacactcccctatgtaaatatgctgacaataaattgtatggagaatggtatttaaaaagtgtttggagacttttcacctgtcctataaaattttgaattgtgtatgtgatctacatagaaagaatattaaagagtaggttgaactctttatagccgaatacagccttaaatatgcttgtatagcatccactggcagaagtaatagttgtgcctcagacttgggggttgcatgtggccctgggggagttactacccttggtatgcatgagcggttcctattagcatcagtgggaactcagtactctgtatgtatccacaaaagggaacttgagacccacagttattcttaatttctgatattaacaaccgtacatactgctgaatttaactcaaaatatttcaggtaagtgaaagtggtgcttaatgtagactatagaatgactttcaggtgttttcaactgaaagtatatatccagaactgcatccttatagaaatacaagtaagacttaggataatttgccttcaaaacagttttcctaatctcagcagtatccagtgagtgaagaacacttgactgactcttgggccacctctgttacttactgtactatggaagctcctggtgaatgtttacaattatgggatgtagtatttctatttgtactttaagtcaaatgcttatatgaaatatgtgacaacaaatagagaagactggctctgttagtaattatgcagtatgtactctatttaaggatctgtggtagtataacatgagtgaatgtcattaattttgaagtaataactgccacatgtgggaagtaggggagtaaggagaatgaattccaatctgtgattaaaagtgtaaactatagactctactgtagtacatttcaggatctagaagttttacttttataaagatggtgtccggaagatgttgctaatgtattttacttcaacatagggaacaaactttttaagtatattaataaacctgtatggttagtttttaacagttttttaaaataaactatggatatgacaaa

SEQ ID NO: 416141 - DNA, 3766 bp, Homo sapiens
tgttttttttagctgagctcccaatgttcagaatacttatcttttaagaatttttttcctacccctcttctttcttatattacaggctttcaaggggggctgcaaagctcctcatgctatgatatcttcttgtggaacaatcccaggaaatccatatcccaaaggaagacctagccgcataaatggaattttcccaggaactcctttgaaaaaagatggtgaagaatgtactaacgaaggcaaaggaatagctgcacgaattcttgggccatccaaaccacctccttcaacatataatccacataaacctgttccttatccgatacctccatgccgaccacatgcaactattgcaccaagtgcttataacaatgcaggtctggtaccattagcgaatgtcatagctccacctccacctccatatactcctaatcctgtaggaacagagaatgaagacctttcgaatccgtcaaaacctatacagaatcaaacattttccaccccagcaagtcaactcttttctcctcatggttctaatccttcaacacctgctgcaactcctgttcctactgcatccccagtcaaggcaattaatcatccatcagcatcagcagctgccaccgtttctggaatgaacctgctgaatactgtccttcctgtgttcccagggcaggtctcctcagccgttcacacacctcagccatcaataccaaacccaacagttatcagaaccccttcattgcccactgcacctgttacatccatccacagtacaaccaccactcctgttccttccattttttctggcctagtgtcactgccaggtccttctgccactcctaccgcagccactcctaccccaggacctacaccacggtccactcttggttccagtgaagcatttgcttctacttctgcacctttcactagcctccccttttccaccagctcttctgctgcttctaccagcaacccaaattctgcttcattgtcatcagtttttgcagggctccctttgcccttaccaccaacatcccaaggcctatccaacccgactcctgtaattgctggtggctctactcccagcgttgccggtccacttggtgtgaacagtcctcttttgtctgcgttaaaaggttttctgacatccaatgacaccaatttaatcaactcctctgctttatcctctgctgtcacaagtgggctggcttcactatcttctcttactcttcagaactcggactcttctgcttcagcccctaacaagtgctatgccccatcagccatccctaccccacagaggacttccactccagggttggccctgttcccaggcctgccgtctcccgtggctaactcaacttccactcccctgacattgcctgtacagtctcctttagccactgctgcatcagcttccacgtcagcgccagttagctgtggctcctcagcctcccttttgcgtggcccccacccaggtacctcagatctgcatatttcatctacccctgctgcaacaactcttcctgttatgatcaaaactgagcccacaagtcctactccctcggccttcaaaggtccatctcattctgggaatccctctcatggcactttaggtttgtcagggacattgggccgtgcatatacttcaacatccgtgcccatcagtttatctgcttgccttaatcctgcattgtcaggtctctccagcttgagtactcctttaaatggttcaaatcctctttcctctatttcccttccaccacatggttcctccactcccattgcaccagtattcactgctcttccttcttttacttctttgaccaacaattttcctttaactggcaacccatctcttaatccgtcagtatctctcccagggtcattaatagccacctcatctaccgctgccacctccacatctctccctcatcctagctcaacggcagctgttctctcagggctttctgcttcagcaccagtctcagcagcacctttccccctcaacctgtccactgctgttccctcacttttctctgttactcaaggacctctgtcatcttcaaatccctcctatccaggcttttctgtctctaataccccaagcgttacccctgctcttccctcattcccggggctgcaggcgccctctacagtcgcagctgtcacaccactacctgtggctgccacagccccatccccagctccagtcctcccaggattcgcctcagcattcagttccaatttcaactccgctcttgttgcacaagccggtttatcatctggacttcaagctgcaggcagttctgtttttccaggccttttgtccctcccgggtatccctgggtttcctcagaatccttcacaatcatccttgcaagaattacagcataatgcggctgcgcagtcagcattgttacagcaggtccattcagcttcggctctggaaagctatccagctcagcctgatgggtttcctagttatccttcagcgccaggaacaccattttctttgcaaccaagcctgtcccagagtgggtggcagtgaatacttttaacttttattctccttcagagcaacatcagaattgcctgagaactgcaatgaacaatctgacaaatgtgaagctggccaaaagtcggaaaatgagaatgagggtaatcctggagaaattgtgacaacaatttgaaaattgtggttgcattttaaagtgtgaacactcccctatgtaaatatgctgacaataaattgtatggagaatggtatttaaaaagtgtttggagacttttcacctgtcctataaaattttgaattgtgtatgtgatctacatagaaagaatattaaagagtaggttgaactctttatagccgaatacagccttaaatatgcttgtatagcatccactggcagaagtaatagttgtgcctcagacttgggggttgcatgtggccctgggggagttactacccttggtatgcatgagcggttcctattagcatcagtgggaactcagtactctgtatgtatccacaaaagggaacttgagacccacagttattcttaatttctgatattaacaaccgtacatactgctgaatttaactcaaaatatttcaggtaagtgaaagtggtgcttaatgtagactatagaatgactttcaggtgttttcaactgaaagtatatatccagaactgcatccttatagaaatacaagtaagacttaggataatttgccttcaaaacagttttcctaatctcagcagtatccagtgagtgaagaacacttgactgactcttgggccacctctgttacttactgtactatggaagctcctggtgaatgtttacaattatgggatgtagtatttctatttgtactttaagtcaaatgcttatatgaaatatgtgacaacaaatagagaagactggctctgttagtaattatgcagtatgtactctatttaaggatctgtggtagtataacatgagtgaatgtcattaattttgaagtaataactgccacatgtgggaagtaggggagtaaggagaatgaattccaatctgtgattaaaagtgtaaactatagactctactgtagtacatttcaggatctagaagttttacttttataaagatggtgtccggaagatgttgctaatgtattttacttcaacatagggaacaaactttttaagtatattaataaacctgtatggttagtttttaacagttttttaaaataaactatggatatgacaaa

SEQ ID NO: 416142 - DNA, 4603 bp, Homo sapiens
cctgctgccggggccgaggtatccaggagtcgggcggagcggctggggatgagcgcgagccggaccatgcgtccgggttcgcggcggtgagggtcgcggccggcggccgaggcgcaggtgcgggtcgagagaccggcgcctccctccccgccgcccgtggactctgagcgcaggtgtttctactctgccggccgctccacctgggaaagcgccttcaagagctacctctggcggcacctggccctcagctgcagggaaaccgcactcaaacctgccgccgagcccgggtttttctgcaaaactcagaggacctggctcttgcccgaggtgccctgaaccattgtgtgaataagctggggaagcctgactggagtgttttttctttttaataaaaagagtttttctgaatctcaatttttagaaattttttttgcgaagtttgcaatactctctacctcttcgcatcctctcttgctcgtggagtctttttcctcctcagctataaatattttttactatcggcggagcagaccagggatgaacgtcttttaattgcaagtataactgttaaaaccacgtcgggatagtagtcaagatggataaaaagtcctttgaaatggtgctggatgaaattagaaaggtggttgatttgctgagatatttttcctgggccgagccccagttgaaggcaatgaaagcattacagcataaaatggtggctgtccagccaacagaagtggtcaatatactcaactgtttcactttcagtaaagacaaactagttgctcttgaactgttagcctcgaacattattgatgcacagaattctcgtcctattgaagatttattcagggtaaatatgtctgagaagaaacggtgcaagagaatacttgaacaggctttcaaggggggctgcaaagctcctcatgctatgatatcttcttgtggaacaatcccaggaaatccatatcccaaaggaagacctagccgcataaatggaattttcccaggaactcctttgaaaaaagatggtgaagaatgtactaacgaaggcaaaggaatagctgcacgaattcttgggccatccaaaccacctccttcaacatataatccacataaacctgttccttatccgatacctccatgccgaccacatgcaactattgcaccaagtgcttataacaatgcaggtctggtaccattagcgaatgtcatagctccacctccacctccatatactcctaatcctgtaggaacagagaatgaagacctttcgaatccgtcaaaacctatacagaatcaaacattttccaccccagcaagtcaactcttttctcctcatggttctaatccttcaacacctgctgcaactcctgttcctactgcatccccagtcaaggcaattaatcatccatcagcatcagcagctgccaccgtttctggaatgaacctgctgaatactgtccttcctgtgttcccagggcaggtctcctcagccgttcacacacctcagccatcaataccaaacccaacagttatcagaaccccttcattgcccactgcacctgttacatccatccacagtacaaccaccactcctgttccttccattttttctggcctagtgtcactgccaggtccttctgccactcctaccgcagccactcctaccccaggacctacaccacggtccactcttggttccagtgaagcatttgcttctacttctgcacctttcactagcctccccttttccaccagctcttctgctgcttctaccagcaacccaaattctgcttcattgtcatcagtttttgcagggctccctttgcccttaccaccaacatcccaaggcctatccaacccgactcctgtaattgctggtggctctactcccagcgttgccggtccacttggtgtgaacagtcctcttttgtctgcgttaaaaggttttctgacatccaatgacaccaatttaatcaactcctctgctttatcctctgctgtcacaagtgggctggcttcactatcttctcttactcttcagaactcggactcttctgcttcagcccctaacaagtgctatgccccatcagccatccctaccccacagaggacttccactccagggttggccctgttcccaggcctgccgtctcccgtggctaactcaacttccactcccctgacattgcctgtacagtctcctttagccactgctgcatcagcttccacgtcagcgccagttagctgtggctcctcagcctcccttttgcgtggcccccacccaggtacctcagatctgcatatttcatctacccctgctgcaacaactcttcctgttatgatcaaaactgagcccacaagtcctactccctcggccttcaaaggtccatctcattctgggaatccctctcatggcactttaggtttgtcagggacattgggccgtgcatatacttcaacatccgtgcccatcagtttatctgcttgccttaatcctgcattgtcaggtctctccagcttgagtactcctttaaatggttcaaatcctctttcctctatttcccttccaccacatggttcctccactcccattgcaccagtattcactgctcttccttcttttacttctttgaccaacaattttcctttaactggcaacccatctcttaatccgtcagtatctctcccagggtcattaatagccacctcatctaccgctgccacctccacatctctccctcatcctagctcaacggcagctgttctctcagggctttctgcttcagcaccagtctcagcagcacctttccccctcaacctgtccactgctgttccctcacttttctctgttactcaaggacctctgtcatcttcaaatccctcctatccaggcttttctgtctctaataccccaagcgttacccctgctcttccctcattcccggggctgcaggcgccctctacagtcgcagctgtcacaccactacctgtggctgccacagccccatccccagctccagtcctcccaggattcgcctcagcattcagttccaatttcaactccgctcttgttgcacaagccggtttatcatctggacttcaagctgcaggcagttctgtttttccaggccttttgtccctcccgggtatccctgggtttcctcagaatccttcacaatcatccttgcaagaattacagcataatgcggctgcgcagtcagcattgttacagcaggtccattcagcttcggctctggaaagctatccagctcagcctgatgggtttcctagttatccttcagcgccaggaacaccattttctttgcaaccaagcctgtcccagagtgggtggcagtgaatacttttaacttttattctccttcagagcaacatcagaattgcctgagaactgcaatgaacaatctgacaaatgtgaagctggccaaaagtcggaaaatgagaatgagggtaatcctggagaaattgtgacaacaatttgaaaattgtggttgcattttaaagtgtgaacactcccctatgtaaatatgctgacaataaattgtatggagaatggtatttaaaaagtgtttggagacttttcacctgtcctataaaattttgaattgtgtatgtgatctacatagaaagaatattaaagagtaggttgaactctttatagccgaatacagccttaaatatgcttgtatagcatccactggcagaagtaatagttgtgcctcagacttgggggttgcatgtggccctgggggagttactacccttggtatgcatgagcggttcctattagcatcagtgggaactcagtactctgtatgtatccacaaaagggaacttgagacccacagttattcttaatttctgatattaacaaccgtacatactgctgaatttaactcaaaatatttcaggtaagtgaaagtggtgcttaatgtagactatagaatgactttcaggtgttttcaactgaaagtatatatccagaactgcatccttatagaaatacaagtaagacttaggataatttgccttcaaaacagttttcctaatctcagcagtatccagtgagtgaagaacacttgactgactcttgggccacctctgttacttactgtactatggaagctcctggtgaatgtttacaattatgggatgtagtatttctatttgtactttaagtcaaatgcttatatgaaatatgtgacaacaaatagagaagactggctctgttagtaattatgcagtatgtactctatttaaggatctgtggtagtataacatgagtgaatgtcattaattttgaagtaataactgccacatgtgggaagtaggggagtaaggagaatgaattccaatctgtgattaaaagtgtaaactatagactctactgtagtacatttcaggatctagaagttttacttttataaagatggtgtccggaagatgttgctaatgtattttacttcaacatagggaacaaactttttaagtatattaataaacctgtatggttagtttttaacagttttttaaaataaactatggatatgacaaaaaaaaaaaaaacaagtctacgcgg

SEQ ID NO: 416143 - DNA, 4744 bp, Homo sapiens
cctgctgccggggccgaggtatccaggagtcgggcggagcggctggggatgagcgcgagccggaccatgcgtccgggttcgcggcggtgagggtcgcggccggcggccgaggcgcaggtgcgggtcgagagaccggcgcctccctccccgccgcccgtggactctgagcgcaggtgtttctactctgccggccgctccacctgggaaagcgccttcaagagctacctctggcggcacctggccctcagctgcagggaaaccgcactcaaacctgccgccgagcccgggtttttctgcaaaactcagaggacctggctcttgcccgaggtgccctgaaccattgtgtgaataagctggggaagcctgactggagtgttttttctttttaataaaaagagtttttctgaatctcaatttttagaaattttttttgcgaagtttgcaatactctctacctcttcgcatcctctcttgctcgtggagtctttttcctcctcagctataaatattttttactatcggcggagcagaccagggatgaacgtcttttaattgcaagtataactgttaaaaccacgtcgggatagtagtcaagatggataaaaagtcctttgaaatggtgctggatgaaattagaaaggtggttgatttgctgagatatttttcctgggccgagccccagttgaaggcaatgaaagcattacagcataaaatggtggctgtccagccaacagaagtggtcaatatactcaactgtttcactttcagtaaagacaaactagttgctcttgaactgttagcctcgaacattattgatgcacagaattctcgtcctattgaagatttattcagggtaaatatgtctgagaagaaacggtgcaagagaatacttgaacaggctttcaaggggggctgcaaagctcctcatgctatgatatcttcttgtggaacaatcccaggaaatccatatcccaaaggaagacctagccgcataaatggaattttcccaggaactcctttgaaaaaagatggtgaagaatgtactaacgaaggcaaaggaatagctgcacgaattcttgggccatccaaaccacctccttcaacatataatccacataaacctgttccttatccgatacctccatgccgaccacatgcaactattgcaccaagtgcttataacaatgcaggtctggtaccattagcgaatgtcatagctccacctccacctccatatactcctaatcctgtaggaacagagaatgaagacctttcgaatccgtcaaaacctatacagaatcaaacattttccaccccagcaagtcaactcttttctcctcatggttctaatccttcaacacctgctgcaactcctgttcctactgcatccccagtcaaggcaattaatcatccatcagcatcagcagctgccaccgtttctggaatgaacctgctgaatactgtccttcctgtgttcccagggcaggtctcctcagccgttcacacacctcagccatcaataccaaacccaacagttatcagaaccccttcattgcccactgcacctgttacatccatccacagtacaaccaccactcctgttccttccattttttctggcctagtgtcactgccaggtccttctgccactcctaccgcagccactcctaccccaggacctacaccacggtccactcttggttccagtgaagcatttgcttctacttctgcacctttcactagcctccccttttccaccagctcttctgctgcttctaccagcaacccaaattctgcttcattgtcatcagtttttgcagggctccctttgcccttaccaccaacatcccaaggcctatccaacccgactcctgtaattgctggtggctctactcccagcgttgccggtccacttggtgtgaacagtcctcttttgtctgcgttaaaaggttttctgacatccaatgacaccaatttaatcaactcctctgctttatcctctgctgtcacaagtgggctggcttcactatcttctcttactcttcagaactcggactcttctgcttcagcccctaacaagtgctatgccccatcagccatccctaccccacagaggacttccactccagggttggccctgttcccaggcctgccgtctcccgtggctaactcaacttccactcccctgacattgcctgtacagtctcctttagccactgctgcatcagcttccacgtcagcgccagttagctgtggctcctcagcctcccttttgcgtggcccccacccaggtacctcagatctgcatatttcatctacccctgctgcaacaactcttcctgttatgatcaaaactgagcccacaagtcctactccctcggccttcaaaggtccatctcattctgggaatccctctcatggcactttaggtttgtcagggacattgggccgtgcatatacttcaacatccgtgcccatcagtttatctgcttgccttaatcctgcattgtcaggtctctccagcttgagtactcctttaaatggttcaaatcctctttcctctatttcccttccaccacatggttcctccactcccattgcaccagtattcactgctcttccttcttttacttctttgaccaacaattttcctttaactggcaacccatctcttaatccgtcagtatctctcccagggtcattaatagccacctcatctaccgctgccacctccacatctctccctcatcctagctcaacggcagctgttctctcagggctttctgcttcagcaccagtctcagcagcacctttccccctcaacctgtccactgctgttccctcacttttctctgttactcaaggacctctgtcatcttcaaatccctcctatccaggcttttctgtctctaataccccaagcgttacccctgctcttccctcattcccggggctgcaggcgccctctacagtcgcagctgtcacaccactacctgtggctgccacagccccatccccagctccagtcctcccaggattcgcctcagcattcagttccaatttcaactccgctcttgttgcacaagccggtttatcatctggacttcaagctgcaggcagttctgtttttccaggccttttgtccctcccgggtatccctgggtttcctcagaatccttcacaatcatccttgcaagaattacagcataatgcggctgcgcagtcagcattgttacagcaggtccattcagcttcggctctggaaagctatccagctcagcctgatgggtttcctagttatccttcagcgccaggaacaccattttctttgcaaccaagcctgtcccagagtgggtggcagtgaatacttttaacttttattctccttcagagcaacatcagaattgcctgagaactgcaatgaacaatctgacaaatgtgaagctggccaaaagtcggaaaatgagaatgagggtaatcctggagaaattgtgacaacaatttgaaaattgtggttgcattttaaagtgtgaacactcccctatgtaaatatgctgacaataaattgtatggagaatggtatttaaaaagtgtttggagacttttcacctgtcctataaaattttgaattgtgtatgtgatctacatagaaagaatattaaagagtaggttgaactctttatagccgaatacagccttaaatatgcttgtatagcatccactggcagaagtaatagttgtgcctcagacttgggggttgcatgtggccctgggggagttactacccttggtatgcatgagcggttcctattagcatcagtgggaactcagtactctgtatgtatccacaaaagggaacttgagacccacagttattcttaatttctgatattaacaaccgtacatactgctgaatttaactcaaaatatttcaggtaagtgaaagtggtgcttaatgtagactatagaatgactttcaggtgttttcaactgaaagtatatatccagaactgcatccttatagaaatacaagtaagacttaggataatttgccttcaaaacagttttcctaatctcagcagtatccagtgagtgaagaacacttgactgactcttgggccacctctgttacttactgtactatggaagctcctggtgaatgtttacaattatgggatgtagtatttctatttgtactttaagtcaaatgcttatatgaaatatgtgacaacaaatagagaagactggctctgttagtaattatgcagtatgtactctatttaaggatctgtggtagtataacatgagtgaatgtcattaattttgaagtaataactgccacatgtgggaagtaggggagtaaggagaatgaattccaatctgtgattaaaagtgtaaactatagactctactgtagtacatttcaggatctagaagttttacttttataaagatggtgtccggaagatgttgctaatgtattttacttcaacatagggaacaaactttttaagtatattaataaacctgtatggttagtttttaacagttttttaaaataaactatggatatgacaaattatggtttgctaaaacaagaacaaaaaaaatttgcggcgcgcgcccccaaaaattctaaccttttgggccggccaggaaggaatggcagggtcagaaccgtccaagggggtctccaaaaacgggcggctgcacaaggcggtggtacagcggcccccgcggggga

SEQ ID NO: 416144 - DNA, 4503 bp, Homo sapiens
cctgctgccggggccgaggtatccaggagtcgggcggagcggctggggatgagcgcgagccggaccatgcgtccgggttcgcggcggtgagggtcgcggccggcggccgaggcgcaggtgcgggtcgagagaccggcgcctccctccccgccgcccgtggactctgagcgcaggtgtttctactctgccggccgctccacctgggaaagcgccttcaagagctacctctggcggcacctggccctcagctgcagggaaaccgcactcaaacctgccgccgagcccgggtttttctgcaaaactcagaggacctggctcttgcccgaggtgccctgaaccattgtgtgaataagctggggaagcctgactggagtgttttttctttttaataaaaagagtttttctgaatctcaatttttagaaattttttttgcgaagtttgcaatactctctacctcttcgcatcctctcttgctcgtggagtctttttcctcctcagctataaatattttttactatcggcggagcagaccagggatgaacgtcttttaattgcaagtataactgttaaaaccacgtcgggatagtagtcaagatggataaaaagtcctttgaaatggtgctggatgaaattagaaaggtggttgatttgctgagatatttttcctgggccgagccccagttgaaggcaatgaaagcattacagcataaaatggtggctgtccagccaacagaagtggtcaatatactcaactgtttcactttcagtaaagacaaactagttgctcttgaactgttagcctcgaacattattgatgcacagaattctcgtcctattgaagatttattcagggtaaatatgtctgagaagaaacggtgcaagagaatacttgaacaggctttcaaggggggctgcaaagctcctcatgctatgatatcttcttgtggaacaatcccaggaaatccatatcccaaaggaagacctagccgcataaatggaattttcccaggaactcctttgaaaaaagatggtgaagaatgtactaacgaaggcaaaggaatagctgcacgaattcttgggccatccaaaccacctccttcaacatataatccacataaacctgttccttatccgatacctccatgccgaccacatgcaactattgcaccaagtgcttataacaatgcaggtctggtaccattagcgaatgtcatagctccacctccacctccatatactcctaatcctgtaggaacagagaatgaagacctttcgaatccgtcaaaacctatacagaatcaaacattttccaccccagcaagtcaactcttttctcctcatggttctaatccttcaacacctgctgcaactcctgttcctactgcatccccagtcaaggcaattaatcatccatcagcatcagcagctgccaccgtttctggaatgaacctgctgaatactgtccttcctgtgttcccagggcaggtctcctcagccgttcacacacctcagccatcaataccaaacccaacagttatcagaaccccttcattgcccactgcacctgttacatccatccacagtacaaccaccactcctgttccttccattttttctggcctagtgtcactgccaggtccttctgccactcctaccgcagccactcctaccccaggacctacaccacggtccactcttggttccagtgaagcatttgcttctacttctgcacctttcactagcctccccttttccaccagctcttctgctgcttctaccagcaacccaaattctgcttcattgtcatcagtttttgcagggctccctttgcccttaccaccaacatcccaaggcctatccaacccgactcctgtaattgctggtggctctactcccagcgttgccggtccacttggtgtgaacagtcctcttttgtctgcgttaaaaggttttctgacatccaatgacaccaatttaatcaactcctctgctttatcctctgctgtcacaagtgggctggcttcactatcttctcttactcttcagaactcggactcttctgcttcagcccctaacaagtgctatgccccatcagccatccctaccccacagaggacttccactccagggttggccctgttcccaggcctgccgtctcccgtggctaactcaacttccactcccctgacattgcctgtacagtctcctttagccactgctgcatcagcttccacgtcagcgccagttagctgtggctcctcagcctcccttttgcgtggcccccacccaggtacctcagatctgcatatttcatctacccctgctgcaacaactcttcctgttatgatcaaaactgagcccacaagtcctactccctcggccttcaaaggtccatctcattctgggaatccctctcatggcactttaggtttgtcagggacattgggccgtgcatatacttcaacatccgtgcccatcagtttatctgcttgccttaatcctgcattgtcaggtctctccagcttgagtactcctttaaatggttcaaatcctctttcctctatttcccttccaccacatggttcctccactcccattgcaccagtattcactgctcttccttcttttacttctttgaccaacaattttcctttaactggcaacccatctcttaatccgtcagtatctctcccagggtcattaatagccacctcatctaccgctgccacctccacatctctccctcatcctagctcaacggcagctgttctctcagggctttctgcttcagcaccagtctcagcagcacctttccccctcaacctgtccactgctgttccctcacttttctctgttactcaaggacctctgtcatcttcaaatccctcctatccaggcttttctgtctctaataccccaagcgttacccctgctcttccctcattcccggggctgcaggcgccctctacagtcgcagctgtcacaccactacctgtggctgccacagccccatccccagctccagtcctcccaggattcgcctcagcattcagttccaatttcaactccgctcttgttgcacaagccggtttatcatctggacttcaagctgcaggcagttctgtttttccaggccttttgtccctcccgggtatccctgggtttcctcagaatccttcacaatcatccttgcaagaattacagcataatgcggctgcgcagtcagcattgttacagcaggtccattcagcttcggctctggaaagctatccagctcagcctgatgggtttcctagttatccttcagcgccaggaacaccattttctttgcaaccaagcctgtcccagagtgggtggcagtgaatacttttaacttttattctccttcagagcaacatcagaattgcctgagaactgcaatgaacaatctgacaaatgtgaagctggccaaaagtcggaaaatgagaatgagggtaatcctggagaaattgtgacaacaatttgaaaattgtggttgcattttaaagtgtgaacactcccctatgtaaatatgctgacaataaattgtatggagaatggtatttaaaaagtgtttggagacttttcacctgtcctataaaattttgaattgtgtatgtgatctacatagaaagaatattaaagagtaggttgaactctttatagccgaatacagccttaaatatgcttgtatagcatccactggcagaagtaatagttgtgcctcagacttgggggttgcatgtggccctgggggagttactacccttggtatgcatgagcggttcctattagcatcagtgggaactcagtactctgtatgtatccacaaaagggaacttgagacccacagttattcttaatttctgatattaacaaccgtacatactgctgaatttaactcaaaatatttcaggtaagtgaaagtggtgcttaatgtagactatagaatgactttcaggtgttttcaactgaaagtatatatccagaactgcatccttatagaaatacaagtaagacttaggataatttgccttcaaaacagttttcctaatctcagcagtatccagtgagtgaagaacacttgactgactcttgggccacctctgttacttactgtactatggaagctcctggtgaatgtttacaattatgggatgtagtatttctatttgtactttaagtcaaatgcttatatgaaatatgtgacaacaaatagagaagactggctctgttagtaattatgcagtatgtactctatttaaggatctgtggtagtataacatgagtgaatgtcattaattttgaagtaataactgccacatgtgggaagtacagactttattttttttttttttttttttttttttttttttttttttttttttttttttttttcccccccggggggggaaaaaaaagggggggatcctaaaaaaggagcagggggggggaaaaaaagggggggaggggggggtaaaaaa

SEQ ID NO: 416145 - DNA, 4429 bp, Homo sapiens
cctgctgccggggccgaggtatccaggagtcgggcggagcggctggggatgagcgcgagccggaccatgcgtccgggttcgcggcggtgagggtcgcggccggcggccgaggcgcaggtgcgggtcgagagaccggcgcctccctccccgccgcccgtggactctgagcgcaggtgtttctactctgccggccgctccacctgggaaagcgccttcaagagctacctctggcggcacctggccctcagctgcagggaaaccgcactcaaacctgccgccgagcccgggtttttctgcaaaactcagaggacctggctcttgcccgaggtgccctgaaccattgtgtgaataagctggggaagcctgactggagtgttttttctttttaataaaaagagtttttctgaatctcaatttttagaaattttttttgcgaagtttgcaatactctctacctcttcgcatcctctcttgctcgtggagtctttttcctcctcagctataaatattttttactatcggcggagcagaccagggatgaacgtcttttaattgcaagtataactgttaaaaccacgtcgggatagtagtcaagatggataaaaagtcctttgaaatggtgctggatgaaattagaaaggtggttgatttgctgagatatttttcctgggccgagccccagttgaaggcaatgaaagcattacagcataaaatggtggctgtccagccaacagaagtggtcaatatactcaactgtttcactttcagtaaagacaaactagttgctcttgaactgttagcctcgaacattattgatgcacagaattctcgtcctattgaagatttattcagggtaaatatgtctgagaagaaacggtgcaagagaatacttgaacaggctttcaaggggggctgcaaagctcctcatgctatgatatcttcttgtggaacaatcccaggaaatccatatcccaaaggaagacctagccgcataaatggaattttcccaggaactcctttgaaaaaagatggtgaagaatgtactaacgaaggcaaaggaatagctgcacgaattcttgggccatccaaaccacctccttcaacatataatccacataaacctgttccttatccgatacctccatgccgaccacatgcaactattgcaccaagtgcttataacaatgcaggtctggtaccattagcgaatgtcatagctccacctccacctccatatactcctaatcctgtaggaacagagaatgaagacctttcgaatccgtcaaaacctatacagaatcaaacattttccaccccagcaagtcaactcttttctcctcatggttctaatccttcaacacctgctgcaactcctgttcctactgcatccccagtcaaggcaattaatcatccatcagcatcagcagctgccaccgtttctggaatgaacctgctgaatactgtccttcctgtgttcccagggcaggtctcctcagccgttcacacacctcagccatcaataccaaacccaacagttatcagaaccccttcattgcccactgcacctgttacatccatccacagtacaaccaccactcctgttccttccattttttctggcctagtgtcactgccaggtccttctgccactcctaccgcagccactcctaccccaggacctacaccacggtccactcttggttccagtgaagcatttgcttctacttctgcacctttcactagcctccccttttccaccagctcttctgctgcttctaccagcaacccaaattctgcttcattgtcatcagtttttgcagggctccctttgcccttaccaccaacatcccaaggcctatccaacccgactcctgtaattgctggtggctctactcccagcgttgccggtccacttggtgtgaacagtcctcttttgtctgcgttaaaaggttttctgacatccaatgacaccaatttaatcaactcctctgctttatcctctgctgtcacaagtgggctggcttcactatcttctcttactcttcagaactcggactcttctgcttcagcccctaacaagtgctatgccccatcagccatccctaccccacagaggacttccactccagggttggccctgttcccaggcctgccgtctcccgtggctaactcaacttccactcccctgacattgcctgtacagtctcctttagccactgctgcatcagcttccacgtcagcgccagttagctgtggctcctcagcctcccttttgcgtggcccccacccaggtacctcagatctgcatatttcatctacccctgctgcaacaactcttcctgttatgatcaaaactgagcccacaagtcctactccctcggccttcaaaggtccatctcattctgggaatccctctcatggcactttaggtttgtcagggacattgggccgtgcatatacttcaacatccgtgcccatcagtttatctgcttgccttaatcctgcattgtcaggtctctccagcttgagtactcctttaaatggttcaaatcctctttcctctatttcccttccaccacatggttcctccactcccattgcaccagtattcactgctcttccttcttttacttctttgaccaacaattttcctttaactggcaacccatctcttaatccgtcagtatctctcccagggtcattaatagccacctcatctaccgctgccacctccacatctctccctcatcctagctcaacggcagctgttctctcagggctttctgcttcagcaccagtctcagcagcacctttccccctcaacctgtccactgctgttccctcacttttctctgttactcaaggacctctgtcatcttcaaatccctcctatccaggcttttctgtctctaataccccaagcgttacccctgctcttccctcattcccggggctgcaggcgccctctacagtcgcagctgtcacaccactacctgtggctgccacagccccatccccagctccagtcctcccaggattcgcctcagcattcagttccaatttcaactccgctcttgttgcacaagccggtttatcatctggacttcaagctgcaggcagttctgtttttccaggccttttgtccctcccgggtatccctgggtttcctcagaatccttcacaatcatccttgcaagaattacagcataatgcggctgcgcagtcagcattgttacagcagagcaacatcagaattgcctgagaactgcaatgaacaatctgacaaatgtgaagctggccaaaagtcggaaaatgagaatgagggtaatcctggagaaattgtgacaacaatttgaaaattgtggttgcattttaaagtgtgaacactcccctatgtaaatatgctgacaataaattgtatggagaatggtatttaaaaagtgtttggagacttttcacctgtcctataaaattttgaattgtgtatgtgatctacatagaaagaatattaaagagtaggttgaactctttatagccgaatacagccttaaatatgcttgtatagcatccactggcagaagtaatagttgtgcctcagacttgggggttgcatgtggccctgggggagttactacccttggtatgcatgagcggttcctattagcatcagtgggaactcagtactctgtatgtatccacaaaagggaacttgagacccacagttattcttaatttctgatattaacaaccgtacatactgctgaatttaactcaaaatatttcaggtaagtgaaagtggtgcttaatgtagactatagaatgactttcaggtgttttcaactgaaagtatatatccagaactgcatccttatagaaatacaagtaagacttaggataatttgccttcaaaacagttttcctaatctcagcagtatccagtgagtgaagaacacttgactgactcttgggccacctctgttacttactgtactatggaagctcctggtgaatgtttacaattatgggatgtagtatttctatttgtactttaagtcaaatgcttatatgaaatatgtgacaacaaatagagaagactggctctgttagtaattatgcagtatgtactctatttaaggatctgtggtagtataacatgagtgaatgtcattaattttgaagtaataactgccacatgtgggaagtaggggagtaaggagaatgaattccaatctgtgattaaaagtgtaaactatagactctactgtagtacatttcaggatctagaagttttacttttataaagatggtgtccggaagatgttgctaatgtattttacttcaacatagggaacaaactttttaagtatattaataaacctgtatggttagtttttaacagttttttaaaataaactatggatatgacaaa

SEQ ID NO: 416146 - DNA, 3910 bp, Homo sapiens
cctgctgccggggccgaggtatccaggagtcgggcggagcggctggggatgagcgcgagccggaccatgcgtccgggttcgcggcggtgagggtcgcggccggcggccgaggcgcaggtgcgggtcgagagaccggcgcctccctccccgccgcccgtggactctgagcgcaggtgtttctactctgccggccgctccacctgggaaagcgccttcaagagctacctctggcggcacctggccctcagctgcagggaaaccgcactcaaacctgccgccgagcccgggtttttctgcaaaactcagaggacctggctcttgcccgaggtgccctgaaccattgtgtgaataagctggggaagcctgactggagtgttttttctttttaataaaaagagtttttctgaatctcaatttttagaaattttttttgcgaagtttgcaatactctctacctcttcgcatcctctcttgctcgtggagtctttttcctcctcagctataaatattttttactatcggcggagcagaccagggatgaacgtcttttaattgcaagtataactgttaaaaccacgtcgggatagtagtcaagatggataaaaagtcctttgaaatggtgctggatgaaattagaaaggtggttgatttgctgagatatttttcctgggccgagccccagttgaaggcaatgaaagcattacagcataaaatggtggctgtccagccaacagaagtggtcaatatactcaactgtttcactttcagtaaagacaaactagttgctcttgaactgttagcctcgaacattattgatgcacagaattctcgtcctattgaagatttattcagggtaaatatgtctgagaagaaacggtgcaagagaatacttgaacaggctttcaaggggggctgcaaagctcctcatgctatgatatcttcttgtggaacaatcccaggaaatccatatcccaaaggaagacctagccgcataaatggaattttcccaggaactcctttgaaaaaagatggtgaagaatgtactaacgaaggcaaaggaatagctgcacgaattcttgggccatccaaaccacctccttcaacatataatccacataaacctgttccttatccgatacctccatgccgaccacatgcaactattgcaccaagtgcttataacaatgcaggtctggtaccattagcgaatgtcatagctccacctccacctccatatactcctaatcctgtaggaacagagaatgaagacctttcgaatccgtcaaaacctatacagaatcaaacattttccaccccagcaagtcaactcttttctcctcatggttctaatccttcaacacctgctgcaactcctgttcctactgcatccccagtcaaggcaattaatcatccatcagcatcagcagctgccaccgtttctggaatgaacctgctgaatactgtccttcctgtgttcccagggcaggtctcctcagccgttcacacacctcagccatcaataccaaacccaacagttatcagaaccccttcattgcccactgcacctgttacatccatccacagtacaaccaccactcctgttccttccattttttctggcctagtgtcactgccaggtccttctgccactcctaccgcagccactcctaccccaggacctacaccacggtccactcttggttccagtgaagcatttgcttctacttctgcacctttcactagcctccccttttccaccagctcttctgctgcttctaccagcaacccaaattctgcttcattgtcatcagtttttgcagggctccctttgcccttaccaccaacatcccaaggcctatccaacccgactcctgtaattgctggtggctctactcccagcgttgccggtccacttggtgtgaacagtcctcttttgtctgcgttaaaaggttttctgacatccaatgacaccaatttaatcaactcctctgctttatcctctgctgtcacaagtgggctggcttcactatcttctcttactcttcagaactcggactcttctgcttcagcccctaacaagtgctatgccccatcagccatccctaccccacagaggacttccactccagggttggccctgttcccaggcctgccgtctcccgtggctaactcaacttccactcccctgacattgcctgtacagtctcctttagccactgctgcatcagcttccacgtcagcgccagttagctgtggctcctcagcctcccttttgcgtggcccccacccaggtacctcagatctgcatatttcatctacccctgctgcaacaactcttcctgttatgatcaaaactgagcccacaagtcctactccctcggccttcaaaggtccatctcattctgggaatccctctcatggcactttaggtttgtcagggacattgggccgtgcatatacttcaacatccgtgcccatcagtttatctgcttgccttaatcctgcattgtcaggtctctccagcttgagtactcctttaaatggttcaaatcctctttcctctatttcccttccaccacatggttcctccactcccattgcaccagtattcactgctcttccttcttttacttctttgaccaacaattttcctttaactggcaacccatctcttaatccgtcagtatctctcccagggtcattaatagccacctcatctaccgctgccacctccacatctctccctcatcctagctcaacggcagctgttctctcagggctttctgcttcagcaccagtctcagcagcacctttccccctcaacctgtccactgctgttccctcacttttctctgttactcaaggacctctgtcatcttcaaatccctcctatccaggcttttctgtctctaataccccaagcgttacccctgctcttccctcattcccggggctgcaggcgccctctacagtcgcagctgtcacaccactacctgtggctgccacagccccatccccagctccagtcctcccaggattcgcctcagcattcagttccaatttcaactccgctcttgttgcacaagccggtttatcatctggacttcaagctgcaggcagttctgtttttccaggccttttgtccctcccgggtatccctgggtttcctcagaatccttcacaatcatccttgcaagaattacagcataatgcggctgcgcagtcagcattgttacagcaggtccattcagcttcggctctggaaagctatccagctcagcctgatgggtttcctagttatccttcagcgccaggaacaccattttctttgcaaccaagcctgtcccagagtgggtggcagtgaatacttttaacttttattctccttcagagcaacatcagaattgcctgagaactgcaatgaacaatctgacaaatgtgaagctggccaaaagtcggaaaatgagaatgagggtaatcctggagaaattgtgacaacaatttgaaaattgtggttgcattttaaagtgtgaacactcccctatgtaaatatgctgacaataaattgtatggagaatggtaaaaaaaaaaaaaaaaaaaaaaaaaaaaaaaaaaaaaaaaaaaaagggggggggggctaaaaatttcccccgggggggcccttttcgcgcaccccagctttttgggtgacacaaggggggcccccaaaaagggggacgcgatataatatacacaagagcacaggggggccgcgttacacaaaccggtgtaggccgggggaaaaaccgccctgccgcggggacccctgtggaaaagacaaccccaaccgcgggggggggcaccacgggggaccactccctacagaaattaaaacgccccggcggacaccaacatttcacagcggacaaag

SEQ ID NO: 416147 - DNA, 1731 bp, Homo sapiens
tatttataagacagcagaaaggattatatgcaaaacagacttactgaatttcgaataatatacttcacagtagaaagattcatatcagggaatggctgatttttatggtccttccaacagaggaataaattctaaggtttttgttttgtttttaacattttaagattgtatttgacaaatatggaaacagtagcttttatgtcttgtctgcagttaacttgtttttctgtcaattgttttagtttatcatctggacttcaagctgcaggcagttctgtttttccaggccttttgtccctcccgggtatccctgggtttcctcagaatccttcacaatcatccttgcaagaattacagcataatgcggctgcgcagtcagcattgttacagcaggtccattcagcttcggctctggaaagctatccagctcagcctgatgggtttcctagttatccttcagcgccaggaacaccattttctttgcaaccaagcctgtcccagagtgggtggcagtgaatacttttaacttttattctccttcagagcaacatcagaattgcctgagaactgcaatgaacaatctgacaaatgtgaagctggccaaaagtcggaaaatgagaatgagggtaatcctggagaaattgtgacaacaatttgaaaattgtggttgcattttaaagtgtgaacactcccctatgtaaatatgctgacaataaattgtatggagaatggtatttaaaaagtgtttggagacttttcacctgtcctataaaattttgaattgtgtatgtgatctacatagaaagaatattaaagagtaggttgaactctttatagccgaatacagccttaaatatgcttgtatagcatccactggcagaagtaatagttgtgcctcagacttgggggttgcatgtggccctgggggagttactacccttggtatgcatgagcggttcctattagcatcagtgggaactcagtactctgtatgtatccacaaaagggaacttgagacccacagttattcttaatttctgatattaacaaccgtacatactgctgaatttaactcaaaatatttcaggtaagtgaaagtggtgcttaatgtagactatagaatgactttcaggtgttttcaactgaaagtatatatccagaactgcatccttatagaaatacaagtaagacttaggataatttgccttcaaaacagttttcctaatctcagcagtatccagtgagtgaagaacacttgactgactcttgggccacctctgttacttactgtactatggaagctcctggtgaatgtttacaattatgggatgtagtatttctatttgtactttaagtcaaatgcttatatgaaatatgtgacaacaaatagagaagactggctctgttagtaattatgcagtatgtactctatttaaggatctgtggtagtataacatgagtgaatgtcattaattttgaagtaataactgccacatgtgggaagtaggggagtaaggagaatgaattccaatctgtgattaaaagtgtaaactatagactctactgtagtacatttcaggatctagaagttttacttttataaagatggtgtccggaagatgttgctaatgtattttacttcaacatagggaacaaactttttaagtatattaataaacctgtatggttagtttttaacagttttttaaaataaactatggatatgacaaa

SEQ ID NO: 416148 - DNA, 2340 bp, Homo sapiens
cctgctgccggggccgaggtatccaggagtcgggcggagcggctggggatgagcgcgagccggaccatgcgtccgggttcgcggcggtgagggtcgcggccggcggccgaggcgcaggtgcgggtcgagagaccggcgcctccctccccgccgcccgtggactctgagcgcaggtgtttctactctgccggccgctccacctgggaaagcgccttcaagagctacctctggcggcacctggccctcagctgcagggaaaccgcactcaaacctgccgccgagcccgggtttttctgcaaaactcagaggacctggctcttgcccgaggtgccctgaaccattgtgtgaataagctggggaagcctgactggagtgttttttctttttaataaaaagagtttttctgaatctcaatttttagaaattttttttgcgaagtttgcaatactctctacctcttcgcatcctctcttgctcgtggagtctttttcctcctcagctataaatattttttactatcggcggagcagaccagggatgaacgtcttttaattgcaagtataactgttaaaaccacgtcgggatagtagtcaagatggataaaaagtcctttgaaatggtgctggatgaaattagaaaggtggttgatttgctgagatatttttcctgggccgagccccagttgaaggcaatgaaagcattacagcataaaatggtggctgtccagccaacagaagtggtcaatatactcaactgtttcactttcagtaaagacaaactagttgctcttgaactgttagcctcgaacattattgatgcacagaattctcgtcctattgaagatttattcagggtaaatatgtctgagaagaaacggtgcaagagaatacttgaacaggctttcaaggggggctgcaaagctcctcatgctatgatatcttcttgtggaacaatcccaggaaatccatatcccaaaggaagacctagccgcataaatggaattttcccaggaactcctttgaaaaaagatggtgaagaatgtactaacgaaggcaaaggaatagctgcacgaattcttgggccatccaaaccacctccttcaacatataatccacataaacctgttccttatccgatacctccatgccgaccacatgcaactattgcaccaagtgcttataacaatgcaggtctggtaccattagcgaatgtcatagctccacctccacctccatatactcctaatcctgtaggaacagagaatgaagacctttcgaatccgtcaaaacctatacagaatcaaacattttccaccccagcaagtcaactcttttctcctcatggttctaatccttcaacacctgctgcaactcctgttcctactgcatccccagtcaaggcaattaatcatccatcagcatcagcagctgccaccgtttctggaatgaacctgctgaatactgtccttcctgtgttcccagggcaggtctcctcagccgttcacacacctcagccatcaataccaaacccaacagttatcagaaccccttcattgcccactgcacctgttacatccatccacagtacaaccaccactcctgttccttccattttttctggcctagtgtcactgccaggtccttctgccactcctaccgcagccactcctaccccaggacctacaccacggtccactcttggttccagtgaagcatttgcttctacttctgcacctttcactagcctccccttttccaccagctcttctgctgcttctaccagcaacccaaattctgcttcattgtcatcagtttttgcagggctccctttgcccttaccaccaacatcccaaggcctatccaacccgactcctgtaattgctggtggctctactcccagcgttgccggtccacttggtgtgaacagtcctcttttgtctgcgttaaaaggttttctgacatccaatgacaccaatttaatcaactcctctgctttatcctctgctgtcacaagtgggctggcttcactatcttctcttactcttcagaactcggactcttctgcttcagcccctaacaagtgctatgccccatcagccatccctaccccacagaggacttccactccagggttggccctgttcccaggcctgccgtctcccgtggctaactcaacttccactcccctgacattgctcttcccatccttcccccctcgcaccgcccctcagaccagctcctgcgcgcagcctcccccagcccccaacaccttgtcactggtccattgcttccccatcatactttctccattcaacctgcgcctcgagagatcctctagagt

SEQ ID NO: 416149 - DNA, 285 bp, Homo sapiens
agagcatttaactgtacttccagaaaaaggtaatttctggcatgaaaatttcacgttaaaaataaaattattttttatatcaacagaaaatggtggctgtccagccaacagaagtggtcaatatactcaactgtttcactttcagtaaagacaaactagttgctcttgaactgttagcctcgtaagtatttcttttttttttttttttttttttacttgggaaaaaatgtagaagcgttttaagtgtctaattagtgtgtgttaatgtgtctaacaaaatacagt

SEQ ID NO: 416150 - DNA, 586 bp, Homo sapiens
  misc_feature (267)..(267): n is a, c, g, or t
ataccaagatatgctgattataatacattaacaaatttataagttgcgttcactaaattctgtcctgtaactacaaaataatatagcttaaattgcatgttaattgtatatcttacctatttagtttatatattattcttacaatataatcatgtatattaacaaacagccctgggattctaatcttcctctgcaactgtcttccaggacttactggcacttattacactgtgataagtggcagaaaagtagatgaaatattctttntccattagatttgttcttatgtggacatagatatctacagtcattacattagccttagaatttagcatcatacttttaagcaccctgggattctaatcttcctctgcaactgtcttccaggacttactggcacttattacactgtgataagtggcagaaaagtagaatgaaatattctttttccattagatttgttcttatgtgaccatgtaccaagccagctataaagtattgtatttctgtagaatatggaaaatagtatttgtcttacctttgctaaatgtttgcaatttctaagtaaaccttttatctcctaaaa

SEQ ID NO: 416151 - DNA, 3466 bp, Homo sapiens
tatgctaaatatattattagctcttaaattttagtatagatcgtattttttataaactattaccagtacagtagctagtagatattctgtgactgcctcattgtttatcttgctgctttggtccctatggctctagtatgaacattctcgtgtcttctgtggaaatgatttctgtgttatagttccatctttggtagaggtggggatgattgtattttgttttagttgacatcattctcaacttttagaaatactgttgaggaaaatgattaccgttggttttcaaattgacaactattttgcttccaaagacttcagtttccctttgttttatgtgtagacctcatatatgttcaacacattgcatactgccttgcacattgtaggaattcaacaagtcaagagttgataaaagctagaaagataaaactagcttagctatcatatcatcattgtccatattcttagctttgggaaaaatataccattttgcataaaatacataatcagtttcaaatgcataaggcaaagatatacagttgcacaacattgcaagtgaaatttacaaaggatttttatttttgtgtatgctaaaagtgctcctacttaaagcagttttctttattagaccaacaccttccagcaaagttagaaaccaaacacaagtgctcatttgcccaaattaaccagatagttatgtaaactgttcatattaagtctttagtggtttacaaacaataacattctggcttttcttccataccttttaggaatcagccttaattttaagtatagcagtcactttcctcaaggtactatgcagcatactttagattgcttatttatcattataaggtgataggtaataaatttgaggtttacttgtcatataatttcatatggcagatattgattcaaggagcattctattagaaaaagttgataaattatcctcccttacaaatatcatcttgcatttggagcaggtatttttttcttattagttaaagactgggtacagttatagtagatgctcaataaatgcttagtcagtgattgatctaacatcaaactaacagctttcagaaaggagactgttgacatcttttcaccaaggagtatatttgtagagtaatatatgtgtggaattttgaaattatatcatttgacatgatttatgaggcttatttaagctggagttagtaacgtaatagaagtattatttatacagaacatagttgaaagataggagatgtgaaagattaagtagtattttcttgtgcaaggcatattaataaatgtaattaaatgtcttaataagcagctggctgaactctagagagaactgctgtagtcttctgcaatcagtctctgtattggtatatccagtactatcgggtttaggttctttttatttttccttaaatcttacttgtttctagcgtcttaagagtggtaatggtaaaatgtgaagttacaataaacttctgcttgttttctcagaacatctttggcatgaggaagaactttttgtgaatgatacagtagtctcagcatctgttaatttgtggttttcaaagcatttttgacagagtttacctaatgtaaaaagattaaacagttttataaaacacaaataaacattcctacctgaactgtgaggaacagagtgtatagtacaaatgtaattaggcattgcctcctggcgaggttcttgatgcatgacttcgatgctggctgctgactgaggtgaccactgtcagtattgtactttggcatatgttgtttttaggaaaataatggaatgcattcttagattaacttactgtttttgagttggaaaaaataaaagatgaggtattataagtatgccaaatatttatacactacaaaagattaaaaaaggagagggagaaaaaaaaaaggccagttatgattttaatagcgtctaatttttttttgactcgaattttgtggacactagtcaattgcataatttaacatggaggagctttcatttaaaagaagttctcagctactatattctgccattaaaattaaccatgcctgttaattttacattgcttgaagatataagtaagctgccgtcaatattgttttaagattttcttatagtttatgtttaaatggaaaagttacatatataatctatggtgcagggtcaggcattggccattaaagataagtttggctaactattttactgaagagactaatggtcttccctctgttgtactgctatgtttcttgatctgtttttccccaatgtaacagtctacattgaagtcctttagctctctccatatactaattgacatttgttaaggattcaatattttgtgaattctttttacccttaaaatgcatatctttcagagagataagaatgaattttgcaataatttatatgcagagtgtgcttatgggtttctgggagttcaagttagtaccccagagtgcttaaaagtatgatgctaaattctaaggctaatgtaatgactgtagattatctatgtccacattgttcaacagaaatataatgtgaaccacaacataatttttaattttctagtagccatattaaaaaagaaacaagcaaaattaattttaataacagtttatgtaacccagtatattaaaaatatcatttcaacatgtaatcaatataaaagattattaatgaaacaccttatcttctttttcttccatactaagtcttagatttgagtgtattttgcactcacagcacatctcaattctgactggccacattttaagtgctcagtagtcacatatggctaagggctactatactggacagtacagattcatagagtataaaatatgactttaactttggagatggtgaggtaggcctgtaattatggtactttaaaaattcagaatatttagaaaagcatctaatagaattatccacttgttttccttcatcttcattttaatatgttctagaagtaggatcagcctgttccaatttgccaagcattattaaggaggaataattccataccatgtaaaataccatgatatgctgattatactacattaacaaatttttaagttgcgttcactaaattctgtcctgtttcttcaaaataatatagcttaaattgcatgttaattgtatatcttacctattttgtttttatattattcttacaatataatcatgtatattaacaaacagccctgggattctaatcttcctctgcaactgtcttccaggacttactggcacttattacactgtgataagtggcagaaaagtagaatgaaatattctttttccattagatttgttcttatgtgaccatgtaccaagccagctataaagtattgtatttctgtagaatatggaaaatagtatttgtcttacctttgctaaatgtttgcaatttctaagtaaaccttttatctcctaaaa

SEQ ID NO: 416152 - DNA, 3412 bp, Homo sapiens
tatgctaaatatattattagctcttaaattttagtatagatcgtattttttataaactattaccagtacagtagctagtagatattctgtgactgcctcattgtttatcttgctgctttggtccctatggctctagtatgaacattctcgtgtcttctgtggaaatgatttctgtgttatagttccatctttggtagaggtggggatgattgtattttgttttagttgacatcattctcaacttttagaaatactgttgaggaaaatgattaccgttggttttcaaattgacaactattttgcttccaaagacttcagtttccctttgttttatgtgtagacctcatatatgttcaacacattgcatactgccttgcacattgtaggaattcaacaagtcaagagttgataaaagctagaaagataaaactagcttagctatcatatcatcattgtccatattcttagctttgggaaaaatataccattttgcataaaatacataatcagtttcaaatgcataaggcaaagatatacagttgcacaacattgcaagtgaaatttacaaaggatttttatttttgtgtatgctaaaagtgctcctacttaaagcagttttctttattagaccaacaccttccagcaaagttagaaaccaaacacaagtgctcatttgcccaaattaaccagatagttatgtaaactgttcatattaagtctttagtggtttacaaacaataacattctggcttttcttccataccttttaggaatcagccttaattttaagtatagcagtcactttcctcaaggtactatgcagcatactttagattgcttatttatcattataaggtgataggtaataaatttgaggtttacttgtcatataatttcatatggcagatattgattcaaggagcattctattagaaaaattttcttattagttaaagactgggtacagttatagtagatgctcaataaatgcttagtcagtgattgatctaacatcaaactaacagctttcagaaaggagactgttgacatcttttcaccaaggagtatatttgtagagtaatatatgtgtggaattttgaaattatatcatttgacatgatttatgaggcttatttaagctggagttagtaacgtaatagaagtattatttatacagaacatagttgaaagataggagatgtgaaagattaagtagtattttcttgtgcaaggcatattaataaatgtaattaaatgtcttaataagcagctggctgaactctagagagaactgctgtagtcttctgcaatcagtctctgtattggtatatccagtactatcgggtttaggttctttttatttttccttaaatcttacttgtttctagcgtcttaagagtggtaatggtaaaatgtgaagttacaataaacttctgcttgttttctcagaacatctttggcatgaggaagaactttttgtgaatgatacagtagtctcagcatctgttaatttgtggttttcaaagcatttttgacagagtttacctaatgtaaaaagattaaacagttttataaaacacaaataaacattcctacctgaactgtgaggaacagagtgtatagtacaaatgtaattaggcattgcctcctggcgaggttcttgatgcatgacttcgatgctggctgctgactgaggtgaccactgtcagtattgtactttggcatatgttgtttttaggaaaataatggaatgcattcttagattaacttactgtttttgagttggaaaaaataaaagatgaggtattataagtatgccaaatatttatacactacaaaagattaaaaaaggagagggagaaaaaaaaaaggccagttatgattttaatagcgtctaatttttttttgactcgaattttgtggacactagtcaattgcataatttaacatggaggagctttcatttaaaagaagttctcagctactatattctgccattaaaattaaccatgcctgttaattttacattgcttgaagatataagtaagctgccgtcaatattgttttaagattttcttatagtttatgtttaaatggaaaagttacatatataatctatggtgcagggtcaggcattggccattaaagataagtttggctaactattttactgaagagactaatggtcttccctctgttgtactgctatgtttcttgatctgtttttccccaatgtaacagtctacattgaagtcctttagctctctccatatactaattgacatttgttaaggattcaatattttgtgaattctttttacccttaaaatgcatatctttcagagagataagaatgaattttgcaataatttatatgcagagtgtgcttatgggtttctgggagttcaagttagtaccccagagtgcttaaaagtatgatgctaaattctaaggctaatgtaatgactgtagattatctatgtccacattgttcaacagaaatataatgtgaaccacaacataatttttaattttctagtagccatattaaaaaagaaacaagcaaaattaattttaataacagtttatgtaacccagtatattaaaaatatcatttcaacatgtaatcaatataaaagattattaatgaaacaccttatcttctttttcttccatactaagtcttagatttgagtgtattttgcactcacagcacatctcaattctgactggccacattttaagtgctcagtagtcacatatggctaagggctactatactggacagtacagattcatagagtataaaatatgactttaactttggagatggtgaggtaggcctgtaattatggtactttaaaaattcagaatatttagaaaagcatctaatagaattatccacttgttttccttcatcttcattttaatatgttctagaagtaggatcagcctgttccaatttgccaagcattattaaggaggaataattccataccatgtaaaataccatgatatgctgattatactacattaacaaatttttaagttgcgttcactaaattctgtcctgtttcttcaaaataatatagcttaaattgcatgttaattgtatatcttacctattttgtttttatattattcttacaatataatcatgtatattaacaaacagccctgggattctaatcttcctctgcaactgtcttccaggacttactggcacttattacactgtgataagtggcagaaaagtagaatgaaatattctttttccattagatttgttcttatgtgaccatgtaccaagccagctataaagtattgtatttctgtagaatatggaaaatagtatttgtcttacctttgctaaatgtttgcaatttctaagtaaaccttttatctcctaaaa

SEQ ID NO: 416153 - DNA, 2236 bp, Homo sapiens
  misc_feature (267)..(267): n is a, c, g, or t
ataccaagatatgctgattataatacattaacaaatttataagttgcgttcactaaattctgtcctgtaactacaaaataatatagcttaaattgcatgttaattgtatatcttacctatttagtttatatattattcttacaatataatcatgtatattaacaaacagccctgggattctaatcttcctctgcaactgtcttccaggacttactggcacttattacactgtgataagtggcagaaaagtagatgaaatattctttntccattagatttgttcttatgtgaccatgtaccaagccagctataaagtattgtataaagcgctttatacaatactgatagttattttatccacgtacaataaatcactcatttaattaaacagttttataaaacacaaataaacattcctacctgaactgtgaggaacagagtgtatagtacaaatgtaattaggcattgcctcctggcgaggttcttgatgcatgacttcgatgctggctgctgactgaggtgaccactgtcagtattgtactttggcatatgttgtttttaggaaaataatggaatgcattcttagattaacttactgtttttgagttggaaaaaataaaagatgaggtattataagtatgccaaatatttatacactacaaaagattaaaaaaggagagggagaaaaaaaaaaggccagttatgattttaatagcgtctaatttttttttgactcgaattttgtggacactagtcaattgcataatttaacatggaggagctttcatttaaaagaagttctcagctactatattctgccattaaaattaaccatgcctgttaattttacattgcttgaagatataagtaagctgccgtcaatattgttttaagattttcttatagtttatgtttaaatggaaaagttacatatataatctatggtgcagggtcaggcattggccattaaagataagtttggctaactattttactgaagagactaatggtcttccctctgttgtactgctatgtttcttgatctgtttttccccaatgtaacagtctacattgaagtcctttagctctctccatatactaattgacatttgttaaggattcaatattttgtgaattctttttacccttaaaatgcatatctttcagagagataagaatgaattttgcaataatttatatgcagagtgtgcttatgggtttctgggagttcaagttagtaccccagagtgcttaaaagtatgatgctaaattctaaggctaatgtaatgactgtagattatctatgtccacattgttcaacagaaatataatgtgaaccacaacataatttttaattttctagtagccatattaaaaaagaaacaagcaaaattaattttaataacagtttatgtaacccagtatattaaaaatatcatttcaacatgtaatcaatataaaagattattaatgaaacaccttatcttctttttcttccatactaagtcttagatttgagtgtattttgcactcacagcacatctcaattctgactggccacattttaagtgctcagtagtcacatatggctaagggctactatactggacagtacagattcatagagtataaaatatgactttaactttggagatggtgaggtaggcctgtaattatggtactttaaaaattcagaatatttagaaaagcatctaatagaattatccacttgttttccttcatcttcattttaatatgttctagaagtaggatcagcctgttccaatttgccaagcattattaaggaggaataattccataccatgtaaaataccatgatatgctgattatactacattaacaaatttttaagttgcgttcactaaattctgtcctgtttcttcaaaataatatagcttaaattgcatgttaattgtatatcttacctattttgtttttatattattcttacaatataatcatgtatattaacaaacagccctgggattctaatcttcctctgcaactgtcttccaggacttactggcacttattacactgtgataagtggcagaaaagtagaatgaaatattctttttccattagatttgttcttatgtgaccatgtaccaagccagctataaagtattgtatttctgtagaatatggaaaatagtatttgtcttacctttgctaaatgtttgcaatttctaagtaaaccttttatctcctaaaa

SEQ ID NO: 416154 - DNA, 3611 bp, Homo sapiens
tatgctaaatatattattagctcttaaattttagtatagatcgtattttttataaactattaccagtacagtagctagtagatattctgtgactgcctcattgtttatcttgctgctttggtccctatggctctagtatgaacattctcgtgtcttctgtggaaatgatttctgtgttatagttccatctttggtagaggtggggatgattgtattttgttttagttgacatcattctcaacttttagaaatactgttgaggaaaatgattaccgttggttttcaaattgacaactattttgcttccaaagacttcagtttccctttgttttatgtgtagacctcatatatgttcaacacattgcatactgccttgcacattgtaggaattcaacaagtcaagagttgataaaagctagaaagataaaactagcttagctatcatatcatcattgtccatattcttagctttgggaaaaatataccattttgcataaaatacataatcagtttcaaatgcataaggcaaagatatacagttgcacaacattgcaagtgaaatttacaaaggatttttatttttgtgtatgctaaaagtgctcctacttaaagcagttttctttattagaccaacaccttccagcaaagttagaaaccaaacacaagtgctcatttgcccaaattaaccagatagttatgtaaactgttcatattaagtctttagtggtttacaaacaataacattctggcttttcttccataccttttaggaatcagccttaattttaagtatagcagtcactttcctcaaggtactatgcagcatactttagattgcttatttatcattataaggtgataggtaataaatttgaggtttacttgtcatataatttcatatggcagatattgattcaaggagcattctattagaaaaagttgataaattatcctcccttacaaatatcatcttgcatttggagcaggtatttttttcttattagttaaagactgggtacagttatagtagatgctcaataaatgcttagtcagtgattgatctaacatcaaactaacagctttcagaaaggagactgttgacatcttttcaccaaggagtatatttgtagagtaatatatgtgtggaattttgaaattatatcatttgacatgatttatgaggcttatttaagctggagttagtaacgtaatagaagtattatttatacagaacatagttgaaagataggagatgtgaaagattaagtagtattttcttgtgcaaggcatattaataaatgtaattaaatgtcttaataagcagctggctgaactctagagagaactgctgtagtcttctgcaatcagtctctgtattggtatatccagtactatcgggtttaggttctttttatttttccttaaatcttacttgtttctagcgtcttaagagtggtaatggtaaaatgtgaagttacaataaacttctgcttgttttctcagaacatctttggcatgaggaagaactttttgtgaatgatacagtagtctcagcatctgttaatttgtggttttcaaagcatttttgacagagtttacctaatgtaaaaagattaaacagttttataaaacacaaataaacattcctacctgaactgtgaggaacagagtgtatagtacaaatgtaattaggcattgcctcctggcgaggttcttgatgcatgacttcgatgctggctgctgactgaggtgaccactgtcagtattgtactttggcatatgttgtttttaggaaaataatggaatgcattcttagattaacttactgtttttgagttggaaaaaataaaagatgaggtattataagtatgccaaatatttatacactacaaaagattaaaaaaggagagggagaaaaaaaaaaggccagttatgattttaatagcgtctaatttttttttgactcgaattttgtggacactagtcaattgcataatttaacatggaggagctttcatttaaaagaagttctcagctactatattctgccattaaaattaaccatgcctgttaattttacattgcttgaagatataagtaagctgccgtcaatattgttttaagattttcttatagtttatgtttaaatggaaaagttacatatataatctatggtgcagggtcaggcattggccattaaagataagtttggctaactattttactgaagagactaatggtcttccctctgttgtactgctatgtttcttgatctgtttttccccaatgtaacagtctacattgaagtcctttagctctctccatatactaattgacatttgttaaggattcaatattttgtgaattctttttacccttaaaatgcatatctttcagagagataagaatgaattttgcaataatttatatgcagagtgtgcttatgggtttctgggagttcaagttagtaccccagagtgcttaaaagtatgatgctaaattctaaggctaatgtaatgactgtagattatctatgtccacattgttcaacagaaatataatgtgaaccacaacataatttttaattttctagtagccatattaaaaaagaaacaagcaaaattaattttaataacagtttatgtaacccagtatattaaaaatatcatttcaacatgtaatcaatataaaagattattaatgaaacaccttatcttctttttcttccatactaagtcttagatttgagtgtattttgcactcacagcacatctcaattctgactggccacattttaagtgctcagtagtcacatatggctaagggctactatactggacagtacagattcatagagtataaaatatgactttaactttggagatggtgaggtaggcctgtaattatggtactttaaaaattcagaatatttagaaaagcatctaatagaattatccacttgttttccttcatcttcattttaatatgttctagaagtaggatcagcctgttccaatttgccaagcattattaaggaggaataattccataccatgtaaaataccatgatatgctgattatactacattaacaaatttttaagttgcgttcactaaattctgtcctgtttcttcaaaataatatagcttaaattgcatgttaattgtatatcttacctattttgtttttatattattcttacaatataatcatgtatattaacaaacagccctgggattctaatcttcctctgcaactgtcttccaggacttactggcacttattacactgtgataagtggcagaaaagtagaatgaaatattctttttccattagatttgttcttatgtgaccatgtaccaagccagctataaagtattgtatttctgtagaatatggaaaatagtatttgtcttacctttgctaaatgtttgcaatttctaagtaaaccttttatctcctaaaaaaaaaaaggggggtaatataggagggcagtagtcagttgaagggccaaagggttaaaaagggggacgggggaagcgggtgtgacactgggggatggacccacaacgaaaaagtgacgtggagtaaaaaaaacgaagtaatctatc

SEQ ID NO: 416155 - DNA, 3412 bp, Homo sapiens
tatgctaaatatattattagctcttaaattttagtatagatcgtattttttataaactattaccagtacagtagctagtagatattctgtgactgcctcattgtttatcttgctgctttggtccctatggctctagtatgaacattctcgtgtcttctgtggaaatgatttctgtgttatagttccatctttggtagaggtggggatgattgtattttgttttagttgacatcattctcaacttttagaaatactgttgaggaaaatgattaccgttggttttcaaattgacaactattttgcttccaaagacttcagtttccctttgttttatgtgtagacctcatatatgttcaacacattgcatactgccttgcacattgtaggaattcaacaagtcaagagttgataaaagctagaaagataaaactagcttagctatcatatcatcattgtccatattcttagctttgggaaaaatataccattttgcataaaatacataatcagtttcaaatgcataaggcaaagatatacagttgcacaacattgcaagtgaaatttacaaaggatttttatttttgtgtatgctaaaagtgctcctacttaaagcagttttctttattagaccaacaccttccagcaaagttagaaaccaaacacaagtgctcatttgcccaaattaaccagatagttatgtaaactgttcatattaagtctttagtggtttacaaacaataacattctggcttttcttccataccttttaggaatcagccttaattttaagtatagcagtcactttcctcaaggtactatgcagcatactttagattgcttatttatcattataaggtgataggtaataaatttgaggtttacttgtcatataatttcatatggcagatattgattcaaggagcattctattagaaaaagttgataaattatcctcccttacaaatatcatcttgcatttggagcaggtatttttttcttattagttaaagactgggtacagttatagtagatgctcaataaatgcttagtcagtgattgatctaacatcaaactaacagctttcagaaaggagactgttgacatcttttcaccaaggagtatatttgtagagtaatatatgtgtggaattttgaaattatatcatttgacatgatttatgaggcttatttaagctggagttagtaacgtaatagaagtattatttatacagaacatagttgaaagataggagatgtgaaagattaagtagtattttcttgtgcaaggcatattaataaatgtaattaaatgtcttaataagcagctggctgaactctagagagaactgctgtagtcttctgcaatcagtctctgtattggtatatccagtactatcgggtttaggttctttttatttttccttaaatcttacttgtttctagcgtcttaagagtggtaatggtaaaatgtgaagttacaataaacttctgcttgttttctcagaacatctttggcatgaggaagaactttttgtgaatgatacagtagtctcagcatctgttaatttgtggttttcaaagcatttttgacagagtttacctaatgtaaaaagattaaacagttttataaaacacaaataaacattcctacctgaactgtgaggaacagagtgtatagtacaaatgtaattaggcattgcctcctggcgaggttcttgatgcatgacttcgatgctggctgctgactgaggtgaccactgtcagtattgtactttggcatatgttgtttttaggaaaataatggaatgcattcttagattaacttactgtttttgagttggaaaaaataaaagatgaggtattataagtatgccaaatatttatacactacaaaagattaaaaaaggagagggagaaaaaaaaaaggccagttatgattttaatagcgtctaatttttttttgactcgaattttgtggacactagtcaattgcataatttaacatggaggagctttcatttaaaagaagttctcagctactatattctgccattaaaattaaccatgcctgttaattttacattgcttgaagatataagtaagctgccgtcaatattgttttaagattttcttatagtttatgtttaaatggaaaagttacatatataatctatggtgcagggtcaggcattggccattaaagataagtttggctaactattttactgaagagactaatggtcttccctctgttgtactgctatgtttcttgatctgtttttccccaatgtaacagtctacattgaagtcctttagctctctccatatactaattgacatttgttaaggattcaatattttgtgaattctttttacccttaaaatgcatatctttcagagagataagaatgaattttgcaataatttatatgcagagtgtgcttatgggtttctgggagttcaagttagtaccccagagtgcttaaaagtatgatgctaaattctaaggctaatgtaatgactgtagattatctatgtccacattgttcaacagaaatataatgtgaaccacaacataatttttaattttctagtagccatattaaaaaagaaacaagcaaaattaattttaataacagtttatgtaacccagtatattaaaaatatcatttcaacatgtaatcaatataaaagattattaatgaaacaccttatcttctttttcttccatactaagtcttagatttgagtgtattttgcactcacagcacatctcaattctgactggccacattttaagtgctcagtagtcacatatggctaagggctactatactggacagtacagattcatagagtataaaatatgactttaactttggagatggtgaggtaggcctgtaattatggtactttaaaaattcagaatatttagaaaagcatctaatagaattatccacttgttttccttcatcttcattttaatatgttctagaagtaggatcagcctgttccaatttgccaagcattattaaggaggaataattccataccatgtaaaataccatgatatgctgattatactacattaacaaatttttaagttgcgttcactaaattctgtcctgtttcttctatattattcttacaatataatcatgtatattaacaaacagccctgggattctaatcttcctctgcaactgtcttccaggacttactggcacttattacactgtgataagtggcagaaaagtagaatgaaatattctttttccattagatttgttcttatgtgaccatgtaccaagccagctataaagtattgtatttctgtagaatatggaaaatagtatttgtcttacctttgctaaatgtttgcaatttctaagtaaaccttttatctcctaaaa

SEQ ID NO: 416156 - DNA, 837 bp, Homo sapiens
ctaggcatgatgcagggaggacccagacctccaaattgggatatgaggttcagagaacagcctccctatctcccagcctggacttcagacttctcctcacctgctaaggtcactctcactgagtcccagcaagtctccttgtctcttctcttggtgggcatgccctggtctgaattactcttgggtacagccccctctcccgcaggcaggcaggctgcctctcaatgctttgcagggctcagcttgagaaggcatggcgggtcctgacagccaacaagaaccacactttcttgcctgatcttcagcgcccccacagtctggctcccatgtccctctttagccttgtgctcacctggcaacagcatctgcccaggccttccccaaccctcacggaccctcctgggtgggcccagcgtcagcctgggtaggctttccccgttctggggctgccatgctgccatgaaggtgttacatttgacaatactgagtttcactcagcaatggcctcttgtgtgcattttagttttctaagtacatcatcataagtctgcaagcaaggaccatatcctaaatttatctgacttccctacggtccccagtaggcacatgacggacaccactcagtggctgatgggaaagtcgaggcccagcttgggagacttctgacaatagggccacaggagatgccccccacccctggtggagtgttggagcagacagacaagctgccttcaaggacatgcattctctgatcattaggcttgtgccgcagatgaggtttcgtgggcagagttagcagagttctacgaagatgggctgccagtgaatgtttgctct

SEQ ID NO: 416157 - DNA, 832 bp, Homo sapiens
tagaccggactggggctcagaggggtttccatgactacgggactcctccgaccggtaccctgcagatgcttgtcagaaattggcttggaggccgggctcggtggctgacgcctgtaatcccagcactttgggaggccgaggcgggcggatcacgaggtcagaagatcgagaccatcctagctaacacggtgaaaccccgtctctactaaaaatacaaaaaaaaaaaaaaaaaaaaaattagccgggagtggtggcgggcgcctgtttgccccattacccggggggctggagcggcaggaaatagacgcgtggtgacacccggggaggcgggggttgtgcaaaatggacgccaagatcgcgccactgcactcccagcctgggcgacagagcgagactccgtctcagaaaaaaaaaaaaagaaagaaattggcttggagatttttcgccggccactccttcttgagccctgactgaaaagtgagttctcaatttgtgcttccagaaagtttgtcctcccagagtttgttcctggacagggctgaaggtactctgttccgtactagagtttcagattcgggctggagttggagagggtatgctgtggatggcagtagcagaaaccgctagttctaaggcacccttctactcttctaaaatctttccccaggcacaaaaccacccggaataaaggctacgttccctagcattccttgcagttggctgtggctctgtgattgcaatctggtcagtggaatataaggcagctttccctacttaagtgacagctggctgtactcttggttcctttttctccctttttcccagtgtgaat

SEQ ID NO: 416158 - DNA, 825 bp, Homo sapiens
gctgtttgcaagcaaaccagttgataatcaggctgtagaaagattctattatttcactcttccacactgaaaaacaaaaattacttgaaaaatttttgggtgcattttgcttactgacatttagtgggtcaaaacaaaaactatagtgcttcctgtattccatcgttcacactggtgactttgtgaggataaaaaagaacagagctgtcctctgaaaggaagagaaacccctaatctcatgttgcccagagcttttattttttgggacagcccagggatccaagacaaaggcctgtgcccacaggaaggcaaaaatacctggcaatgtgcttttttttccctattaggcctctaacatagtatctttttgttgttgttctaggcacccctcccatgcggggtctcttcccctggacaccttttcccttcccactattcctacccagggaacaaacagggtttcctgcacagagctgtgttattagagggaatgaatgttccatagttatttaatggtgtgccttgtggaaggcagagggaagtacttctctgtacgtgatttctatctttctaaaacctccgcaacacttccttcatgagcacacctactctagaatgacctcaaagtcagagatcctcaagagaagaagaaagaaatgattctataaaagatttatataagatatgcaagcagcttttatttttgctatgattaaatatgccctgtaaaatgctaaaataatttaaaaagttattttcaattttattggaaaatgatttctcttttattgagaatttacagtaaatgatcatctcttttctctc

SEQ ID NO: 416159 - DNA, 299 bp, Homo sapiens
ggagaggatcaagcaggcagagaggttcgcctaaatgcgctaggcccacgcggaaggtctttgggagttaaggaagtgtcagggaccctgcccaggggatattaggcgccttgagcaggacctggaaggtggacaggcgagggaaggagaacgttttcagcggcgccagcgcgcacctatggcctggctggggtgctaaggctgggctagactttctgtgctctctgccccctgcactcctctactctcccctgggaaggaccatggccacgccccacaaccccactgctccggcggcg

SEQ ID NO: 416160 - DNA, 2543 bp, Homo sapiens
tctcccaacaaggtggaggctgatgaatatgaactatctccagcccatcaccagctttttctttttcttcttgtccttatttgttttttagttctttataagaaaaagtgggggatatattgagaagtaccaagacggggagctatgggtttattgacaaaagagcataggacactgaaatagaaacgaagttattatttttctcttgtgatactctaagagaaaagctcttcctggaaaagccgatgatctctgaagatgctaaataaatgagcaggagtttccctgaaatggaggcgccctttgattggctgatctttccccgactcctgccaatcggagcatccctgggctccagctccataaacataagcaaagctacatgcttattcttctggacttggagtgtataccatttaaaggtgtgcggcgggtctctgttcacatggctcaactggaaacctgtttcatgaacaagcttactcaggaaccatctggtggtattccagcacattgttcttcagggggacgactctaagtcgctttgtggtggcagcagcttagaatcagtatttgtggttgggaaagatggacttacgggagcttggtaatgcaggtggtgaaggagcaggttatgagagcacttacaaccaagcctagctccctggaccagttcaagagcaaactgcagaacctgagctacactgagatcctgaaaatccgccagtccgagaggatgaaccaggaagatttccagtcccgcccgattttggaactaaaggagaagattcagccagaaatcttagagctgatcaaacagcaacgcctgaaccgccttgtggaagggacctgctttaggaaactcaatgcccggcggaggcaagacaagttttggtattgtcggctttcgccaaatcacaaagtcctgcattacggagacttagaagagagtcctcagggagaagtgccccacgattccttgcaggacaaactgccggtggcagatatcaaagccgtggtgacgggaaaggactgccctcatatgaaagagaaaggtgcccttaaacaaaacaaggaggtgcttgaactcgctttctccatcttgtatgactcaaactgccaactgaacttcatcgctcctgacaagcatgagtactgtatctggacggatggactgaatgcgctactcgggaaggacatgatgagcgacctgacgcggaatgacctggacaccctgctcagcatggaaatcaagctccgcctcctggacctggaaaacatccagatccctgacgcacctccgccgattcccaaggagcccagcaactatgacttcgtctatgactgtaactgaagtggccgggcccagacatgccccttccaaaactggaacacctagctaacaggagagaggaatgaaaacacacccacgccttggaaccgtcctttggtaaagggaagctgtgggtccacattcccttcagcatcacctctagccctggcaactttcagcccctagctggcatcttgctcaccgccctgattctgttcctcggctccactgcttcaggtcacttcccatggctgcagtccactggtgggacaagagcaaagcccactgccagtaagaaggccaaagggcccttccatcctagccctctgcaggcatgcccttccttcccttgggcaggaaagccagcagccccagactgcccaaaaacttgcccaccagaccaagggcagtgccccaaggcccctgtctggaggaaatggcctagctatttgatgagaagaccaaaccccacatcctcctttcccctctctctagaatcatctcgcaccaccagttacacttgaattaagatctgcgctcaaatctcctcccacctctctccctgcttttgccttgctctgttcctctttggtcccaagagcagcagccgcagcctcctcgtgatcctccctagcataaatttcccaaacagtccacaggtcccatgcccactttgcgtctgcactgtgatcgtgacaaatcttccctcctcaccagctagtctggggtttcctctccctgccccaggccagaactgccttcttcatttccacccacgctcccagcctcttagctgaaagcacaaatggtgaaatcagtagtctcgctccatctctaatagactaaacctaaatgcctctaggacggactgttgctatccaagcgtttggtgttaccttctcctgggaggtcctgctgcaactcaagttccacaggatggtcaagctgtcagacatccaagtttacatcattgtaattattactggtatttacaatttgcaagagttttgggttagttttttttttttttttgctttgtttttgtacaaaagagtctaacattttttgccaaacagatatatatttaatgaaaagaagagatacataaatgtgtgaatttccagtttttttttaattattttaatcccaaacatcttcctgaaaataacattcccttaaacatgctgtggaataaaatggattgtgatga

SEQ ID NO: 416161 - DNA, 3629 bp, Homo sapiens
tagtgcgtgtgctggggcgagcgggagcgggcgaggatgggcacaggatagaggcagagccacccacgccgccgcggccccacgctgggcgacagagcctccagttccccttcaatggtggcgggtcgccggagctctgatcgccgggaacccttgccgctgctgtcctgcgaccccaagcaggtatagacacgtgtggccgtttacgctgtaggatcctcattcccactggctttgaacattttggggacttacaatgccgccacccgcggacatcgtcaaggtggccatagaatggccgggcgcctaccccaaactcatggaaattgatcagaaaaaaccactgtctgcaataataaaggaagtctgtgatgggtggtctcttgccaaccatgaatattttgcactccagcatgccgatagttcaaacttctatatcacagaaaagaaccgcaatgagataaaaaatggcactatccttcgattaaccacatctccagctcagaacgcccagcagctccatgaacgaatccagtcctcgagtatggatgccaagctggaagccctgaaggacttggccagcctctcccgggatgtcacgtttgcccaggagtttataaacctggacggtatctctctcctcacgcagatggtggagagcggcactgagcgataccagaaattgcagaagatcatgaagccttgctttggagacatgctgtccttcaccctgacggccttcgttgagctgatggaccatggcatagtgtcctgggatacattttcggtggcgttcattaagaagatagcaagttttgtgaacaagtcagccatagacatctcgatcctgcagcggtccttggccattttggagtcgatggtgctcaatagccatgacctctaccagaaagtggcgcaggagatcaccatcggccagctcattccacacctgcaagggtcagatcaagaaatccaaacctatactattgcagtgattaatgcgcttttcctgaaggctcctgatgagaggaggcaggagatggcgaatattttggctcagaagcaactgcgttccatcattttaacacatgtcatccgagcccagcgggccatcaacaatgagatggcgcaccagctgtatgttctacaagtgctcacctttaacctcctggaagacaggatgatgaccaaaatggacccccaggaccaggctcagagggacatcatatttgaacttcgaagaattgcttttgatgctgagtctgaacctaacaacagcagtggcagcatggagaaacgcaagtccatgtacacgcgagattataagaagcttgggttcattaatcatgtcaaccctgccatggacttcacgcagactccacctgggatgttggctctggacaacatgctgtactttgccaagcaccaccaagatgcctacatccggattgtgcttgagaacagtagtcgagaagacaagcatgaatgtccctttggccgcagtagtatagagctgaccaagatgctatgtgagatcttgaaagtgggcgagttgcctagtgagacctgcaacgacttccacccgatgttcttcacccacgacagatcctttgaggagtttttctgcatctgtatccagctcctgaacaagacatggaaggaaatgagggcaacttctgaagacttcaacaaggtaatgcaggtggtgaaggagcaggttatgagagcacttacaaccaagcctagctccctggaccagttcaagagcaaactgcagaacctgagctacactgagatcctgaaaatccgccagtccgagaggatgaaccaggaagatttccagtcccgcccgattttggaactaaaggagaagattcagccagaaatcttagagctgatcaaacagcaacgcctgaaccgccttgtggaagggacctgctttaggaaactcaatgcccggcggaggcaagacaagttttggtattgtcggctttcgccaaatcacaaagtcctgcattacggagacttagaagagagtcctcagggagaagtgccccacgattccttgcaggacaaactgccggtggcagatatcaaagccgtggtgacgggaaaggactgccctcatatgaaagagaaaggtgcccttaaacaaaacaaggaggtgcttgaactcgctttctccatcttgtatgactcaaactgccaactgaacttcatcgctcctgacaagcatgagtactgtatctggacggatggactgaatgcgctactcgggaaggacatgatgagcgacctgacgcggaatgacctggacaccctgctcagcatggaaatcaagctccgcctcctggacctggaaaacatccagatccctgacgcacctccgccgattcccaaggagcccagcaactatgacttcgtctatgactgtaactgaagtggccgggcccagacatgccccttccaaaactggaacacctagctaacaggagagaggaatgaaaacacacccacgccttggaaccgtcctttggtaaagggaagctgtgggtccacattcccttcagcatcacctctagccctggcaactttcagcccctagctggcatcttgctcaccgccctgattctgttcctcggctccactgcttcaggtcacttcccatggctgcagtccactggtgggacaagagcaaagcccactgccagtaagaaggccaaagggcccttccatcctagccctctgcaggcatgcccttccttcccttgggcaggaaagccagcagccccagactgcccaaaaacttgcccaccagaccaagggcagtgccccaaggcccctgtctggaggaaatggcctagctatttgatgagaagaccaaaccccacatcctcctttcccctctctctagaatcatctcgcaccaccagttacacttgaattaagatctgcgctcaaatctcctcccacctctctccctgcttttgccttgctctgttcctctttggtcccaagagcagcagccgcagcctcctcgtgatcctccctagcataaatttcccaaacagtccacaggtcccatgcccactttgcgtctgcactgtgatcgtgacaaatcttccctcctcaccagctagtctggggtttcctctccctgccccaggccagaactgccttcttcatttccacccacgctcccagcctcttagctgaaagcacaaatggtgaaatcagtagtctcgctccatctctaatagactaaacctaaatgcctctaggacggactgttgctatccaagcgtttggtgttaccttctcctgggaggtcctgctgcaactcaagttccacaggatggtcaagctgtcagacatccaagtttacatcattgtaattattactggtatttacaatttgcaagagttttgggttagttttttttttttttttgctttgtttttgtacaaaagagtctaacattttttgccaaacagatatatatttaatgaaaagaagagatacataaatgtgtgaatttccagtttttttttaattattttaatcccaaacatcttcctgaaaataacattcccttaaacatgctgtggaataaaatggattgtgatga

SEQ ID NO: 416162 - DNA, 2877 bp, Homo sapiens
  misc_feature (931)..(931): n is a, c, g, or t
  misc_feature (1448)..(1448): n is a, c, g, or t
  misc_feature (2025)..(2025): n is a, c, g, or t
tagtgcgtgtgctggggcgagcgggagcgggcgaggatgggcacaggatagaggcagagccacccacgccgccgcggccccacgctgggcgacagagcctccagttccccttcaatggtggcgggtcgccggagctctgatcgccgggaacccttgccgctgctgtcctgcgaccccaagcaggtatagacacgtgtggccgtttacgctgtaggatcctcattcccactggctttgaacattttggggacttacaatgccgccacccgcggacatcgtcaaggtggccatagaatggccgggcgcctaccccaaactcatggaaattgatcagaaaaaaccactgtctgcaataataaaggaagtctgtgatgggtggtctcttgccaaccatgaatattttgcactccagcatgccgatagttcaaacttctatatcacagaaaagaaccgcaatgagataaaaaatggcactatccttcgattaaccacatctccagtaagttgatcttagcttctgacttccagcaaactctttgctctgcgtttctgctatatgtgattgtgggatattaatttttgaggttgactttagtgcaaagcaaaaggcttccagaatgtcctgacatgcagattctggattagcaggaatgcccctccgtagatttcccactgcagaggaggaagaccttattccaggcgaagggcaagcttgtctaacctgcggcccaggatagctttgaattcacaaattcgtaaactttctcaaaacattatgagttgttctgtattttatttagttcatcagctatcgttagcgtattttatgtgtggcccaagacattcttcttcttcctgtggcccagggaagccaaaagattggacacttctgctttaagatttgagtttggaggtcatcttaacaacttcngtgttacagctgggatcactcacctgtaccaattggttttacccacctactcacacatccacctaatgccatctgagcaaattcagacaacaaacaaagcaaacaaaaccaaagtcagttactttcctttaaagtcggttactttcctttaaagtcagtgtggctgggcgcggtggctcatgcctgtaatcccagcactttgggaggccgaggcaggtggatcaggaggtcaggagatcaagaccatcttggctaacacagtgaaaccctgtctctactaaaaatacaaaaaattagccgggcgtggtggtggacgcctgtagtcccagctactcgggaggctaaggcaggagaatggcgtgaaacctaataggtggagcttgcagtgagcagaggtagtgccactgcactccagcctgggtgagagagtgagactccatctcaaaaaaaaaaagaaaaaaaagaaaaagtcagtgtgtgtgtgtgtgtgtgtgtctgtgtgtgtgtgtgtgtgtgngagagagagagagagtttaagtattttgtagctttaatgggttattatgacaattcataaaaataatttagaaatattgaccacttcactgatccattgacagctgattctacataagaactttagagtcttctgaattaaagctgctaaacaagacgctacagtatatttagactattgtagctgatgatgtctctcttcttggtctttcctacttgcttggagatactttaggtagtaacattagcatatttaactatattattttacagtgcatttcattgctttcctaaaaaattatctgccccaaatacaccaagtgttactattttcactctgcatatgtgatgaaaactgtgtctaactatcattttcagtttccactgaagccatgtggtagactaaaaataaatttaaaaattgggaaaagcatctggctaaaattaagctgtgggtactgtaactaccataaatccttattgttgaaaattacattagtgtggcttagaaactcctaaacattttgcccaataacatcctgaacctaaaaacagtgatgagctcaatggagtgagtngctacagttggctgaactgtctttgatgcctgctttgctacttaatggagattataatctactcatttttcagtggctacatgatgagctgaggcgttttcgtctgactttgcattggtcttcttactcaagtcagcatgaatgaatgttaatttgacctttacaccattgttttatgtgttttttgtagtttctgattatcctgctaaaagtcatcatctgcttgctggacagaaaaagtagaccttgccttttatttcattttagagtctaaaagacagctttttaatcaaagccttctctaagccaaagaaggagttagtttcatttttttactgctgtggatttatgaacaaaaattccgcaatctaagtcactccttgagagaaggcttagatgttaggcagagtgaagtttttcagcatcccaaaagaaacttagcgtgacttgtcatcaggaagaatggaatttgtgttcttgagataatgatcctcacattcccagctcagtgaatggaaagatgtgaaagccagtgtaagaggcactattaaaagatgggagcagccgggtgcagtggctcacgcctgtaatcccagcactttgggaggccgaggcaggcggatcacgaggtcaggagatcaagaccatcctggctaacacggtgtaaaccccgtctctactaaaaatacaaaaaaaattagccaggcgtggtggcaggcgcctgtagtcccagctactcgggaggctgacgcaggagaatggcgtgaacccaggaggtggagcttacagtgagcagagatgacgccactgcactccagcctgggcaacagagtgagactatgtctctgtctc

SEQ ID NO: 416163 - DNA, 1010 bp, Homo sapiens
tctcccaacaaggtggaggctgatgaatatgaactatctccagcccatcaccagctttttctttttcttcttgtccttatttgttttttagttctttataagaaaaagtgggggatatattgagaagtaccaagacggggagctatgggtttattgacaaaagagcataggacactgaaatagaaacgaagttattatttttctcttgtgatactctaagagaaaagctcttcctggaaaagccgatgatctctgaagatgctaaataaatgagcaggagtttccctgaaatggaggcgccctttgattggctgatctttccccgactcctgccaatcggagcatccctgggctccagctccataaacataagcaaagctacatgcttattcttctggacttggagtgtataccatttaaaggtgtgcggcgggtctctgttcacatggctcaactggaaacctgtttcatgaacaagcttactcaggaaccatctggtggtattccagcacattgttcttcagggggacgactctaagtcgctttgtggtggcagcagcttagaatcagtatttgtggttgggaaagatggacttacgggagcttggtaatgcaggtggtgaaggagcaggttatgagagcacttacaaccaagcctagctccctggaccagttcaagagcaaactgcagaacctgagctacactgagatcctgaaaatccgccagtccgagaggatgaaccaggaagatttccagtcccgcccgattttggaactaaaggagaagattcagccagaaatcttagagctgatcaaacagcaacgcctgaaccgccttgtggaagggacctgctttaggaaactcaatgcccggcggaggcaagaccaagttttggtatttgtcggctttttccccaaaatcacaaaagtccctgccttttccggggactttataaagagaggtccttcgtgggggaagaggccccccccaatttccttggcggggacaa

SEQ ID NO: 416164 - DNA, 717 bp, Homo sapiens
  misc_feature (656)..(656): n is a, c, g, or t
  misc_feature (694)..(694): n is a, c, g, or t
  misc_feature (701)..(701): n is a, c, g, or t
tagtgcgtgtgctggggcgagcgggagcgggcgaggatgggcacaggatagaggcagagccacccacgccgccgcggccccacgctgggcgacagagcctccagttccccttcaatggtggcgggtcgccggagctctgatcgccgggaacccttgccgctgctgtcctgcgaccccaagcaggtatagacacgtgtggccgtttacgctgtaggatcctcattcccactggctttgaacattttggggacttacaatgccgccacccgcggacatcgtcaaggtggccatagaatggccgggcgcctaccccaaactcatggaaattgatcagaaaaaaccactgtctgcaataataaaggaagtctgtgatgggtggtctcttgccaaccatgaatattttgcactccagcatgccgatagttcaaacttctatatcacagaaaagaaccgcaatgagataaaaaatggcactatccttcgattaaccacatctccagtaagttgatcttagcttctgacttccagcaaactctttgctctgcgtttctgctatatgtgattgtgggatattaatttttgaggttgactttagtgcaaagcaaaaggcttccagaatgtcctgacatgcagattctggatttaaggcccaaaanggggggaaaaaaaatttggggccccccccccccccccnttttttncccccccggggttttt

SEQ ID NO: 416165 - DNA, 768 bp, Homo sapiens
ctgcaactccgcagcgtccgctcgggaggagagttcgcggctgatctccggatgccttgcagatgcaaaatgtgtctctggccagcaggaggaaggaagaggaagtgagagcagcggcagccggcggtgcagcagccggccgacccagagtaaaaccttcttggcctctaactgagcagccctccatagaggattattagttcatgcctctgtgcaagaaagaaaaacaaaaacaaaatgcatgagttcattcactctcccatctcccctgctggcctgagagcacctgaacatagtgatggtactgtagccagtcatctgtgcatcctctgtgctctgcccactgcctggcatgtagaatatgcccagcaggggattttcagagctgaccagatgggagagtggtgaaactgaagatcagcccttttccctgcctgtaagcacctctaggaaaagatttaagagatgttgcaaacaaatcactccaacgtatttgggattgctcattgtgatgcctgatctgtgccagcctcttcctaccacatctatgactgttacaggggtaactgttccatcccttagtctgcagcacccggaatggatgtggaatcactgaaggaggtgagtggggaagaagacaagttggatcctgacagtttaaacccaggtgttttgcaaatccatcccttagtctgcagcacccggaatggatgtggaatcactgaaggaggtgggttggaaagaagacaagttggatcctgacagttt

SEQ ID NO: 416166 - DNA, 369 bp, Homo sapiens
aaaatgtcatcatgtttgattatttggaccttaccttgtagcacttcactcttgaggagggaaatcagatctctggtggttggtaaaatctgctgaagaattcaccttatcatgattttgttttactcacagaatcatgtcaaccctgccatggacttcacgcagactccacctgggatgttggctctggacaacatgctgtactttgccaagcaccaccaagatgcctacatccgggtaagcaagaagccccttttcagatattgtgtgtttcctactcaatgttaatttcaaactcacaaatacggagggattacctttagatgagtgaccccatattttctgtctttcttagtaaactaaaaaaaa

SEQ ID NO: 416167 - DNA, 3597 bp, Homo sapiens
ctgcaactccgcagcgtccgctcgggaggagagttcgcggctgatctccggatgccttgcagatgcaaaatgtgtctctggccagcaggaggaaggaagaggaagtgagagcagcggcagccggcggtgcagcagccggccgacccagagtgtatagacacgtgtggccgtttacgctgtaggatcctcattcccactggctttgaacattttggggacttacaatgccgccacccgcggacatcgtcaaggtggccatagaatggccgggcgcctaccccaaactcatggaaattgatcagaaaaaaccactgtctgcaataataaaggaagtctgtgatgggtggtctcttgccaaccatgaatattttgcactccagcatgccgatagttcaaacttctatatcacagaaaagaaccgcaatgagataaaaaatggcactatccttcgattaaccacatctccagctcagaacgcccagcagctccatgaacgaatccagtcctcgagtatggatgccaagctggaagccctgaaggacttggccagcctctcccgggatgtcacgtttgcccaggagtttataaacctggacggtatctctctcctcacgcagatggtggagagcggcactgagcgataccagaaattgcagaagatcatgaagccttgctttggagacatgctgtccttcaccctgacggccttcgttgagctgatggaccatggcatagtgtcctgggatacattttcggtggcgttcattaagaagatagcaagttttgtgaacaagtcagccatagacatctcgatcctgcagcggtccttggccattttggagtcgatggtgctcaatagccatgacctctaccagaaagtggcgcaggagatcaccatcggccagctcattccacacctgcaagggtcagatcaagaaatccaaacctatactattgcagtgattaatgcgcttttcctgaaggctcctgatgagaggaggcaggagatggcgaatattttggctcagaagcaactgcgttccatcattttaacacatgtcatccgagcccagcgggccatcaacaatgagatggcgcaccagctgtatgttctacaagtgctcacctttaacctcctggaagacaggatgatgaccaaaatggacccccaggaccaggctcagagggacatcatatttgaacttcgaagaattgcttttgatgctgagtctgaacctaacaacagcagtggcagcatggagaaacgcaagtccatgtacacgcgagattataagaagcttgggttcattaatcatgtcaaccctgccatggacttcacgcagactccacctgggatgttggctctggacaacatgctgtactttgccaagcaccaccaagatgcctacatccggattgtgcttgagaacagtagtcgagaagacaagcatgaatgtccctttggccgcagtagtatagagctgaccaagatgctatgtgagatcttgaaagtgggcgagttgcctagtgagacctgcaacgacttccacccgatgttcttcacccacgacagatcctttgaggagtttttctgcatctgtatccagctcctgaacaagacatggaaggaaatgagggcaacttctgaagacttcaacaaggtaatgcaggtggtgaaggagcaggttatgagagcacttacaaccaagcctagctccctggaccagttcaagagcaaactgcagaacctgagctacactgagatcctgaaaatccgccagtccgagaggatgaaccaggaagatttccagtcccgcccgattttggaactaaaggagaagattcagccagaaatcttagagctgatcaaacagcaacgcctgaaccgccttgtggaagggacctgctttaggaaactcaatgcccggcggaggcaagacaagttttggtattgtcggctttcgccaaatcacaaagtcctgcattacggagacttagaagagagtcctcagggagaagtgccccacgattccttgcaggacaaactgccggtggcagatatcaaagccgtggtgacgggaaaggactgccctcatatgaaagagaaaggtgcccttaaacaaaacaaggaggtgcttgaactcgctttctccatcttgtatgactcaaactgccaactgaacttcatcgctcctgacaagcatgagtactgtatctggacggatggactgaatgcgctactcgggaaggacatgatgagcgacctgacgcggaatgacctggacaccctgctcagcatggaaatcaagctccgcctcctggacctggaaaacatccagatccctgacgcacctccgccgattcccaaggagcccagcaactatgacttcgtctatgactgtaactgaagtggccgggcccagacatgccccttccaaaactggaacacctagctaacaggagagaggaatgaaaacacacccacgccttggaaccgtcctttggtaaagggaagctgtgggtccacattcccttcagcatcacctctagccctggcaactttcagcccctagctggcatcttgctcaccgccctgattctgttcctcggctccactgcttcaggtcacttcccatggctgcagtccactggtgggacaagagcaaagcccactgccagtaagaaggccaaagggcccttccatcctagccctctgcaggcatgcccttccttcccttgggcaggaaagccagcagccccagactgcccaaaaacttgcccaccagaccaagggcagtgccccaaggcccctgtctggaggaaatggcctagctatttgatgagaagaccaaaccccacatcctcctttcccctctctctagaatcatctcgcaccaccagttacacttgaattaagatctgcgctcaaatctcctcccacctctctccctgcttttgccttgctctgttcctctttggtcccaagagcagcagccgcagcctcctcgtgatcctccctagcataaatttcccaaacagtccacaggtcccatgcccactttgcgtctgcactgtgatcgtgacaaatcttccctcctcaccagctagtctggggtttcctctccctgccccaggccagaactgccttcttcatttccacccacgctcccagcctcttagctgaaagcacaaatggtgaaatcagtagtctcgctccatctctaatagactaaacctaaatgcctctaggacggactgttgctatccaagcgtttggtgttaccttctcctgggaggtcctgctgcaactcaagttccacaggatggtcaagctgtcagacatccaagtttacatcattgtaattattactggtatttacaatttgcaagagttttgggttagttttttttttttttttgctttgtttttgtacaaaagagtctaacattttttgccaaacagatatatatttaatgaaaagaagagatacataaatgtgtgaatttccagtttttttttaattattttaatcccaaacatcttcctgaaaataacattcccttaaacatgctgtggaataaaatggattgtgatga

SEQ ID NO: 416168 - DNA, 3599 bp, Homo sapiens
cgttggctgtgcccctgcaccttcagcacccaggcaccaaggggagccgtttttcataccaaaccaccagtgaaaacaggaagtgatgaagcaaaattcaccctgcatctgcactgagtgacttctctttctttttctgtcattcctcattaggtatagacacgtgtggccgtttacgctgtaggatcctcattcccactggctttgaacattttggggacttacaatgccgccacccgcggacatcgtcaaggtggccatagaatggccgggcgcctaccccaaactcatggaaattgatcagaaaaaaccactgtctgcaataataaaggaagtctgtgatgggtggtctcttgccaaccatgaatattttgcactccagcatgccgatagttcaaacttctatatcacagaaaagaaccgcaatgagataaaaaatggcactatccttcgattaaccacatctccagctcagaacgcccagcagctccatgaacgaatccagtcctcgagtatggatgccaagctggaagccctgaaggacttggccagcctctcccgggatgtcacgtttgcccaggagtttataaacctggacggtatctctctcctcacgcagatggtggagagcggcactgagcgataccagaaattgcagaagatcatgaagccttgctttggagacatgctgtccttcaccctgacggccttcgttgagctgatggaccatggcatagtgtcctgggatacattttcggtggcgttcattaagaagatagcaagttttgtgaacaagtcagccatagacatctcgatcctgcagcggtccttggccattttggagtcgatggtgctcaatagccatgacctctaccagaaagtggcgcaggagatcaccatcggccagctcattccacacctgcaagggtcagatcaagaaatccaaacctatactattgcagtgattaatgcgcttttcctgaaggctcctgatgagaggaggcaggagatggcgaatattttggctcagaagcaactgcgttccatcattttaacacatgtcatccgagcccagcgggccatcaacaatgagatggcgcaccagctgtatgttctacaagtgctcacctttaacctcctggaagacaggatgatgaccaaaatggacccccaggaccaggctcagagggacatcatatttgaacttcgaagaattgcttttgatgctgagtctgaacctaacaacagcagtggcagcatggagaaacgcaagtccatgtacacgcgagattataagaagcttgggttcattaatcatgtcaaccctgccatggacttcacgcagactccacctgggatgttggctctggacaacatgctgtactttgccaagcaccaccaagatgcctacatccggattgtgcttgagaacagtagtcgagaagacaagcatgaatgtccctttggccgcagtagtatagagctgaccaagatgctatgtgagatcttgaaagtgggcgagttgcctagtgagacctgcaacgacttccacccgatgttcttcacccacgacagatcctttgaggagtttttctgcatctgtatccagctcctgaacaagacatggaaggaaatgagggcaacttctgaagacttcaacaaggtaatgcaggtggtgaaggagcaggttatgagagcacttacaaccaagcctagctccctggaccagttcaagagcaaactgcagaacctgagctacactgagatcctgaaaatccgccagtccgagaggatgaaccaggaagatttccagtcccgcccgattttggaactaaaggagaagattcagccagaaatcttagagctgatcaaacagcaacgcctgaaccgccttgtggaagggacctgctttaggaaactcaatgcccggcggaggcaagacaagttttggtattgtcggctttcgccaaatcacaaagtcctgcattacggagacttagaagagagtcctcagggagaagtgccccacgattccttgcaggacaaactgccggtggcagatatcaaagccgtggtgacgggaaaggactgccctcatatgaaagagaaaggtgcccttaaacaaaacaaggaggtgcttgaactcgctttctccatcttgtatgactcaaactgccaactgaacttcatcgctcctgacaagcatgagtactgtatctggacggatggactgaatgcgctactcgggaaggacatgatgagcgacctgacgcggaatgacctggacaccctgctcagcatggaaatcaagctccgcctcctggacctggaaaacatccagatccctgacgcacctccgccgattcccaaggagcccagcaactatgacttcgtctatgactgtaactgaagtggccgggcccagacatgccccttccaaaactggaacacctagctaacaggagagaggaatgaaaacacacccacgccttggaaccgtcctttggtaaagggaagctgtgggtccacattcccttcagcatcacctctagccctggcaactttcagcccctagctggcatcttgctcaccgccctgattctgttcctcggctccactgcttcaggtcacttcccatggctgcagtccactggtgggacaagagcaaagcccactgccagtaagaaggccaaagggcccttccatcctagccctctgcaggcatgcccttccttcccttgggcaggaaagccagcagccccagactgcccaaaaacttgcccaccagaccaagggcagtgccccaaggcccctgtctggaggaaatggcctagctatttgatgagaagaccaaaccccacatcctcctttcccctctctctagaatcatctcgcaccaccagttacacttgaattaagatctgcgctcaaatctcctcccacctctctccctgcttttgccttgctctgttcctctttggtcccaagagcagcagccgcagcctcctcgtgatcctccctagcataaatttcccaaacagtccacaggtcccatgcccactttgcgtctgcactgtgatcgtgacaaatcttccctcctcaccagctagtctggggtttcctctccctgccccaggccagaactgccttcttcatttccacccacgctcccagcctcttagctgaaagcacaaatggtgaaatcagtagtctcgctccatctctaatagactaaacctaaatgcctctaggacggactgttgctatccaagcgtttggtgttaccttctcctgggaggtcctgctgcaactcaagttccacaggatggtcaagctgtcagacatccaagtttacatcattgtaattattactggtatttacaatttgcaagagttttgggttagttttttttttttttttgctttgtttttgtacaaaagagtctaacattttttgccaaacagatatatatttaatgaaaagaagagatacataaatgtgtgaatttccagtttttttttaattattttaatcccaaacatcttcctgaaaataacattcccttaaacatgctgtggaataaaatggattgtgatga

SEQ ID NO: 416169 - DNA, 3587 bp, Homo sapiens
  misc_feature (935)..(935): n is a, c, g, or t
  misc_feature (948)..(948): n is a, c, g, or t
  misc_feature (962)..(962): n is a, c, g, or t
  misc_feature (990)..(990): n is a, c, g, or t
cgttggctgtgcccctgcaccttcagcacccaggcaccaaggggagccgtttttcataccaaaccaccagtgaaaacaggaagtgatgaagcaaaattcaccctgcatctgcactgagtgacttctctttctttttctgtcattcctcattaggtatagacacgtgtggccgtttacgctgtaggatcctcattcccactggctttgaacattttggggacttacaatgccgccacccgcggacatcgtcaaggtggccatagaatggccgggcgcctaccccaaactcatggaaattgatcagaaaaaaccactgtctgcaataataaaggaagtctgtgatgggtggtctcttgccaaccatgaatattttgcactccagcatgccgatagttcaaacttctatatcacagaaaagaaccgcaatgagataaaaaatggcactatccttcgattaaccacatctccagctcagaacgcccagcagctccatgaacgaatccagtcctcgagtatggatgccaagctggaagccctgaaggacttggccagcctctcccgggatgtcacgtttgcccaggagtttataaacctggacggtatctctctcctcacgcagatggtggagagcggcactgagcgataccagaaattgcagaagatcatgaagccttgctttggagacatgctgtccttcaccctgacggccttcgttgagctgatggaccatggcatagtgtcctgggatacattttcggtggcgttcattaagaagatagcaagttttgtgaacaagtcagccatagacatctcgatcctgcagcggtccttggccattttggagtcgatggtgctcaatagccatgacctctaccagaaagtggcgcaggagatcaccatcggccagctcattccacacctgcaaggcagatcangaaatccaaactnatatatgcaggatnatgcgctttccgaaggcccgatgagagnaggcgagatggcgaatattttggctcagaagcaactgcgttccatcattttaacacatgtcatccgagcccagcgggccatcaacaatgagatggcgcaccagctgtatgttctacaagtgctcacctttaacctcctggaagacaggatgatgaccaaaatggacccccaggaccaggctcagagggacatcatatttgaacttcgaagaattgcttttgatgctgagtctgaacctaacaacagcagtggcagcatggagaaacgcaagtccatgtacacgcgagattataagaagcttgggttcattaatcatgtcaaccctgccatggacttcacgcagactccacctgggatgttggctctggacaacatgctgtactttgccaagcaccaccaagatgcctacatccggattgtgcttgagaacagtagtcgagaagacaagcatgaatgtccctttggccgcagtagtatagagctgaccaagatgctatgtgagatcttgaaagtgggcgagttgcctagtgagacctgcaacgacttccacccgatgttcttcacccacgacagatcctttgaggagtttttctgcatctgtatccagctcctgaacaagacatggaaggaaatgagggcaacttctgaagacttcaacaaggtaatgcaggtggtgaaggagcaggttatgagagcacttacaaccaagcctagctccctggaccagttcaagagcaaactgcagaacctgagctacactgagatcctgaaaatccgccagtccgagaggatgaaccaggaagatttccagtcccgcccgattttggaactaaaggagaagattcagccagaaatcttagagctgatcaaacagcaacgcctgaaccgccttgtggaagggacctgctttaggaaactcaatgcccggcggaggcaagacaagttttggtattgtcggctttcgccaaatcacaaagtcctgcattacggagacttagaagagagtcctcagggagaagtgccccacgattccttgcaggacaaactgccggtggcagatatcaaagccgtggtgacgggaaaggactgccctcatatgaaagagaaaggtgcccttaaacaaaacaaggaggtgcttgaactcgctttctccatcttgtatgactcaaactgccaactgaacttcatcgctcctgacaagcatgagtactgtatctggacggatggactgaatgcgctactcgggaaggacatgatgagcgacctgacgcggaatgacctggacaccctgctcagcatggaaatcaagctccgcctcctggacctggaaaacatccagatccctgacgcacctccgccgattcccaaggagcccagcaactatgacttcgtctatgactgtaactgaagtggccgggcccagacatgccccttccaaaactggaacacctagctaacaggagagaggaatgaaaacacacccacgccttggaaccgtcctttggtaaagggaagctgtgggtccacattcccttcagcatcacctctagccctggcaactttcagcccctagctggcatcttgctcaccgccctgattctgttcctcggctccactgcttcaggtcacttcccatggctgcagtccactggtgggacaagagcaaagcccactgccagtaagaaggccaaagggcccttccatcctagccctctgcaggcatgcccttccttcccttgggcaggaaagccagcagccccagactgcccaaaaacttgcccaccagaccaagggcagtgccccaaggcccctgtctggaggaaatggcctagctatttgatgagaagaccaaaccccacatcctcctttcccctctctctagaatcatctcgcaccaccagttacacttgaattaagatctgcgctcaaatctcctcccacctctctccctgcttttgccttgctctgttcctctttggtcccaagagcagcagccgcagcctcctcgtgatcctccctagcataaatttcccaaacagtccacaggtcccatgcccactttgcgtctgcactgtgatcgtgacaaatcttccctcctcaccagctagtctggggtttcctctccctgccccaggccagaactgccttcttcatttccacccacgctcccagcctcttagctgaaagcacaaatggtgaaatcagtagtctcgctccatctctaatagactaaacctaaatgcctctaggacggactgttgctatccaagcgtttggtgttaccttctcctgggaggtcctgctgcaactcaagttccacaggatggtcaagctgtcagacatccaagtttacatcattgtaattattactggtatttacaatttgcaagagttttgggttagttttttttttttttttgctttgtttttgtacaaaagagtctaacattttttgccaaacagatatatatttaatgaaaagaagagatacataaatgtgtgaatttccagtttttttttaattattttaatcccaaacatcttcctgaaaataacattcccttaaacatgctgtggaataaaatggattgtgatga

SEQ ID NO: 416170 - DNA, 2825 bp, Homo sapiens
attcaagggttcccatgatgtaggagactctgaattcaaaagactgcatgctttgcttgggtctgatccgatttgtagctgactgtacattatacttggacattggttgtcttgttaggattagtgtaaggagcagagttctgctttatttccctgggtgttgatgcatttcaagagaaaatgcttttaaagctacattaataataagagtcaaccctgtgtattgctaggaagagagaaaaaggtgcaggcacggagcccggagccgcttgattgtgttgctggtgtttgcattgtgaagagagatgttattacaatggtctgtcaaacacttcttcagacccccagccacggaatgaagcatctcttctccgtgtgccactgttctctgcttggaaaatgtgtaactgagctaggtcatgtcctttccttttatgaaacctgtctccaaattgaaatatgttttttaattaattgcaaagataaagtgaagtgcaattggaaagattttagcagtcaaaaagcatgcttcaaaatgactctattttgcatcctttcaaacccctgaaaaaccagagagggtttgcaaagttatattcaaggattggctctctgccaggaaagggatgctctgagctattgctctgctccctggggtttaattttctgacactggtgatgaaattttcaatttcgttgggtagaaacaggaagaacaagaaagcagtactataaacaggcaatggaggggcagcgtggggaacgagaaactctttgcctgtagggacccttctagctgcaaacttaaaaatgtatgtggcaagatgcaacccaagcaccgagcaggattccagacgagttataatcattctgaacggggagaggaaaggtaatgcaggtggtgaaggagcaggttatgagagcacttacaaccaagcctagctccctggaccagttcaagagcaaactgcagaacctgagctacactgagatcctgaaaatccgccagtccgagaggatgaaccaggaagatttccagtcccgcccgattttggaactaaaggagaagattcagccagaaatcttagagctgatcaaacagcaacgcctgaaccgccttgtggaagggacctgctttaggaaactcaatgcccggcggaggcaagacaagttttggtattgtcggctttcgccaaatcacaaagtcctgcattacggagacttagaagagagtcctcagggagaagtgccccacgattccttgcaggacaaactgccggtggcagatatcaaagccgtggtgacgggaaaggactgccctcatatgaaagagaaaggtgcccttaaacaaaacaaggaggtgcttgaactcgctttctccatcttgtatgactcaaactgccaactgaacttcatcgctcctgacaagcatgagtactgtatctggacggatggactgaatgcgctactcgggaaggacatgatgagcgacctgacgcggaatgacctggacaccctgctcagcatggaaatcaagctccgcctcctggacctggaaaacatccagatccctgacgcacctccgccgattcccaaggagcccagcaactatgacttcgtctatgactgtaactgaagtggccgggcccagacatgccccttccaaaactggaacacctagctaacaggagagaggaatgaaaacacacccacgccttggaaccgtcctttggtaaagggaagctgtgggtccacattcccttcagcatcacctctagccctggcaactttcagcccctagctggcatcttgctcaccgccctgattctgttcctcggctccactgcttcaggtcacttcccatggctgcagtccactggtgggacaagagcaaagcccactgccagtaagaaggccaaagggcccttccatcctagccctctgcaggcatgcccttccttcccttgggcaggaaagccagcagccccagactgcccaaaaacttgcccaccagaccaagggcagtgccccaaggcccctgtctggaggaaatggcctagctatttgatgagaagaccaaaccccacatcctcctttcccctctctctagaatcatctcgcaccaccagttacacttgaattaagatctgcgctcaaatctcctcccacctctctccctgcttttgccttgctctgttcctctttggtcccaagagcagcagccgcagcctcctcgtgatcctccctagcataaatttcccaaacagtccacaggtcccatgcccactttgcgtctgcactgtgatcgtgacaaatcttccctcctcaccagctagtctggggtttcctctccctgccccaggccagaactgccttcttcatttccacccacgctcccagcctcttagctgaaagcacaaatggtgaaatcagtagtctcgctccatctctaatagactaaacctaaatgcctctaggacggactgttgctatccaagcgtttggtgttaccttctcctgggaggtcctgctgcaactcaagttccacaggatggtcaagctgtcagacatccaagtttacatcattgtaattattactggtatttacaatttgcaagagttttgggttagttttttttttttttttgctttgtttttgtacaaaagagtctaacattttttgccaaacagatatatatttaatgaaaagaagagatacataaatgtgtgaatttccagtttttttttaattattttaatcccaaacatcttcctgaaaataacattcccttaaacatgctgtggaataaaatggattgtgatga

SEQ ID NO: 416171 - DNA, 1737 bp, Homo sapiens
ctaagccccacctcataaaggagatgaaaacacttgctacatgggctgcatgcgaattaaatgagatagttcacagaccgccgtgaatggagagaaggaatcatgccgtgaaccttgaagagcatggttcctccttccatcagcctcattgcagctccgcttggctagacaagctggccctatgccatggtcaatgtgcagccatttgcaactgcaaaatgaaatgtgccgattttccttaaggtgctgttttctctcatctcttgtaggaggtgcttgaactcgctttctccatcttgtatgactcaaactgccaactgaacttcatcgctcctgacaagcatgagtactgtatctggacggatggactgaatgcgctactcgggaaggacatgatgagcgacctgacgcggaatgacctggacaccctgctcagcatggaaatcaagctccgcctcctggacctggaaaacatccagatccctgacgcacctccgccgattcccaaggagcccagcaactatgacttcgtctatgactgtaactgaagtggccgggcccagacatgccccttccaaaactggaacacctagctaacaggagagaggaatgaaaacacacccacgccttggaaccgtcctttggtaaagggaagctgtgggtccacattcccttcagcatcacctctagccctggcaactttcagcccctagctggcatcttgctcaccgccctgattctgttcctcggctccactgcttcaggtcacttcccatggctgcagtccactggtgggacaagagcaaagcccactgccagtaagaaggccaaagggcccttccatcctagccctctgcaggcatgcccttccttcccttgggcaggaaagccagcagccccagactgcccaaaaacttgcccaccagaccaagggcagtgccccaaggcccctgtctggaggaaatggcctagctatttgatgagaagaccaaaccccacatcctcctttcccctctctctagaatcatctcgcaccaccagttacacttgaattaagatctgcgctcaaatctcctcccacctctctccctgcttttgccttgctctgttcctctttggtcccaagagcagcagccgcagcctcctcgtgatcctccctagcataaatttcccaaacagtccacaggtcccatgcccactttgcgtctgcactgtgatcgtgacaaatcttccctcctcaccagctagtctggggtttcctctccctgccccaggccagaactgccttcttcatttccacccacgctcccagcctcttagctgaaagcacaaatggtgaaatcagtagtctcgctccatctctaatagactaaacctaaatgcctctaggacggactgttgctatccaagcgtttggtgttaccttctcctgggaggtcctgctgcaactcaagttccacaggatggtcaagctgtcagacatccaagtttacatcattgtaattattactggtatttacaatttgcaagagttttgggttagttttttttttttttttgctttgtttttgtacaaaagagtctaacattttttgccaaacagatatatatttaatgaaaagaagagatacataaatgtgtgaatttccagtttttttttaattattttaatcccaaacatcttcctgaaaataacattcccttaaacatgctgtggaataaaatggattgtgatga

SEQ ID NO: 416172 - DNA, 1489 bp, Homo sapiens
ataaaaaaagaatggaggtgttgaaggcgggaagctccagcgtatggtaatgagtacaaagggcaagatgaagttcaatacgctcctgacaagcatgagtactgtatctggacggatggactgaatgcgctactcgggaaggacatgatgagcgacctgacgcggaatgacctggacaccctgctcagcatggaaatcaagctccgcctcctggacctggaaaacatccagatccctgacgcacctccgccgattcccaaggagcccagcaactatgacttcgtctatgactgtaactgaagtggccgggcccagacatgccccttccaaaactggaacacctagctaacaggagagaggaatgaaaacacacccacgccttggaaccgtcctttggtaaagggaagctgtgggtccacattcccttcagcatcacctctagccctggcaactttcagcccctagctggcatcttgctcaccgccctgattctgttcctcggctccactgcttcaggtcacttcccatggctgcagtccactggtgggacaagagcaaagcccactgccagtaagaaggccaaagggcccttccatcctagccctctgcaggcatgcccttccttcccttgggcaggaaagccagcagccccagactgcccaaaaacttgcccaccagaccaagggcagtgccccaaggcccctgtctggaggaaatggcctagctatttgatgagaagaccaaaccccacatcctcctttcccctctctctagaatcatctcgcaccaccagttacacttgaattaagatctgcgctcaaatctcctcccacctctctccctgcttttgccttgctctgttcctctttggtcccaagagcagcagccgcagcctcctcgtgatcctccctagcataaatttcccaaacagtccacaggtcccatgcccactttgcgtctgcactgtgatcgtgacaaatcttccctcctcaccagctagtctggggtttcctctccctgccccaggccagaactgccttcttcatttccacccacgctcccagcctcttagctgaaagcacaaatggtgaaatcagtagtctcgctccatctctaatagactaaacctaaatgcctctaggacggactgttgctatccaagcgtttggtgttaccttctcctgggaggtcctgctgcaactcaagttccacaggatggtcaagctgtcagacatccaagtttacatcattgtaattattactggtatttacaatttgcaagagttttgggttagttttttttttttttttgctttgtttttgtacaaaagagtctaacattttttgccaaacagatatatatttaatgaaaagaagagatacataaatgtgtgaatttccagtttttttttaattattttaatcccaaacatcttcctgaaaataacattcccttaaacatgctgtggaataaaatggattgtgatga

SEQ ID NO: 416173 - DNA, 737 bp, Homo sapiens
gcgaattcactagtgattgtgagctgagatcgcaccaccagttacacttgaattaagatctgcgctcaaatctcctcccacctctctccctgcttttgccttgctctgttcctctttggtcccaagagcagcagccgcagcctcctcgtgatcctccctagcataaatttcccaaacagtccacaggtcccatgcccactttgcgtctgcactgtgatcgtgacaaatcttccctcctcaccagctagtctggggtttcctctccctgccccaggccagaactgccttcttcatttccacccacgctcccagcctcttagctgaaagcacaaatggtgaaatcagtagtctcgctccatctctaatagactaaacctaaatgcctctaggacggactgttgctatccaagcgtttggtgttaccttctcctgggaggtcctgctgcaactcaagttccacaggatggtcaagctgtcagacatccaagtttacatcattgtaattattactggtatttacaatttgcaagagttttgggttagttttttttttttttttgctttgtttttgtacaaaagagtctaacattttttgccaaacagatatatatttaatgaaaagaagagatacataaatgtgtgaatttccagtttttttttaattattttaatcccaaacatcttcctgaaaataacattcccttaaacatgctgtggaataaaatggattgtgatga

SEQ ID NO: 416174 - DNA, 1180 bp, Homo sapiens
ggtactgaggaacaggatgacgggcgtcggtgacacttcgggaaacagctataacggggcgcaggcttagagagggggaaatatgttatacgggggcgtgtgttttcacatgcgctatcatcatcacctctagccctggcaactttcagcccctagctggcatcttgctcaccgccctgattctgttcctcggctccactgcttcaggtcacttcccatggctgcagtccactggtgggacaagagcaaagcccactgccagtaagaaggccaaagggcccttccatcctagccctctgcaggcatgcccttccttcccttgggcaggaaagccagcagccccagactgcccaaaaacttgcccaccagaccaagggcagtgccccaaggcccctgtctggaggaaatggcctagctatttgatgagaagaccaaaccccacatcctcctttcccctctctctagaatcatctcgcaccaccagttacacttgaattaagatctgcgctcaaatctcctcccacctctctccctgcttttgccttgctctgttcctctttggtcccaagagcagcagccgcagcctcctcgtgatcctccctagcataaatttcccaaacagtccacaggtcccatgcccactttgcgtctgcactgtgatcgtgacaaatcttccctcctcaccagctagtctggggtttcctctccctgccccaggccagaactgccttcttcatttccacccacgctcccagcctcttagctgaaagcacaaatggtgaaatcagtagtctcgctccatctctaatagactaaacctaaatgcctctaggacggactgttgctatccaagcgtttggtgttaccttctcctgggaggtcctgctgcaactcaagttccacaggatggtcaagctgtcagacatccaagtttacatcattgtaattattactggtatttacaatttgcaagagttttgggttagttttttttttttttttgctttgtttttgtacaaaagagtctaacattttttgccaaacagatatatatttaatgaaaagaagagatacataaatgtgtgaatttccagtttttttttaattattttaatcccaaacatcttcctgaaaataacattcccttaaacatgctgtggaataaaatggattgtgatga

SEQ ID NO: 416175 - DNA, 1621 bp, Homo sapiens
ctgcaactccgcagcgtccgctcgggaggagagttcgcggctgatctccggatgccttgcagatgcaaaatgtgtctctggccagcaggaggaaggaagaggaagtgagagcagcggcagccggcggtgcagcagccggccgacccagagtgtatagacacgtgtggccgtttacgctgtaggatcctcattcccactggctttgaacattttggggacttacaatgccgccacccgcggacatcgtcaaggtggccatagaatggccgggcgcctaccccaaactcatggaaattgatcagaaaaaaccactgtctgcaataataaaggaagtctgtgatgggtggtctcttgccaaccatgaatattttgcactccagcatgccgatagttcaaacttctatatcacagaaaagaaccgcaatgagataaaaaatggcactatccttcgattaaccacatctccagctcagaacgcccagcagctccatgaacgaatccagtcctcgagtatggatgccaagctggaagccctgaaggacttggccagcctctcccgggatgtcacgtttgcccaggagtttataaacctggacggtatctctctcctcacgcagatggtggagagcggcactgagcgataccagaaattgcagaagatcatgaagccttgctttggagacatgctgtccttcaccctgacggccttcgttgagctgatggaccatggcatagtgtcctgggatacattttcggtggcgttcattaagaagatagcaagttttgtgaacaagtcagccatagacatctcgatcctgcagcggtccttggccattttggagtcgatggtgctcaatagccatgacctctaccagaaagtggcgcaggagatcaccatcggccagctcattccacacctgcaagggtcagatcaagaaatccaaacctatactattgcagtgattaatgcgcttttcctgaaggctcctgatgagaggaggcaggagatggcgaatattttggctcagaagcaactgcgttccatcattttaacacatgtcatccgagcccagcgggccatcaacaatgagatggcgcaccagctgtatgttctacaagtgctcacctttaacctcctggaagacaggatgatgaccaaaatggacccccaggaccaggctcagagggacatcatatttgaacttcgaagaattgcttttgatgctgagtctgaacctaacaacagcagtggcagcatggagaaacgcaagtccatgtacacgcgagattataagaagcttgggttcattgtaagtaagctatctccagtatgcgctctccctccagcctccccgggcctgacctcagccacataactgatgtctcttccgagcgtgtggtcctcttgcgctttacggaatagtttccacatttccagatgtttagctggtttaaacaggatcacatgaaaatctcttctggcttcagtgaaatggaataacttgcacaagtgtgactaatactgcatttgtttattcagttctgattaagtgtaaccgagagtagttagcccggaatgtatctcgacttcattaaatctatttcacaagaaacttaagat

SEQ ID NO: 416176 - DNA, 942 bp, Homo sapiens
cgttggctgtgcccctgcaccttcagcacccaggcaccaaggggagccgtttttcataccaaaccaccagtgaaaacaggaagtgatgaagcaaaattcaccctgcatctgcactgagtgacttctctttctttttctgtcattcctcattaggtatagacacgtgtggccgtttacgctgtaggatcctcattcccactggctttgaacattttggggacttacaatgccgccacccgcggacatcgtcaaggtggccatagaatggccgggcgcctaccccaaactcatggaaattgatcagaaaaaaccactgtctgcaataataaaggaagtctgtgatgggtggtctcttgccaaccatgaatattttgcactccagcatgccgatagttcaaacttctatatcacagaaaaggtaggtcatctacattatttaatatgggatacatattgaaggaaagtaaatcatgatgatgttttctttgttcgggcctagacatgcaggtctaaattttaggtctctactatccacgaaaatagagtctgtaaagcaaacaactgctactttagaatccacaagatgatatttgcctgctcaagagtaaagaccaaatatgtttcgtgtcttgtttagcaactgcagttgccttctaacagtgaatatgtctctcttactgcttggttaaagaatttatttgatacttaatgacttagttgggttttcctttctcagattttgttttttcaaagtagcctctaacccttgcttaaagtacgtgaaataatgacaagaaaccttttcaaatgtggaattatgtatgtaggcactaagagtgttctatgaatcttgggaacccagctctctccttgggtgattttaaatcttttttagcaagattaaaggagaaggagggatttgtgaagacagcaattcagccc

SEQ ID NO: 416177 - DNA, 1537 bp, Homo sapiens
  misc_feature (935)..(935): n is a, c, g, or t
  misc_feature (948)..(948): n is a, c, g, or t
  misc_feature (962)..(962): n is a, c, g, or t
  misc_feature (990)..(990): n is a, c, g, or t
cgttggctgtgcccctgcaccttcagcacccaggcaccaaggggagccgtttttcataccaaaccaccagtgaaaacaggaagtgatgaagcaaaattcaccctgcatctgcactgagtgacttctctttctttttctgtcattcctcattaggtatagacacgtgtggccgtttacgctgtaggatcctcattcccactggctttgaacattttggggacttacaatgccgccacccgcggacatcgtcaaggtggccatagaatggccgggcgcctaccccaaactcatggaaattgatcagaaaaaaccactgtctgcaataataaaggaagtctgtgatgggtggtctcttgccaaccatgaatattttgcactccagcatgccgatagttcaaacttctatatcacagaaaagaaccgcaatgagataaaaaatggcactatccttcgattaaccacatctccagctcagaacgcccagcagctccatgaacgaatccagtcctcgagtatggatgccaagctggaagccctgaaggacttggccagcctctcccgggatgtcacgtttgcccaggagtttataaacctggacggtatctctctcctcacgcagatggtggagagcggcactgagcgataccagaaattgcagaagatcatgaagccttgctttggagacatgctgtccttcaccctgacggccttcgttgagctgatggaccatggcatagtgtcctgggatacattttcggtggcgttcattaagaagatagcaagttttgtgaacaagtcagccatagacatctcgatcctgcagcggtccttggccattttggagtcgatggtgctcaatagccatgacctctaccagaaagtggcgcaggagatcaccatcggccagctcattccacacctgcaaggcagatcangaaatccaaactnatatatgcaggatnatgcgctttccgaaggcccgatgagagnaggcgagatggcgaatattttggctcagaagcaactgcgttccatcattttaacacatgtcatccgagcccagcgggccatcaacaatgagatggcgcaccagctgtatgttctacaagtgctcacctttaacctcctggaagacaggatgatgaccaaaatggacccccaggaccaggctcagagggacatcatatttgaacttcgaagaattgcttttgatgctgagtctgaacctaacaacagcagtggcagcatggagaaacgcaagtccatgtacacgcgagattataagaagcttgggttcattaatcatgtcaaccctgccatggacttcacgcagactccacctgggatgttggctctggacaacatgctgtactttgccaagcaccaccaagatgcctacatccgggtaagcaagaagccccttttcagatattgtgtgtttcctactcaatgttaatttcaaactcacaaatacggagggattacctttagatgagtgaccccatattttctgtctttcttagtaaactaaaaaaaa

SEQ ID NO: 416178 - DNA, 289 bp, Homo sapiens
gtaagttgcatttctttagtcttatggctatgtcaaggctaggaactttgtgtgcagagaacgccctctccttctattcggggactcattgggcctctctgctatcctggccacagatggactctccagagcagctatgttccgctgcacggctggcccgctggggtccttcccaaatccaggggcaagtgggtagagatggataagcccttgactgatgagggatgctaggagtgttccagcagtagagccttttcatgaaatgaaatgcaacctggaagcccagatg

SEQ ID NO: 416179 - DNA, 532 bp, Homo sapiens
attggtctcagggtaatggaaggtaggctaaagtcattttgctttaggaactgcattgtggtatatgttgggattggtccaattccaatcacagggtgcttagttcatccaacactaaaaaattgtaaaaatgaaaatggccactttcatttttctaatcagtatacgcttgtatttttaaggtggtctcttgccaaccatgaatattttgcactccagcatgccgatagttcaaacttctatatcacagaaaaggtaggtcatctacattatttaatatgggatacatattgaaggaaagtaaatcatgatgatgttttctttgttcgggcctagacatgcaggtctaaattttaggtctctactatccacgaaaatagagtctgtaaagcaaacaactgctactttagaatccacaagatgatatttgcctgctcaagagtaaagaccaaatatgtttcgtgtcttgtttagcaactgcagttgccttctaacagtgaatatgtctctcttactgcttggttaaagaatt

SEQ ID NO: 416180 - DNA, 895 bp, Homo sapiens
gatgtaaccatggcaggaaactgggtgaagagcacacagtacttttcaatatgatctctgtgtctttctataaatctatcatttaaaaaaaaaaagttggttttttaagtttctaaaatcttataaaatcgttggcatactcaggttaaagggatattttggggtgttcagttttgttttgcttttcgtcttgtgattttgttttttccatgttaaagttggttgaacatacagttattttaagtgcctgtgtattcttcataatttatggaatcaatagattttgctgtggattttctgccaccttgttacttcttttatttttttttcttcttagtatgtgccaagagttgtaacctctgcacaacagaaagcaggaagaactattacagcccggatcacaggaagatgtgattttgcttcaaaaaatagaattagcagcagtttagctataatgggagtttctcctcccatgagctcagttgttgtggaaaaacatcatccagtcacagtgcaaaccattcctcaagcaactgcagcaaaatatccccggaccattcatcctgaaagtagtacctcagcttccagatcacttggaaccagatcagctcacacccagtctctcacaagtgttcattccataaaagtggttgactaaagtgaatatgtccatagtggggtcttttaatccctctggtcttaccaagggttagaagtcttttggttttaacttttccatattgttagaacatcatggagacatcatgttcatctgttcaaaattacaagaggctttttcaagctctaccatgctttgtaactatatgtagaaattattttaatgttattttttatttaagcaattaagtaaaacttttttaaattaaaaaagaaa

SEQ ID NO: 416181 - DNA, 2124 bp, Homo sapiens
ttaattcctccctgcagtttgaaactgtcaggttgccgtctaggtagcggttgtgcttgctgaggctgcacttgctgacactgcagctgcgacgcggctaagaggcgcagagcgaggagtcgggatttggtcgcgagcggcgacgagcatttgtgcagaatgtcatcagatgaggagaaatactcacttccagttgtgcaaaatgactccagtcgaggcagttctgtctcttcgaatcttcaggaagaatatgaagaactgcttcattatgctatagtgactccaaatattgaaccctgtgcttcacagtcatctcatcctaagggagaattggtgccagatgtcagaatttctacaattcatgatattcttcatagtcaaggaaataactctgaagtaagagaaactgcaatagaagttggaaaaggatgtgatttccatatttcaagtcattcaaagacagatgagtcatcaccagtgttatcgccaaggaagccttctcacccagtcatggattttttcagttcacatcttttagctgactcttcctcaccagcaacaaattctagtcatacagatgcccatgaaatacttgtgagcgattttcttgtttctgatgaaaaccttcagaagatggaaaatgtgcttgatctttggagttcaggtcttaagacaaacatcatatctgaactaagtaaatggagacttaattttattgactggcaccgaatggaaatgagaaaagagaaagaaaaacatgcagcacatttaaaacaactgtgtaatcagatcaatgaattgaaggagctgcaaaaaacctttgaaatctccattgggagaaaagatgaggtgatttctagcttgtctcatgccataggcaagcaaaaggaaaagatagagttgatgagaacattcttccactggcgaatcggccatgtcagagccagacaggatgtttatgaaggtaaactagctgaccagtactaccagagaactttactgaagaaagtctggaaagtctggcgttccgtagtgcaaaagcagtggaaagatgtggtagaaagagcttgtcaagcaagagctgaagaagtttgtatccagatttccaatgattatgaagccaaagttgctatgttatctggagctttggaaaatgcaaaagctgagattcaaagaatgcaacatgaaaaagagcactttgaagattccatgaaaaaagctttcatgaggggtgtatgtgcattaaatcttgaagccatgactatatttcaaaacagaaatgatgcagggatagactccacaaataataaaaaggaagagtatggtcctggtgttcaaggaaaagaacattctgctcatttggatccttcagctcctccgatgcccttaccagttacatcaccactgctgccatccccaccagccgccgtcggaggagccagcgcgactgccgttccctcagctgcttcgatgacttctaccagggctgcttccgcatcttctgttcacgttcctgtttctgctcttggtgcaggatctgcagctactgctgcatcagaagaaatgtatgtgccaagagttgtaacctctgcacaacagaaagcaggaagaactattacagcccggatcacaggaagatgtgattttgcttcaaaaaatagaattagcagcagtttagctataatgggagtttctcctcccatgagctcagttgttgtggaaaaacatcatccagtcacagtgcaaaccattcctcaagcaactgcagcaaaatatccccggaccattcatcctgaaagtagtacctcagcttccagatcacttggaaccagatcagctcacacccagtctctcacaagtgttcattccataaaagtggttgactaaagtgaatatgtccatagtggggtcttttaatccctctggtcttaccaagggttagaagtcttttggttttaacttttccatattgttagaacatcatggagacatcatgttcatctgttcaaaattacaagaggctttttcaagctctaccatgctttgtaactatatgtagaaattattttaatgttattttttatttaagcaattaagtaaaacttttttaaattaaaaaagaaa

SEQ ID NO: 416182 - DNA, 438 bp, Homo sapiens
tccaagtgatctggaagctgaggtactactttcaggatgaatggtccggggatattccgctgcagttgcttgaggaatggtttgcactgtgactggatcattcatcctgaaagtagtacctcagcttccagatcacttggaaccagatcagctcacacccagtctctcacaagtgttcattccataaaagtggttgactaaagtgaatatgtccatagtggggtcttttaatccctctggtcttaccaagggttagaagtcttttggttttaacttttccatattgttagaacatcatggagacatcatgttcatctgttcaaaattacaagaggctttttcaagctctaccatgctttgtaactatatgtagaaattattttaatgttattttttatttaagcaattaagtaaaacttttttaaattaaaaaagaaa

SEQ ID NO: 416183 - DNA, 735 bp, Homo sapiens
ggcacacaccaccacacctagcaaatttttgtaaaaaatttattgtagagatggggtctcactttgttgctcaggcttcaagccatcctcctgcctcagcctctcaaagtgctgagtttacaggcatgagtcactgcacccagccctcttcaaactgttaatcataaatataaaaatcacacaagaagcactcgaggaactcaagcttggaataagtggtaaaactttgtaatataataagcatgggactctattatggtaattaaatttctttaaaacaaattcagttgaatatattataacattgtaactgttacactacattattgattattggcctctcttaggaagaatatgaagaactgcttcattatgctatagtgactccaaatattgaaccctgtgcttcacagtcatctcatcctaagggagaattggtgccagatgtcagaatttctacaattcatgatattcttcatagtcaaggttatatatatttttcaagatatctcttaatttaaaatattactgagtttattaatgatactgacaggattgtgatctaggggagctttttacattttaatatattattcctgactctcgtgtgacagcttgattttctttgaacttcatttgactcttacttttatgaagaataataaagttgaagcaatgctatggcaactgcatggctttttggtatgttgtatctcagtacttgttccaacagtt

SEQ ID NO: 416184 - DNA, 2079 bp, Homo sapiens
ttaattcctccctgcagtttgaaactgtcaggttgccgtctaggtagcggttgtgcttgctgaggctgcacttgctgacactgcagctgcgacgcggctaagaggcgcagagcgaggagtcgggatttggtcgcgagcggcgacgagcatttgtgcagaatgtcatcagatgaggagaaatactcacttccagttgtgcaaaatgactccagtcgaggcagttctgtctcttcgaatcttcaggaagaatatgaagaactgcttcattatgctatagtgactccaaatattgaaccctgtgcttcacagtcatctcatcctaagggagaattggtgccagatgtcagaatttctacaattcatgatattcttcatagtcaaggaaataactctgaagtaagagaaactgcaatagaagttggaaaaggatgtgatttccatatttcaagtcattcaaagacagatgagtcatcaccagtgttatcgccaaggaagccttctcacccagtcatggattttttcagttcacatcttttagctgactcttcctcaccagcaacaaattctagtcatacagatgcccatgaaatacttgtgagcgattttcttgtttctgatgaaaaccttcagaagatggaaaatgtgcttgatctttggagttcaggtcttaagacaaacatcatatctgaactaagtaaatggagacttaattttattgactggcaccgaatggaaatgagaaaagagaaagaaaaacatgcagcacatttaaaacaactgtgtaatcagatcaatgaattgaaggagctgcaaaaaacctttgaaatctccattgggagaaaagatgaggtgatttctagcttgtctcatgccataggcaagcaaaaggaaaagatagagttgatgagaacattcttccactggcgaatcggccatgtcagagccagacaggatgtttatgaaggtaaactagctgaccagtactaccagagaactttactgaagaaagtctggaaagtctggcgttccgtagtgcaaaagcagtggaaagatgtggtagaaagagcttgtcaagcaagagctgaagaagtttgtatccagatttccaatgattatgaagccaaagttgctatgttatctggagctttggaaaatgcaaaagctgagattcaaagaatgcaacatgaaaaagagcactttgaagattccatgaaaaaagctttcatgaggggtgtatgtgcattaaatcttgaagccatgactatatttcaaaacagaaatgatgcagggatagactccacaaataataaaaaggaagagtatggtcctggtgttcaaggcttaccagttacatcaccactgctgccatccccaccagccgccgtcggaggagccagcgcgactgccgttccctcagctgcttcgatgacttctaccagggctgcttccgcatcttctgttcacgttcctgtttctgctcttggtgcaggatctgcagctactgctgcatcagaagaaatgtatgtgccaagagttgtaacctctgcacaacagaaagcaggaagaactattacagcccggatcacaggaagatgtgattttgcttcaaaaaatagaattagcagcagtttagctataatgggagtttctcctcccatgagctcagttgttgtggaaaaacatcatccagtcacagtgcaaaccattcctcaagcaactgcagcaaaatatccccggaccattcatcctgaaagtagtacctcagcttccagatcacttggaaccagatcagctcacacccagtctctcacaagtgttcattccataaaagtggttgactaaagtgaatatgtccatagtggggtcttttaatccctctggtcttaccaagggttagaagtcttttggttttaacttttccatattgttagaacatcatggagacatcatgttcatctgttcaaaattacaagaggctttttcaagctctaccatgctttgtaactatatgtagaaattattttaatgttattttttatttaagcaattaagtaaaacttttttaaattaaaaaagaaa

SEQ ID NO: 416185 - DNA, 2026 bp, Homo sapiens
ttaattcctccctgcagtttgaaactgtcaggttgccgtctaggtagcggttgtgcttgctgaggctgcacttgctgacactgcagctgcgacgcggctaagaggcgcagagcgaggagtcgggatttggtcgcgagcggcgacggaagaatatgaagaactgcttcattatgctatagtgactccaaatattgaaccctgtgcttcacagtcatctcatcctaagggagaattggtgccagatgtcagaatttctacaattcatgatattcttcatagtcaaggaaataactctgaagtaagagaaactgcaatagaagttggaaaaggatgtgatttccatatttcaagtcattcaaagacagatgagtcatcaccagtgttatcgccaaggaagccttctcacccagtcatggattttttcagttcacatcttttagctgactcttcctcaccagcaacaaattctagtcatacagatgcccatgaaatacttgtgagcgattttcttgtttctgatgaaaaccttcagaagatggaaaatgtgcttgatctttggagttcaggtcttaagacaaacatcatatctgaactaagtaaatggagacttaattttattgactggcaccgaatggaaatgagaaaagagaaagaaaaacatgcagcacatttaaaacaactgtgtaatcagatcaatgaattgaaggagctgcaaaaaacctttgaaatctccattgggagaaaagatgaggtgatttctagcttgtctcatgccataggcaagcaaaaggaaaagatagagttgatgagaacattcttccactggcgaatcggccatgtcagagccagacaggatgtttatgaaggtaaactagctgaccagtactaccagagaactttactgaagaaagtctggaaagtctggcgttccgtagtgcaaaagcagtggaaagatgtggtagaaagagcttgtcaagcaagagctgaagaagtttgtatccagatttccaatgattatgaagccaaagttgctatgttatctggagctttggaaaatgcaaaagctgagattcaaagaatgcaacatgaaaaagagcactttgaagattccatgaaaaaagctttcatgaggggtgtatgtgcattaaatcttgaagccatgactatatttcaaaacagaaatgatgcagggatagactccacaaataataaaaaggaagagtatggtcctggtgttcaaggaaaagaacattctgctcatttggatccttcagctcctccgatgcccttaccagttacatcaccactgctgccatccccaccagccgccgtcggaggagccagcgcgactgccgttccctcagctgcttcgatgacttctaccagggctgcttccgcatcttctgttcacgttcctgtttctgctcttggtgcaggatctgcagctactgctgcatcagaagaaatgtatgtgccaagagttgtaacctctgcacaacagaaagcaggaagaactattacagcccggatcacaggaagatgtgattttgcttcaaaaaatagaattagcagcagtttagctataatgggagtttctcctcccatgagctcagttgttgtggaaaaacatcatccagtcacagtgcaaaccattcctcaagcaactgcagcaaaatatccccggaccattcatcctgaaagtagtacctcagcttccagatcacttggaaccagatcagctcacacccagtctctcacaagtgttcattccataaaagtggttgactaaagtgaatatgtccatagtggggtcttttaatccctctggtcttaccaagggttagaagtcttttggttttaacttttccatattgttagaacatcatggagacatcatgttcatctgttcaaaattacaagaggctttttcaagctctaccatgctttgtaactatatgtagaaattattttaatgttattttttatttaagcaattaagtaaaacttttttaaattaaaaaagaaa

SEQ ID NO: 416186 - DNA, 2183 bp, Homo sapiens
ttaattcctccctgcagtttgaaactgtcaggttgccgtctaggtagcggttgtgcttgctgaggctgcacttgctgacactgcagctgcgacgcggctaagaggcgcagagcgaggagtcgggatttggtcgcgagcggcgacgagcatttgtgcagaatgtcatcagatgaggagaaatactcacttccagttgtgcaaaatgactccagtcgaggcagttctgtctcttcgaatcttcagaaaatattgatgaactcttcatacactctgtacaaaggcttcaaccaacacagtaagaggaagaatatgaagaactgcttcattatgctatagtgactccaaatattgaaccctgtgcttcacagtcatctcatcctaagggagaattggtgccagatgtcagaatttctacaattcatgatattcttcatagtcaaggaaataactctgaagtaagagaaactgcaatagaagttggaaaaggatgtgatttccatatttcaagtcattcaaagacagatgagtcatcaccagtgttatcgccaaggaagccttctcacccagtcatggattttttcagttcacatcttttagctgactcttcctcaccagcaacaaattctagtcatacagatgcccatgaaatacttgtgagcgattttcttgtttctgatgaaaaccttcagaagatggaaaatgtgcttgatctttggagttcaggtcttaagacaaacatcatatctgaactaagtaaatggagacttaattttattgactggcaccgaatggaaatgagaaaagagaaagaaaaacatgcagcacatttaaaacaactgtgtaatcagatcaatgaattgaaggagctgcaaaaaacctttgaaatctccattgggagaaaagatgaggtgatttctagcttgtctcatgccataggcaagcaaaaggaaaagatagagttgatgagaacattcttccactggcgaatcggccatgtcagagccagacaggatgtttatgaaggtaaactagctgaccagtactaccagagaactttactgaagaaagtctggaaagtctggcgttccgtagtgcaaaagcagtggaaagatgtggtagaaagagcttgtcaagcaagagctgaagaagtttgtatccagatttccaatgattatgaagccaaagttgctatgttatctggagctttggaaaatgcaaaagctgagattcaaagaatgcaacatgaaaaagagcactttgaagattccatgaaaaaagctttcatgaggggtgtatgtgcattaaatcttgaagccatgactatatttcaaaacagaaatgatgcagggatagactccacaaataataaaaaggaagagtatggtcctggtgttcaaggaaaagaacattctgctcatttggatccttcagctcctccgatgcccttaccagttacatcaccactgctgccatccccaccagccgccgtcggaggagccagcgcgactgccgttccctcagctgcttcgatgacttctaccagggctgcttccgcatcttctgttcacgttcctgtttctgctcttggtgcaggatctgcagctactgctgcatcagaagaaatgtatgtgccaagagttgtaacctctgcacaacagaaagcaggaagaactattacagcccggatcacaggaagatgtgattttgcttcaaaaaatagaattagcagcagtttagctataatgggagtttctcctcccatgagctcagttgttgtggaaaaacatcatccagtcacagtgcaaaccattcctcaagcaactgcagcaaaatatccccggaccattcatcctgaaagtagtacctcagcttccagatcacttggaaccagatcagctcacacccagtctctcacaagtgttcattccataaaagtggttgactaaagtgaatatgtccatagtggggtcttttaatccctctggtcttaccaagggttagaagtcttttggttttaacttttccatattgttagaacatcatggagacatcatgttcatctgttcaaaattacaagaggctttttcaagctctaccatgctttgtaactatatgtagaaattattttaatgttattttttatttaagcaattaagtaaaacttttttaaattaaaaaagaaa

SEQ ID NO: 416187 - DNA, 1902 bp, Homo sapiens
ttaattcctccctgcagtttgaaactgtcaggttgccgtctaggtagcggttgtgcttgctgaggctgcacttgctgacactgcagctgcgacgcggctaagaggcgcagagcgaggagtcgggatttggtcgcgagcggcgacgagcatttgtgcagaatgtcatcagatgaggagaaatactcacttccagttgtgcaaaatgactccagtcgaggcagttctgtctcttcgaatcttcaggaagaatatgaagaactgcttcattatgctatagtgactccaaatattgaaccctgtgcttcacagtcatctcatcctaagggagaattggtgccagatgtcagaatttctacaattcatgatattcttcatagtcaaggaaataactctgaagtaagagaaactgcaatagaagttggaaaaggatgtgatttccatatttcaagtcattcaaagacagatgagtcatcaccagtgttatcgccaaggaagccttctcacccagtcatggattttttcagttcacatcttttagctgactcttcctcaccagcaacaaattctagtcatacagatgcccatgaaatacttgtgagcgattttcttgtttctgatgaaaaccttcagaagatggaaaatgtgcttgatctttggagttcaggtcttaagacaaacatcatatctgaactaagtaaatggagacttaattttattgactggcaccgaatggaaatgagaaaagagaaagaaaaacatgcagcacatttaaaacaactgtgtaatcagatcaatgaattgaaggagctgcaaaaaacctttgaaatctccattgggagaaaagatgaggtgatttctagcttgtctcatgccataggcaagcaaaaggaaaagatagagttgatgagaacattcttccactggcgaatcggccatgtcagagccagacaggatgtttatgaaggtaaactagctgaccagtactaccagagaactttactgaagaaagtctggaaagtctggcgttccgtagtgcaaaagcagtggaaagatgtggtagaaagagcttgtcaagcaagagctgaagaagtttgtatccagatttccaatgattatgaagccaaagttgctatgttatctggagctttggaaaatgcaaaagctgagattcaaagaatgcaacatgaaaaagagcactttgaagattccatgaaaaaagctttcatgaggggtgtatgtgcattaaatcttgaagccatgactatatttcaaaacagaaatgatgcagggatagactccacaaataataaaaaggaagagtatggtcctggtgttcaaggcttaccagttacatcaccactgctgccatccccaccagccgccgtcggaggagccagcgcgactgccgttccctcagctgcttcgatgacttctaccagggctgcttccgcatcttctgttcacgttcctgtttctgctcttggtgcaggatctgcagctactgctgcatcagaagaaatgcaaaccattcctcaagcaactgcagcaaaatatccccggaccattcatcctgaaagtagtacctcagcttccagatcacttggaaccagatcagctcacacccagtctctcacaagtgttcattccataaaagtggttgactaaagtgaatatgtccatagtggggtcttttaatccctctggtcttaccaagggttagaagtcttttggttttaacttttccatattgttagaacatcatggagacatcatgttcatctgttcaaaattacaagaggctttttcaagctctaccatgctttgtaactatatgtagaaattattttaatgttattttttatttaagcaattaagtaaaacttttttaaattaaaaaagaaa

SEQ ID NO: 416188 - DNA, 2327 bp, Homo sapiens
ttaattcctccctgcagtttgaaactgtcaggttgccgtctaggtagcggttgtgcttgctgaggctgcacttgctgacactgcagctgcgacgcggctaagaggcgcagagcgaggagtcgggatttggtcgcgagcggcgacgagcatttgtgcagaatgtcatcagatgaggagaaatactcacttccagttgtgcaaaatgactccagtcgaggcagttctgtctcttcgaatcttcaggaagaatatgaagaactgcttcattatgctatagtgactccaaatattgaaccctgtgcttcacagtcatctcatcctaagggagaattggtgccagatgtcagaatttctacaattcatgatattcttcatagtcaaggaaataactctgaagtaagagaaactgcaatagaagttggaaaaggatgtgatttccatatttcaagtcattcaaagacagatgagtcatcaccagtgttatcgccaaggaagccttctcacccagtcatggattttttcagttcacatcttttagctgactcttcctcaccagcaacaaattctagtcatacagatgcccatgaaatacttgtgagcgattttcttgtttctgatgaaaaccttcagaagatggaaaatgtgcttgatctttggagttcaggtcttaagacaaacatcatatctgaactaagtaaatggagacttaattttattgactggcaccgaatggaaatgagaaaagagaaagaaaaacatgcagcacatttaaaacaactgtgtaatcagatcaatgaattgaaggagctgcaaaaaacctttgaaatctccattgggagaaaagatgaggtgatttctagcttgtctcatgccataggcaagcaaaaggaaaagatagagttgatgagaacattcttccactggcgaatcggccatgtcagagccagacaggatgtttatgaaggtaaactagctgaccagtactaccagagaactttactgaagaaagtctggaaagtctggcgttccgtagtgcaaaagcagtggaaagatgtggtagaaagagcttgtcaagcaagagctgaagaagtttgtatccagatttccaatgattatgaagccaaagttgctatgttatctggagctttggaaaatgcaaaagctgagattcaaagaatgcaacatgaaaaagagcactttgaagattccatgaaaaaagctttcatgaggggtgtatgtgcattaaatcttgaagccatgactatatttcaaaacagaaatgatgcagggatagactccacaaataataaaaaggaagagtatggtcctggtgttcaaggaaaagaacattctgctcatttggatccttcagctcctccgatgcccttaccagttacatcaccactgctgccatccccaccagccgccgtcggaggagccagcgcgactgccgttccctcagctgcttcgatgacttctaccagggctgcttccgcatcttctgttcacgttcctgtttctgctcttggtgcaggatctgcagctactgctgcatcagaagaaatgtatgtgccaagagttgtaacctctgcacaacagaaagcaggaagaactattacagcccggatcacaggaagatgtgattttgcttcaaaaaatagaattagcagcagtttagctataatgggagtttctcctcccatgagctcagttgttgtggaaaaacatcatccagtcacagtgcaaaccattcctcaagcaactgcagcaaaatatccccggaccattcatcctgaaagtagtacctcagcttccagatcacttggaaccagatcagctcacacccagtctctcacaagtgttcattccataaaagtggttgactaaagtgaatatgtccatactagtttatttgcatagaggtgtttgtagtattctctgatggtagtttgtatttctgtgggattggtggtgatatcccctttatcattttttattgtgtctatttgattcttctctctttttttctttattagtcttgctagcggtctatcaattttgttgatcctttcaaaaaaccagctcctggattcattgattttttgaagggttttctgtgtctctatttccttcagttctgctctgattttagttatttcttgccttctgctagcttttgaatgtgtttgctcttgcttttctagttcttttaattgtgatgttagggtgtcaattttggatctttcctgctttctcttgtaggcatttagtgctataaatttccctctacacactgctttgaatgcgtcccagagattctggtatgt

SEQ ID NO: 416189 - DNA, 1653 bp, Homo sapiens
ttaattcctccctgcagtttgaaactgtcaggttgccgtctaggtagcggttgtgcttgctgaggctgcacttgctgacactgcagctgcgacgcggctaagaggcgcagagcgaggagtcgggatttggtcgcgagcggcgacgagcatttgtgcagaatgtcatcagatgaggagaaatactcacttccagttgtgcaaaatgactccagtcgaggcagttctgtctcttcgaatcttcaggaagaatatgaagaactgcttcattatgctatagtgactccaaatattgaaccctgtgcttcacagtcatctcatcctaagggagaattggtgccagatgtcagaatttctacaattcatgatattcttcatagtcaaggaaataactctgaagtaagagaaactgcaatagaagttggaaaaggatgtgatttccatatttcaagtcattcaaagacagatgagtcatcaccagtgttatcgccaaggaagccttctcacccagtcatggattttttcagttcacatcttttagctgactcttcctcaccagcaacaaattctagtcatacagatgcccatgaaatacttgtgagcgattttcttgtttctgatgaaaaccttcagaagatggaaaatgtgcttgatctttggagttcaggtcttaagacaaacatcatatctgaactaagtaaatggagacttaattttattgactggcaccgaatggaaatgagaaaagagaaagaaaaacatgcagcacatttaaaacaactgtgtaatcagatcaatgaattgaaggagctgcaaaaaacctttgaaatctccattgggagaaaagatgaggtgatttctagcttgtctcatgccataggcaagcaaaaggaaaagatagagttgatgagaacattcttccactggcgaatcggccatgtcagagccagacaggatgtttatgaaggtaaactagctgaccagtactaccagagaactttactgaagaaagtctggaaagtctggcgttccgtagtgcaaaagcagtggaaagatgtggtagaaagagcttgtcaagcaagagctgaagaagtttgtatccagatttccaatgattatgaagccaaagttgctatgttatctggagctttggaaaatgcaaaagctgagattcaaagaatgcaacatgaaaaagagcactttgaagattccatgaaaaaagctttcatgaggggtgtatgtgcattaaatcttgaagccatgactatatttcaaaacagaaatgatgcaggccaggcgcggtcgctcacacctgtaatcccagcactttgggaggccgaggtgagtggatcacgaggtcaggagatcgagacgatcctggctaacatggtgaaatcccgtctctactaaaaatacaaaaaattagccgggcgtggtggcaggcacctgtagtcccagctactcaggaggctgaggcagaagaatggcgtgaacccaggaggcagaggttgcagtgagctgagatcatgccactgcacttcagcctgggcgacagagcgagactatctcacaaaaaaaaaaattgttttttataatgcagtttttaataatgtaaagttcctaatgcatctgtcttgttagagcaaaataaatatt

SEQ ID NO: 416190 - DNA, 1985 bp, Homo sapiens
ttaattcctccctgcagtttgaaactgtcaggttgccgtctaggtagcggttgtgcttgctgaggctgcacttgctgacactgcagctgcgacgcggctaagaggcgcagagcgaggagtcgggatttggtcgcgagcggcgacgagcatttgtgcagaatgtcatcagatgaggagaaatactcacttccagttgtgcaaaatgactccagtcgaggcagttctgtctcttcgaatcttcaggaaataactctgaagtaagagaaactgcaatagaagttggaaaaggatgtgatttccatatttcaagtcattcaaagacagatgagtcatcaccagtgttatcgccaaggaagccttctcacccagtcatggattttttcagttcacatcttttagctgactcttcctcaccagcaacaaattctagtcatacagatgcccatgaaatacttgtgagcgattttcttgtttctgatgaaaaccttcagaagatggaaaatgtgcttgatctttggagttcaggtcttaagacaaacatcatatctgaactaagtaaatggagacttaattttattgactggcaccgaatggaaatgagaaaagagaaagaaaaacatgcagcacatttaaaacaactgtgtaatcagatcaatgaattgaaggagctgcaaaaaacctttgaaatctccattgggagaaaagatgaggtgatttctagcttgtctcatgccataggcaagcaaaaggaaaagatagagttgatgagaacattcttccactggcgaatcggccatgtcagagccagacaggatgtttatgaaggtaaactagctgaccagtactaccagagaactttactgaagaaagtctggaaagtctggcgttccgtagtgcaaaagcagtggaaagatgtggtagaaagagcttgtcaagcaagagctgaagaagtttgtatccagatttccaatgattatgaagccaaagttgctatgttatctggagctttggaaaatgcaaaagctgagattcaaagaatgcaacatgaaaaagagcactttgaagattccatgaaaaaagctttcatgaggggtgtatgtgcattaaatcttgaagccatgactatatttcaaaacagaaatgatgcagggatagactccacaaataataaaaaggaagagtatggtcctggtgttcaaggaaaagaacattctgctcatttggatccttcagctcctccgatgcccttaccagttacatcaccactgctgccatccccaccagccgccgtcggaggagccagcgcgactgccgttccctcagctgcttcgatgacttctaccagggctgcttccgcatcttctgttcacgttcctgtttctgctcttggtgcaggatctgcagctactgctgcatcagaagaaatgtatgtgccaagagttgtaacctctgcacaacagaaagcaggaagaactattacagcccggatcacaggaagatgtgattttgcttcaaaaaatagaattagcagcagtttagctataatgggagtttctcctcccatgagctcagttgttgtggaaaaacatcatccagtcacagtgcaaaccattcctcaagcaactgcagcaaaatatccccggaccattcatcctgaaagtagtacctcagcttccagatcacttggaaccagatcagctcacacccagtctctcacaagtgttcattccataaaagtggttgactaaagtgaatatgtccatagtggggtcttttaatccctctggtcttaccaagggttagaagtcttttggttttaacttttccatattgttagaacatcatggagacatcatgttcatctgttcaaaattacaagaggctttttcaagctctaccatgctttgtaactatatgtagaaattattttaatgttattttttatttaagcaattaagtaaaacttttttaaattaaaaaagaaa

SEQ ID NO: 416191 - DNA, 1887 bp, Homo sapiens
ttaattcctccctgcagtttgaaactgtcaggttgccgtctaggtagcggttgtgcttgctgaggctgcacttgctgacactgcagctgcgacgcggctaagaggcgcagagcgaggagtcgggatttggtcgcgagcggcgacggaaataactctgaagtaagagaaactgcaatagaagttggaaaaggatgtgatttccatatttcaagtcattcaaagacagatgagtcatcaccagtgttatcgccaaggaagccttctcacccagtcatggattttttcagttcacatcttttagctgactcttcctcaccagcaacaaattctagtcatacagatgcccatgaaatacttgtgagcgattttcttgtttctgatgaaaaccttcagaagatggaaaatgtgcttgatctttggagttcaggtcttaagacaaacatcatatctgaactaagtaaatggagacttaattttattgactggcaccgaatggaaatgagaaaagagaaagaaaaacatgcagcacatttaaaacaactgtgtaatcagatcaatgaattgaaggagctgcaaaaaacctttgaaatctccattgggagaaaagatgaggtgatttctagcttgtctcatgccataggcaagcaaaaggaaaagatagagttgatgagaacattcttccactggcgaatcggccatgtcagagccagacaggatgtttatgaaggtaaactagctgaccagtactaccagagaactttactgaagaaagtctggaaagtctggcgttccgtagtgcaaaagcagtggaaagatgtggtagaaagagcttgtcaagcaagagctgaagaagtttgtatccagatttccaatgattatgaagccaaagttgctatgttatctggagctttggaaaatgcaaaagctgagattcaaagaatgcaacatgaaaaagagcactttgaagattccatgaaaaaagctttcatgaggggtgtatgtgcattaaatcttgaagccatgactatatttcaaaacagaaatgatgcagggatagactccacaaataataaaaaggaagagtatggtcctggtgttcaaggaaaagaacattctgctcatttggatccttcagctcctccgatgcccttaccagttacatcaccactgctgccatccccaccagccgccgtcggaggagccagcgcgactgccgttccctcagctgcttcgatgacttctaccagggctgcttccgcatcttctgttcacgttcctgtttctgctcttggtgcaggatctgcagctactgctgcatcagaagaaatgtatgtgccaagagttgtaacctctgcacaacagaaagcaggaagaactattacagcccggatcacaggaagatgtgattttgcttcaaaaaatagaattagcagcagtttagctataatgggagtttctcctcccatgagctcagttgttgtggaaaaacatcatccagtcacagtgcaaaccattcctcaagcaactgcagcaaaatatccccggaccattcatcctgaaagtagtacctcagcttccagatcacttggaaccagatcagctcacacccagtctctcacaagtgttcattccataaaagtggttgactaaagtgaatatgtccatagtggggtcttttaatccctctggtcttaccaagggttagaagtcttttggttttaacttttccatattgttagaacatcatggagacatcatgttcatctgttcaaaattacaagaggctttttcaagctctaccatgctttgtaactatatgtagaaattattttaatgttattttttatttaagcaattaagtaaaacttttttaaattaaaaaagaaa

SEQ ID NO: 416192 - DNA, 1975 bp, Homo sapiens
attcagtacaatctgctgcccaggacctggacattgacagataaaatgaagtgggtcagttaactacagagggaagaatatgaagaactgcttcattatgctatagtgactccaaatattgaaccctgtgcttcacagtcatctcatcctaagggagaattggtgccagatgtcagaatttctacaattcatgatattcttcatagtcaaggaaataactctgaagtaagagaaactgcaatagaagttggaaaaggatgtgatttccatatttcaagtcattcaaagacagatgctacaacttttcttttattcagagtcatcaccagtgttatcgccaaggaagccttctcacccagtcatggattttttcagttcacatcttttagctgactcttcctcaccagcaacaaattctagtcatacagatgcccatgaaatacttgtgagcgattttcttgtttctgatgaaaaccttcagaagatggaaaatgtgcttgatctttggagttcaggtcttaagacaaacatcatatctgaactaagtaaatggagacttaattttattgactggcaccgaatggaaatgagaaaagagaaagaaaaacatgcagcacatttaaaacaactgtgtaatcagatcaatgaattgaaggagctgcaaaaaacctttgaaatctccattgggagaaaagatgaggtgatttctagcttgtctcatgccataggcaagcaaaaggaaaagatagagttgatgagaacattcttccactggcgaatcggccatgtcagagccagacaggatgtttatgaaggtaaactagctgaccagtactaccagagaactttactgaagaaagtctggaaagtctggcgttccgtagtgcaaaagcagtggaaagatgtggtagaaagagcttgtcaagcaagagctgaagaagtttgtatccagatttccaatgattatgaagccaaagttgctatgttatctggagctttggaaaatgcaaaagctgagattcaaagaatgcaacatgaaaaagagcactttgaagattccatgaaaaaagctttcatgaggggtgtatgtgcattaaatcttgaagccatgactatatttcaaaacagaaatgatgcagggatagactccacaaataataaaaaggaagagtatggtcctggtgttcaaggaaaagaacattctgctcatttggatccttcagctcctccgatgcccttaccagttacatcaccactgctgccatccccaccagccgccgtcggaggagccagcgcgactgccgttccctcagctgcttcgatgacttctaccagggctgcttccgcatcttctgttcacgttcctgtttctgctcttggtgcaggatctgcagctactgctgcatcagaagaaatgtatgtgccaagagttgtaacctctgcacaacagaaagcaggaagaactattacagcccggatcacaggaagatgtgattttgcttcaaaaaatagaattagcagcagtttagctataatgggagtttctcctcccatgagctcagttgttgtggaaaaacatcatccagtcacagtgcaaaccattcctcaagcaactgcagcaaaatatccccggaccattcatcctgaaagtagtacctcagcttccagatcacttggaaccagatcagctcacacccagtctctcacaagtgttcattccataaaagtggttgactaaagtgaatatgtccatagtggggtcttttaatccctctggtcttaccaagggttagaagtcttttggttttaacttttccatattgttagaacatcatggagacatcatgttcatctgttcaaaattacaagaggctttttcaagctctaccatgctttgtaactatatgtagaaattattttaatgttattttttatttaagcaattaagtaaaacttttttaaattaaaaaagaaa

SEQ ID NO: 416193 - DNA, 1313 bp, Homo sapiens
ttaattcctccctgcagtttgaaactgtcaggttgccgtctaggtagcggttgtgcttgctgaggctgcacttgctgacactgcagctgcgacgcggctaagaggcgcagagcgaggagtcgggatttggtcgcgagcggcgacgagcatttgtgcagaatgtcatcagatgaggagaaatactcacttccagttgtgcaaaatgactccagtcgaggcagttctgtctcttcgaatcttcaggaagaatatgaagaactgcttcattatgctatagtgactccaaatattgaaccctgtgcttcacagtcatctcatcctaagggagaattggtgccagatgtcagaatttctacaattcatgatattcttcatagtcaaggaaataactctgaagtaagagaaactgcaatagaagttggaaaaggatgtgatttccatatttcaagtcattcaaagacagatgagtcatcaccagtgttatcgccaaggaagccttctcacccagtcatggattttttcagttcacatcttttagctgactcttcctcaccagcaacaaattctagtcatacttaccagttacatcaccactgctgccatccccaccagccgccgtcggaggagccagcgcgactgccgttccctcagctgcttcgatgacttctaccagggctgcttccgcatcttctgttcacgttcctgtttctgctcttggtgcaggatctgcagctactgctgcatcagaagaaatgtatgtgccaagagttgtaacctctgcacaacagaaagcaggaagaactattacagcccggatcacaggaagatgtgattttgcttcaaaaaatagaattagcagcagtttagctataatgggagtttctcctcccatgagctcagttgttgtggaaaaacatcatccagtcacagtgcaaaccattcctcaagcaactgcagcaaaatatccccggaccattcatcctgaaagtagtacctcagcttccagatcacttggaaccagatcagctcacacccagtctctcacaagtgttcattccataaaagtggttgactaaagtgaatatgtccatagtggggtcttttaatccctctggtcttaccaagggttagaagtcttttggttttaacttttccatattgttagaacatcatggagacatcatgttcatctgttcaaaattacaagaggctttttcaagctctaccatgctttgtaactatatgtagaaattattttaatgttattttttatttaagcaattaagtaaaacttttttaaattaaaaaagaaa

SEQ ID NO: 416194 - DNA, 1519 bp, Homo sapiens
agtttgatctcagactactgtgctagtaatcagtgagacttcgtgggcgtaggaccctctgagccagacaaacatcatatctgaactaagtaaatggagacttaattttattgactggcaccgaatggaaatgagaaaagagaaagaaaaacatgcagcacatttaaaacaactgtgtaatcagatcaatgaattgaaggagctgcaaaaaacctttgaaatctccattgggagaaaagatgaggtgatttctagcttgtctcatgccataggcaagcaaaaggaaaagatagagttgatgagaacattcttccactggcgaatcggccatgtcagagccagacaggatgtttatgaaggtaaactagctgaccagtactaccagagaactttactgaagaaagtctggaaagtctggcgttccgtagtgcaaaagcagtggaaagatgtggtagaaagagcttgtcaagcaagagctgaagaagtttgtatccagatttccaatgattatgaagccaaagttgctatgttatctggagctttggaaaatgcaaaagctgagattcaaagaatgcaacatgaaaaagagcactttgaagattccatgaaaaaagctttcatgaggggtgtatgtgcattaaatcttgaagccatgactatatttcaaaacagaaatgatgcagggatagactccacaaataataaaaaggaagagtatggtcctggtgttcaaggaaaagaacattctgctcatttggatccttcagctcctccgatgcccttaccagttacatcaccactgctgccatccccaccagccgccgtcggaggagccagcgcgactgccgttccctcagctgcttcgatgacttctaccagggctgcttccgcatcttctgttcacgttcctgtttctgctcttggtgcaggatctgcagctactgctgcatcagaagaaatgtatgtgccaagagttgtaacctctgcacaacagaaagcaggaagaactattacagcccggatcacaggaagatgtgattttgcttcaaaaaatagaattagcagcagtttagctataatgggagtttctcctcccatgagctcagttgttgtggaaaaacatcatccagtcacagtgcaaaccattcctcaagcaactgcagcaaaatatccccggaccattcatcctgaaagtagtacctcagcttccagatcacttggaaccagatcagctcacacccagtctctcacaagtgttcattccataaaagtggttgactaaagtgaatatgtccatagtggggtcttttaatccctctggtcttaccaagggttagaagtcttttggttttaacttttccatattgttagaacatcatggagacatcatgttcatctgttcaaaattacaagaggctttttcaagctctaccatgctttgtaactatatgtagaaattattttaatgttattttttatttaagcaattaagtaaaacttttttaaattaaaaaagaaa

SEQ ID NO: 416195 - DNA, 630 bp, Homo sapiens
ttaattcctccctgcagtttgaaactgtcaggttgccgtctaggtagcggttgtgcttgctgaggctgcacttgctgacactgcagctgcgacgcggctaagaggcgcagagcgaggagtcgggatttggtcgcgagcggcgacgagcatttgtgcagaatgtcatcagatgaggagaaatactcacttccagttgtgcaaaatgactccagtcgaggcagttctgtctcttcgaatcttcaggaagaatatgaagaactgcttcattatgctatagtgactccaaatattgaaccctgtgcttcacagtcatctcatcctaagggagaattggtgccagatgtcagaatttctacaattcatgatattcttcatagtcaaggaaataactctgaagtaagagaaactgcaatagaagttggaaaaggatgtgatttccatatttcaagtcattcaaagacagatgagtcatcaccagtgttatcgccaaggaagccttctcacccagtcatggatttttacataaaattaacacaatcataatgatagggtttattttcttgattagtccagaagccagctgtccagggccagtgtatctacttgaggaagtcataaaagacaggctcc

SEQ ID NO: 416196 - DNA, 534 bp, Homo sapiens
ttaattcctccctgcagtttgaaactgtcaggttgccgtctaggtagcggttgtgcttgctgaggctgcacttgctgacactgcagctgcgacgcggctaagaggcgcagagcgaggagtcgggatttggtcgcgagcggcgacgagcatttgtgcagaatgtcatcagatgaggagaaatactcacttccagttgtgcaaaatgactccagtcgaggcagttctgtctcttcgaatcttcaggaagaatatgaagaactgcttcattatgctatagtgactccaaatattgaaccctgtgcttcacagtcatctcatcctaagggagaattggtgccagatgtcagaatttctacaattcatgatattcttcatagtcaaggaaataactctgaagtaagagaaactgcaatagaagttggaaagggtaagccatagaggcatatagggttttcacctataatataacttcgacaaagttatgtaatattttactaatacctcgatatcgagaaagacatagtagagacagga

SEQ ID NO: 416197 - DNA, 373 bp, Homo sapiens
ggtccttgctgcaactgcaagccactgaagacaggtgtgtctgatcccaacgtggagcccacagtaacagcaagcagcgactgttgcttgtgcaggaggccctgtgtgccacatgttgctcttcactactgatcagggctgtttacgtgggtcccacacagctgctctgtgactagggaacttgacgtctccatttttcaactgaaaacacagaagtacaaaggggttcaccaccttgtccacggttgccctgcttctaactggtcatgttggaataaaaacaagcaactgtcatccgggatattaaccacgcaggctgtggtgttgcaaagcaggggagcacggagcagggagcataccaccctgctgagat

SEQ ID NO: 416198 - DNA, 416 bp, Homo sapiens
taacgtacttctaagttgtaaagcctaagaaatttatgattgcaaatcttgtcaaatgataacatcaaagttgataaagaaattgacttcctagctgtttagtactagtactatacaactgacagtttttaaatatagaacatcaggagccaagtttatttccagctacaatgaaagtgtacttaaatacttcctatatatactttatatatttttttaaaaagcttgagttttaaagtttattcatgaaagatttgttccatttttttgtgaaagtttaaatggtacttactgcattatttaataatgaaacattttcagaatagtctaaagagcttaaaccttttttctattttgaagtcatctaaaacattttctaagaatttatcttataaataaaagttagaattcattta

SEQ ID NO: 416199 - DNA, 801 bp, Homo sapiens
actgagagctgtttggcactgaggtggagttggggaaggggtgggcagggtgggcatggcgtttccagtagtctcttccagaagagtcctaagcgattgctagggaacagatctaaagcacccagtttattcttttttgcacaaagcagcatgtctgaggcaggctgagtaaaacattcagagtatggtgaacagatagacttacatgaggcctgaaataaatacattttgaataattcattttctggtcacgaaattctagttgaaaagcaaaattcacatcttgccctgcctccatgatgactaggcacattataccacagtcagaaatgaaaactaaaacacacatacaaacaaaaaccatttcattaatggatgaactaaaacaaactgaacaagaacccaccagtccccaaatcaatgaaggctttagtgctttccctgaagttgccaacttcctaggaaaagtgaatcatgactcctgcagtactgatacctacagttaggtacagactcatgcaaatatgataatcattagagaaaacaactgtttttttccctattgctgacaggcggaatacaactttggaaaccctgtattgtgagtgtttattttcctttacatacctgcttcaaaccgtgttcagagagacagtttttcaagactcccttataaatagtttgcttgtgtaaacaagtatgcaatctttttcttaatggttttatctctcaattgtcatttaacaatggccaagtgatatatatacaaagagagagcattaatttataaacaaaaaaaga

SEQ ID NO: 416200 - DNA, 487 bp, Homo sapiens
tgcactccaacctgggcaacaagagtgaaactcagtctcaaataaaataaaataaaaatctacttttgaggaattcaaagtatacatgatcagtttgccaaagatttagtaaagacatttttatttaactgagtgtatctcaaatttattgtggaattctcagtccgaatatctggaataggaacagctttgttagatgctaccataaccacaatgaatgtcttcaagggtgtaattttagatatggtgagtggttgtgttgggggcggcataagtcagggcaattttttgcagctcatatcatgctctgaaagtagctacctgctttaatggatggttagtgcttttctatagaatggaaaagattccagcccgatccttgatatgtttgtgttaaacatgcttatatattatattaaacaatgattaaggacataaatgagtttctgtggtaataaagatgctatattgaatatcaatttgtgta

SEQ ID NO: 416201 - DNA, 728 bp, Homo sapiens
tttgtctcttgctgcagctggtgctccaaatctggtcttagctgcttcgtgtcttcttctccagcctctgtggccctgtgacctgcaggtattgggagatccacagctgagggacccccggaagcctagaaatgggaccattggaatttagagatgtggccatagaattctctctggaggagtggcattgcctggacactgcacagcagaatttatatagggatgtgatgttagagaactacagacacctggtcttccttggtattgttgtcactaagccagacctgatcacctgtctggagcaaggaaaaaaacccttcactgtgaagagacatgagatgattgccaaatccccagttatgtgttttcattttgcccaagacctttgtccagagcagagcctaaaagattccttccaaaaagtgatagtgacaagatatgaaaaacgtgaatatggcaatttagagttaaaaaaaggttgtgaaagtgtggatgagggtaaagtacacaaaagaggttataatggacttaaccaatgtttgacagctacccagagcaaagtatttcaatgtgatacatatgtgaaagtctctcatatattttcaaattcaaacagacataagataagagatactggaaaaaaacctttcaaatgtatagaatgtggcaaagctttcaaccagtcctcaatccttgctacacataagaaaattcatatctcggtaccg

SEQ ID NO: 416202 - DNA, 937 bp, Homo sapiens
tttgtctcttgctgcagctggtgctccaaatctggtcttagctgcttcgtgtcttcttctccagcctctgtggccctgtgacctgcaggtattgggagatccacagctgagggacccccggaagcctagaaatggtattgttgtcactaagccagacctgatcacctgtctggagcaaggaaaaaaacccttcactgtgaagagacatgagatgattgccaaatccccagcgccgcgcggtgaggttctctagtccacgctcgcagccatgccgtccaagggcccgctgcaatcggtgcaagtcttcggacgcaagaagacagccacagctgtggcgcactgcagacgcggcaatggtctcatcaaggtgaacgggcagcccctggagatgactgagccgcgcatgctacaatacgagctgctggagccagttctgcttcttggcaaggagcgatttgctggtgtggacatccgtgtccgtgtgaagggtggtgctcatgtggcccagatttatgctatccgtcagtccacctccaaagccctggtggcctattaccagaaatatgtggatgaggcttccaagaaggagatcaaagacatcctcatccagtatgaccggaccctgctggtagctgatccccgtcgctgcaagtccaaaaagtttggaggtcctggtgcccgtgcttgctaccagaaatcctaccgataagcccatcatgactatcaaaattcacctgtataataaacagtttttgagggattttaaagtttccaggaaaaaaaaagttcattagctttttatgaaggatttatccttttttttcagtgtgctgtttattgctgagaagtggctgccctgccagaaaactgctattctcagctgtaaccacattgactaatagtgagtggaagtgcagtggataaaaagcaaatgtgt

SEQ ID NO: 416203 - DNA, 998 bp, Homo sapiens
tttgtctcttgctgcagctggtgctccaaatctggtcttagctgcttcgtgtcttcttctccagcctctgtggccctgtgacctgcaggtattgggagatccacagctgagggacccccggaagcctagaaatggccaggcgcggtggctcacgcctgtaatctcatctgctcggccaccctgtcccggccctgaagcgatgtaagcaagaagctgccctgctggaactgctccttcgggagactgctgattttggcattctttttcctttcatcgtatttcctctttttttttttttttgagatgaagtttctctcttattgcccaggctggagtgcaatggcacaatctcggctcactgcaacctccgcctcctgggttcaagcgattctcctgcctcagcctcccgagtagctgggatttgcccaccaccatgcctggttaattttgtttgtaaatgtaacctgtatttatcagaatctagcaattgaagtaatgtgttcttattgtttctttcagttatgtgttttcattttgcccaagatgaggttaattttgtttgtaaatgtaacctgtatttatcagaatctagcaattgaagtaatgtgttcttattgtttctttcagttatgtgttttcattttgcccaagacctttgtccagagcagagcctaaaagattccttccaaaaagtgatagtgacaagatatgaaaaacgtgaatatggcaatttagagttaaaaaaaggttgtgaaagtgtggatgagggtaaagtacacaaaagaggttataatggacttaaccaatgtttgacagctacccagagcaaagtatttcaatgtgatacatatgtgaaagtctctcatatattttcaaattcaaacagacataagataagagatactggaaaaaaacctttcaaatgtatagaatgtggcaaagctttcaaccagtcctcaatccttgctacacataagaaaattcatatctcggtaccg

SEQ ID NO: 416204 - DNA, 1189 bp, Homo sapiens
tttgtctcttgctgcagctggtgctccaaatctggtcttagctgcttcgtgtcttcttctccagcctctgtggccctgtgacctgcaggtattgggagatccacagctgagggacccccggaagcctagaaatgggaccattggaatttagagatgtggccatagaattctctctggaggagtggcattgcctggacactgcacagcagaatttatatagggatgtgatgttagagaactacagacacctggtcttccttggtattgttgtcactaagccagacctgatcacctgtctggagcaaggaaaaaaacccttcactgtgaagagacatgagatgattgccaaatccccagatggagtccactttctcatccaggctggagtgcagcagcgcaatctctgtgtgatcattgcaaccttcacctcccaagttcaagcgattctcctgcctcagtctcccaagtagcaaggactacagcgccgcgcggtgaggttctctagtccacgctcgcagccatgccgtccaagggcccgctgcaatcggtgcaagtcttcggacgcaagaagacagccacagctgtggcgcactgcagacgcggcaatggtctcatcaaggtgaacgggcagcccctggagatgactgagccgcgcatgctacaatacgagctgctggagccagttctgcttcttggcaaggagcgatttgctggtgtggacatccgtgtccgtgtgaagggtggtgctcatgtggcccagatttatgctatccgtcagtccacctccaaagccctggtggcctattaccagaaatatgtggatgaggcttccaagaaggagatcaaagacatcctcatccagtatgaccggaccctgctggtagctgatccccgtcgctgcaagtccaaaaagtttggaggtcctggtgcccgtgcttgctaccagaaatcctaccgataagcccatcatgactatcaaaattcacctgtataataaacagtttttgagggattttaaagtttccaggaaaaaaaaagttcattagctttttatgaaggatttatccttttttttcagtgtgctgtttattgctgagaagtggctgccctgccagaaaactgctattctcagctgtaaccacattgactaatagtgagtggaagtgcagtggataaaaagcaaatgtgt

SEQ ID NO: 416205 - DNA, 401 bp, Homo sapiens
gcggccgcacagagaagcaggtccacgaacgagtgtgcggcggggatggggtctctctccagcagacaggccacgcggggactcagccgcacactcgttcgtggaaaagagtccccagtccctcctgcaggacatgctggccacgggaggcttcctgcagggggacgaggccgactgctactgagcagaaccagagtctgccactggggctcaggaccaagggaggcagcaccatgtccttctgtgggacactgccagccccagggctccagcccagcccggtggatcctctggggaagccaggaccaggagagaagcaaggtcaagaaatcccacagtttgatgtattaaagaaatgacttatttctactcaaaataaatggcattgaagtctttcttta

SEQ ID NO: 416206 - DNA, 2939 bp, Homo sapiens
ggcgggggtgatctgtcggagcgaccggcttggcgcctgcctgtccccagcccctctcagcttgaactccttccttcaagtctgggccctcgaggcttccagagcggcctccaggggtgcagtctcagttccccacgccagccgtctccgtcctccgcctcctccgggcctggcaggtggcactgtccggaggcggagccttgggcgaggggtggttgcggcggaggacgcaaccgagcgggcctgcggcctcaccatggacccagaatgcgcccagctgctcccggctctctgtgctgttctggtagatcccaggcagccggtggcagatgacacctgtttggagaagctcctggactggtttaaaacggtcactgaaggagagtccagtgtcgtgctgctgcaggagcacccctgcctggtggagctgctgtcccatgtgctgaaagtccaggacctgagttctggggtcctctccttctcactgcgcctggcaggaaccttcgcagcccaggaaaactgcttccagtatcttcagcagggggagttactaccagggctctttggggagccaggacccctcggccgagcaacctgggccgtccccaccgtgcgcagcggctggatccagggcctgcgctccctggcacagcaccccagcgccctgcgcttcctggccgaccatggtgcggtcgacaccatcttctccctgcagggagactccagcctgtttgtggcctcggcggccagtcagctcctggtgcacgtcctggctttgtccatgcgaggtggagccgaggggcagccctgcctgccggggggtgactggcccgcgtgtgcccagaagatcatggatcacgttgaagagtccttgtgctccgcggccacccccaaggtcactcaggccctgaacgtcctgaccacgaccttcgggcgctgccagagcccctggacggaagccctgtgggtgcggctgagtccccgcgtggcctgtctgctggagagagaccccatccccgccgcacactcgttcgtggacctgcttctctgtgtggctcgttctcccgtgttcagttcttccgacggcagcctgtgggagacagtggcgcgggctctgagctgcctgggtcccacccacatgggacccctggctttggggatcctgaagctcgagcactgtccacaggcactgaggacccaggccttccaggtccttctccagcccctggcctgtgtcctgaaggccacggttcaggcccccggacccccaggcttgctggacgggacggcagacgatgccacgacggtggacacactcctggcctccaagtcgtcctgcgccggcctcctgtgccgcaccctggctcacctggaggagctgcagccgctgccccagcgcccttcaccgtggccccaggcgtctctactgggggctacagtgactgtcctgcggctctgtgacggctcggctgcccctgcctccagtgtggggggccacctctgtgggaccctggcgggctgcgtccgggtccagcgagcagccctcgacttcctggggacgctgtcacaggggacaggcccccaggagctggtgacgcaggcgcttgctgtcctcctggagtgcctcgagagccccggctccagccccacggttctgaagaaggccttccaggccacgctcaggtggctcctgagctcacccaagacccccggctgctctgatctcggccccctcatcccgcagttcctcagagagctgttccctgtgctgcagaaacgcctgtgccacccctgctgggaggtgagggactccgccctcgagttcctgacccagctgagcaggcactggggaggacaggctgacttcagatgcgcactcttggcttcagaggtgcctcagctggccctgcagctcctccaggaccctgagagttatgtccgagcgagtgcagtgaccgccatggggcagctgtccagccagggcctgcacgcccccaccagccctgagcatgcagaggcccggcagagcctgttcctggagctcctgcacatcctctccgtagactcggagggcttcccacggcgggcggtcatgcaagtcttcactgagtggctgcgggacggccacgccgacgcggcccaggacacggagcagttcgtggccactgtgctgcaggcggcgagccgggacctggactgggaggtccgcgcccagggcctggagctggccctcgtgttcctgggccagactttggggccgccgcgtacccactgcccctatgccgtggccctacccgaggtggccccagcccagccactcaccgaggcactgagggctctctgccacgtggggctctttgacttcgccttttgtgccttgtttgactgcgaccgccctgtggcgcagaagtcttgtgacctccttctcttcctgagggacaagattgcttcctacagcagcctgcgggaggccaggggcagccccaacactgcctccgcagaggccaccctgccgaggtggcgggcgggtgagcaggcccagcccccaggggaccaggagcctgaggctgtgctggccatgctcaggtccctagacctggagggcctgcggagcacgctggccgagagcagcgaccacgtggaaaagagtccccagtccctcctgcaggacatgctggccacgggaggcttcctgcagggggacgaggccgactgctactgagcagaaccagagtctgccactggggctcaggaccaagggaggcagcaccatgtccttctgtgggacactgccagccccagggctccagcccagcccggtggatcctctggggaagccaggaccaggagagaagcaaggtcaagaaatcccacagtttgatgtattaaagaaatgacttatttctactcaaaataaatggcattgaagtctttcttta

SEQ ID NO: 416207 - DNA, 5301 bp, Homo sapiens
  misc_feature (1487)..(1487): n is a, c, g, or t
ggcgggggtgatctgtcggagcgaccggcttggcgcctgcctgtccccagcccctctcagcttgaactccttccttcaagtctgggccctcgaggcttccagagcggcctccaggggtgcagtctcagttccccacgccagccgtctccgtcctccgcctcctccgggcctggcaggtggcactgtccggaggcggagccttgggcgaggggtggttgcggcggaggacgcaaccgagcgggcctgcggcctcaccatggacccagaatgcgcccagctgctcccggctctctgtgctgttctggtagatcccaggcagccggtggcagatgacacctgtttggagaagctcctggactggtttaaaacggtcactgaaggagagtccagtgtcgtgctgctgcaggagcacccctgcctggtggagctgctgtcccatgtgctgaaagtccaggacctgagttctggggtcctctccttctcactgcgcctggcaggaaccttcgcagcccaggaaaactgcttccagtatcttcagcagggggagttactaccagggctctttggggagccaggacccctcggccgagcaacctgggccgtccccaccgtgcgcagcggctggatccagggcctgcgctccctggcacagcaccccagcgccctgcgcttcctggccgaccatggtgcggtcgacaccatcttctccctgcagggagactccagcctgtttgtggcctcggcggccagtcagctcctggtgcacgtcctggctttgtccatgcgaggtggagccgaggggcagccctgcctgccggggggtgactggcccgcgtgtgcccagaagatcatggatcacgttgaagagtccttgtgctccgcggccacccccaaggtcactcaggccctgaacgtcctgaccacgaccttcgggcgctgccagagcccctggacggaagccctgtgggtgcggctgagtccccgcgtggcctgtctgctggagagagaccccatccccgccgcacactcgttcgtggacctgcttctctgtgtggctcggtcagggccccgggacgcagctggggggcctgggtgggcaactgttttcctcggataacgcccagggatgtcccactggcagccggagactctctgaggacatggcctgcagtgaagcggcaccggggtgaccctggaaccctcatggggaaaggcctgtcttgggctgggcgcctccagtgccggagccatggcagtctcagccaggcctcgaatggggttttgagggtgggggagtaatttttctctctggggtctccctttctcccgtgttcagttcttccgacggcagcctgtgggagacagtggcgcgggctctgagctgcctgggtcccacccacatgggacccctggctttggggatcctgaagctcgagcactggtatggtctggggtgcatttcattccgaggcgggtgctgggagctngggcaggcagggaggttgagagcgcagccctcatggcaggggagttccggacaccagggacagtcaggcggccgtgcggggtgtgactgggtggtgcgtgggttgcgcgcggcagcttctgaaggttctttagcaacagaataattgtttcagaccaaagctctgcgagatccccagaggtgagaaggatgcgggagctgctctgctcagagcagggtggtcctgccgacgccctgcgctccgctgccctcccacctgtcccccaccgcagctttggttgggggtttcggagctccccagcacacacaccatgcgggtggggggcctgggggcggtgcaacggcagagcctggggtcaggacaggtgggaaggccgtggatggcctgccagtgttccaggtgggctcacaataggggtggaagtgacctcaggacctgctgcccacagggcccaggggtaccatgagggtccagctctgagctccggggtctccgaatgtttaggagagagtagaccgggggaggatggaggaacaggcccggccctgcaggaatgcattgtggggacactgcctccacctaggcccagacgtgagggcaggtccctcccacagagtggacgctgtacacacctggggacacccgggaggctgggggcaccccatccctgtccccctgagcgggcactgcccctctctctgggtgcatggccaggccctcctggaggcccctcagtatctgctcctaaggacatcaggagtgtcaggcccatctccttggtcaggcctgtcctccccgccactctgtcccatggcatcccctggccagtggcctgcagagaatgtttctcggggggtgtcccaaccccctggctgatttgccccaggcttgctggggacattaggagcacagccaacttgtctcgcagccagggtcgcggcactcacctcgcgtttgtctccagtccacaggcactgaggacccaggccttccaggtccttctccagcccctggcctgtgtcctgaaggccacggttcaggcccccggacccccaggcttgctggacgggacggcagacgatgccacgacggtggacacactcctggcctccaagtcgtcctgcgccggcctcctgtgccgcaccctggctcacctggaggagctgcagccgctgccccagcgcccttcaccgtggccccaggcgtctctactgggggctacagtgactgtcctgcggctctgtgacggctcggctgcccctgcctccagtgtggggggccacctctgtgggaccctggcgggctgcgtccgggtccagcgagcagccctcgacttcctggggacgctgtcacaggggacaggcccccaggagctggtgacgcaggcgcttgctgtcctcctggagtgcctcgagagccccggctccagccccacggtacggtggtggggatagagagcgaggagaggagggaggcagaggcagtgggacccacccctgactccaccccgtcccgtgcaggcctctgcggatggggccttcacacagggccacagagctgctgctcagagagcttcacgatgcaggtggctgcatggggcgggcccagggcctcttgttggtgaagatacatcagcacgcaggggtgtgtggggccgtggggagcaggggcactggtcaggcggcctgcggggaattctggacaagggaaatgaggtggcaccaagacggccctgggcgtgggctttgggttctcctaagcgccatttgtgaatgtgcctactccacagcccctcacggagctgggccctggcaggtacagaccttgtgccacctgccgctgagcagacagcagacaactttggaggaagggcccagggcttcttgggatcctaaggaaaaggtgccctgcgtaattggtcatgttttgatgtagaaatcccgttgcctgggttgtgggtcttctggtgagggctgccaccacctcctcctgctcacagtctgggaagccggttctgcagcatattctgccctattaaaatcagcccaggaggggcgtggggctcacagctgtgattactgtgcgttggggggccgaggtggggggatcaatggagcccaggacttttgaggccagcctgggcaacatagcaagatcccatctctacaaaaaaatagaaaaattagccccaggagtatagctcaggggtagagcatttgactgcaaaaattagccaggcgtggtgatgtgtgcctctagccccagctactcatgaggctgaggcaggaggactgtttgagcctgggaggtggaggctgcagtgaactgtgattgcagtccagcctggatgacacattgagaccctgtctctaaaaaagaaggaagcccagcgttcccttctctctccacttcctgtccccattgctgtccctggagtacgggcagcacaggtgaaggcgagggggacagacagacagcctgcccctccgtctcccgtggccctgcagcccaccctatctgctccaggttctgaagaaggccttccaggccacgctcaggtggctcctgagctcacccaagacccccggctgctctgatctcggccccctcatcccgcagttcctcagagagctgttccctgtgctgcagaaacgcctgtgccacccctgctgggaggtgagggactccgccctcgagttcctgacccagctgagcaggcactggggaggacaggctgacttcagatgcgcactcttggcttcagaggtgcctcagctggccctgcagctcctccaggaccctgagagttatgtccgagcgagtgcagtgaccgccatggggcagctgtccagccagggcctgcacgcccccaccagccctgagcatgcagaggcccggcagagcctgttcctggagctcctgcacatcctctccgtagactcggagggcttcccacggcgggcggtcatgcaagtcttcactgagtggctgcgggacggccacgccgacgcggcccaggacacggagcagttcgtggccactgtgctgcaggcggcgagccgggacctggactgggaggtccgcgcccagggcctggagctggccctcgtgttcctgggccagactttggggccgccgcgtacccactgcccctatgccgtggccctacccgaggtggccccagcccagccactcaccgaggcactgagggctctctgccacgtggggctctttgacttcgccttttgtgccttgtttgactgcgaccgccctgtggcgcagaagtcttgtgacctccttctcttcctgagggacaagattgcttcctacagcagcctgcgggaggccaggggcagccccaacactgcctccgcagaggccaccctgccgaggtggcgggcgggtgagcaggcccagcccccaggggaccaggagcctgaggctgtgctggccatgctcaggtccctagacctggagggcctgcggagcacgctggccgagagcagcgaccacgtggaaaagagtccccagtccctcctgcaggacatgctggccacgggaggcttcctgcagggggacgaggccgactgctactgagcagaaccagagtctgccactggggctcaggaccaagggaggcagcaccatgtccttctgtgggacactgccagccccagggctccagcccagcccggtggatcctctggggaagccaggaccaggagagaagcaaggtcaagaaatcccacagtttgatgtattaaagaaatgacttatttctactcaaaataaatggcattgaagtctttcttta

SEQ ID NO: 416208 - DNA, 4705 bp, Homo sapiens
  misc_feature (3757)..(3757): n is a, c, g, or t
ggcgggggtgatctgtcggagcgaccggcttggcgcctgcctgtccccagcccctctcagcttgaactccttccttcaagtctgggccctcgaggcttccagagcggcctccaggggtgcagtctcagttccccacgccagccgtctccgtcctccgcctcctccgggcctggcaggtggcactgtccggaggcggagccttgggcgaggggtggttgcggcggaggacgcaaccgagcgggcctgcggcctcaccatggacccagaatgcgcccagctgctcccggctctctgtgctgttctggtagatcccaggcagccggtggcagatgacacctgtttggagaagctcctggactggtttaaaacggtcactgaaggagagtccagtgtcgtgctgctgcaggagcacccctgcctggtggagctgctgtcccatgtgctgaaagtccaggacctgagttctggggtcctctccttctcactgcgcctggcaggaaccttcgcagcccaggaaaactgcttccagtatcttcagcagggggagttactaccagggctctttggggagccaggacccctcggccgagcaacctgggccgtccccaccgtgcgcagcggctggatccagggcctgcgctccctggcacagcaccccagcgccctgcgcttcctggccgaccatggtgcggtcgacaccatcttctccctgcagggagactccagcctgtttgtggcctcggcggccagtcagctcctggtgcacgtcctggctttgtccatgcgaggtggagccgaggggcagccctgcctgccggggggtgactggcccgcgtgtgcccagaagatcatggatcacgttgaagagtccttgtgctccgcggccacccccaaggtcactcaggccctgaacgtcctgaccacgaccttcgggcgctgccagagcccctggacggaagccctgtgggtgcggctgagtccccgcgtggcctgtctgctggagagagaccccatccccgccgcacactcgttcgtggacctgcttctctgtgtggctcggtcagggccccgggacgcagctggggggcctgggtgggcaactgttttcctcggataacgcccagggatgtcccactggcagccggagactctctgaggacatggcctgcagtgaagcggcaccggggtgaccctggaaccctcatggggaaaggcctgtcttgggctgggcgcctccagtgccggagccatggcagtctcagccaggcctcgaatggggttttgagggtgggggagtaatttttctctctggggtctccctttctcccgtgttcagttcttccgacggcagcctgtgggagacagtggcgcgggctctgagctgcctgggtcccacccacatgggacccctggctttggggatcctgaagctcgagcactgtccacaggcactgaggacccaggccttccaggtccttctccagcccctggcctgtgtcctgaaggccacggttcaggcccccggacccccaggcttgctggacgggacggcagacgatgccacgacggtggacacactcctggcctccaagtcgtcctgcgccggcctcctgtgccgcaccctggctcacctggaggagctgcagccgctgccccagcgcccttcaccgtggccccaggcgtctctactgggggctacagtgactgtcctgcggctctgtgacggctcggctgcccctgcctccagtgtggggggccacctctgtgggaccctggcgggctgcgtccgggtccagcgagcagccctcgacttcctggggacgctgtcacaggggacaggcccccaggagctggtgacgcaggcgcttgctgtcctcctggagtgcctcgagagccccggctccagccccacggtacggtggtggggatagagagcgaggagaggagggaggcagaggcagtgggacccacccctgactccaccccgtcccgtgcaggcctctgcggatggggccttcacacagggccacagagctgctgctcagagagcttcacgatgcaggtggctgcatggggcgggcccagggcctcttgttggtgaagatacatcagcacgcaggggtgtgtggggccgtggggagcaggggcactggtcaggcggcctgcggggaattctggacaagggaaatgaggtggcaccaagacggccctgggcgtgggctttgggttctcctaagcgccatttgtgaatgtgcctactccacagcccctcacggagctgggccctggcaggtacagaccttgtgccacctgccgctgagcagacagcagacaactttggaggaagggcccagggcttcttgggatcctaaggaaaaggtgccctgcgtaattggtcatgttttgatgtagaaatcccgttgcctgggttgtgggtcttctggtgagggctgccaccacctcctcctgctcacagtctgggaagccggttctgcagcatattctgccctattaaaatcagcccaggaggggcgtggggctcacagctgtgattactgtgcgttggggggccgaggtggggggatcaatggagcccaggacttttgaggccagcctgggcaacatagcaagatcccatctctacaaaaaaatagaaaaattagccccaggagtatagctcaggggtagagcatttgactgcaaaaattagccaggcgtggtgatgtgtgcctctagccccagctactcatgaggctgaggcaggaggactgtttgagcctgggaggtggaggctgcagtgaactgtgattgcagtccagcctggatgacacattgagaccctgtctctaaaaaagaaggaagcccagcgttcccttctctctccacttcctgtccccattgctgtccctggagtacgggcagcacaggtgaaggcgagggggacagacagacagcctgcccctccgtctcccgtggccctgcagcccaccctatctgctccaggttctgaagaaggccttccaggccacgctcaggtggctcctgagctcacccaagacccccggctgctctgatctcggccccctcatcccgcagttcctcagagagctgttccctgtgctgcagaaacgcctgtgccacccctgctgggaggtgagggactccgccctcgagttcctgacccagctgagcaggcactggggaggacaggctgacttcagatgcgcactcttggcttcagaggtgcctcagctggccctgcagctcctccaggaccctgagagttatgtccgagcgagtgcagtgaccgccatggggcagctgtccagccagggcctgcacgcccccaccagccctgagcatgcagaggcccggcaggtaggaggtggcaggttcctcagccagcaactcccgcctggccatcgtgtgtgctcgtttgcttgcgggtggtcgagcggccagcatgcagcgtgggagcagctgctgctgtgggcagcgcctgcagcagtgactgccgaggccctggggctgtgctgggtgtgggacctgtgcgcttcgccttctgtctccccagcacccctccacttagacatggttacctccatttgacagatgggtaaactgaggattggagggccgtgtgctcactgcgcagcatgggaaggtgtcagagcgggctgtggccctagactgcatgtccggggccagcccccatcatgtaccggagtcctgttgtgggagcctcgctcctgccacnccaccaaccatccgcacttgctccctgtcccccagagcctgttcctggagctcctgcacatcctctccgtagactcggagggcttcccacggcgggcggtcatgcaagtcttcactgagtggctgcgggacggccacgccgacgcggcccaggacacggagcagttcgtggccactgtgctgcaggcggcgagccgggacctggactgggaggtccgcgcccagggcctggagctggccctcgtgttcctgggccagactttggggccgccgcgtacccactgcccctatgccgtggccctacccgaggtggccccagcccagccactcaccgaggcactgagggctctctgccacgtggggctctttgacttcgccttttgtgccttgtttgactgcgaccgccctgtggcgcagaagtcttgtgacctccttctcttcctgagggacaagattgcttcctacagcagcctgcgggaggccaggggcagccccaacactgcctccgcagaggccaccctgccgaggtggcgggcgggtgagcaggcccagcccccaggggaccaggagcctgaggctgtgctggccatgctcaggtccctagacctggagggcctgcggagcacgctggccgagagcagcgaccacgtggaaaagagtccccagtccctcctgcaggacatgctggccacgggaggcttcctgcagggggacgaggccgactgctactgagcagaaccagagtctgccactggggctcaggaccaagggaggcagcaccatgtccttctgtgggacactgccagccccagggctccagcccagcccggtggatcctctggggaagccaggaccaggagagaagcaaggtcaagaaatcccacagtttgatgtattaaagaaatgacttatttctactcaaaataaatggcattgaagtctttcttta

SEQ ID NO: 416209 - DNA, 2791 bp, Homo sapiens
ggcgggggtgatctgtcggagcgaccggcttggcgcctgcctgtccccagcccctctcagcttgaactccttccttcaagtctgggccctcgaggcttccagagcggcctccaggggtgcagtctcagttccccacgccagccgtctccgtcctccgcctcctccgggcctggcaggtggcactgtccggaggcggagccttgggcgaggggtggttgcggcggaggacgcaaccgagcgggcctgcggcctcaccatggacccagaatgcgcccagctgctcccggctctctgtgctgttctggtagatcccaggcagccggtggcagatgacacctgtttggagaagctcctggactggtttaaaacggtcactgaaggagagtccagtgtcgtgctgctgcaggagcacccctgcctggtggagctgctgtcccatgtgctgaaagtccaggacctgagttctggggtcctctccttctcactgcgcctggcaggaaccttcgcagcccaggaaaactgcttccagtatcttcaggtgcggtcgacaccatcttctccctgcagggagactccagcctgtttgtggcctcggcggccagtcagctcctggtgcacgtcctggctttgtccatgcgaggtggagccgaggggcagccctgcctgccggggggtgactggcccgcgtgtgcccagaagatcatggatcacgttgaagagtccttgtgctccgcggccacccccaaggtcactcaggccctgaacgtcctgaccacgaccttcgggcgctgccagagcccctggacggaagccctgtgggtgcggctgagtccccgcgtggcctgtctgctggagagagaccccatccccgccgcacactcgttcgtggacctgcttctctgtgtggctcgttctcccgtgttcagttcttccgacggcagcctgtgggagacagtggcgcgggctctgagctgcctgggtcccacccacatgggacccctggctttggggatcctgaagctcgagcactgtccacaggcactgaggacccaggccttccaggtccttctccagcccctggcctgtgtcctgaaggccacggttcaggcccccggacccccaggcttgctggacgggacggcagacgatgccacgacggtggacacactcctggcctccaagtcgtcctgcgccggcctcctgtgccgcaccctggctcacctggaggagctgcagccgctgccccagcgcccttcaccgtggccccaggcgtctctactgggggctacagtgactgtcctgcggctctgtgacggctcggctgcccctgcctccagtgtggggggccacctctgtgggaccctggcgggctgcgtccgggtccagcgagcagccctcgacttcctggggacgctgtcacaggggacaggcccccaggagctggtgacgcaggcgcttgctgtcctcctggagtgcctcgagagccccggctccagccccacggttctgaagaaggccttccaggccacgctcaggtggctcctgagctcacccaagacccccggctgctctgatctcggccccctcatcccgcagttcctcagagagctgttccctgtgctgcagaaacgcctgtgccacccctgctgggaggtgagggactccgccctcgagttcctgacccagctgagcaggcactggggaggacaggctgacttcagatgcgcactcttggcttcagaggtgcctcagctggccctgcagctcctccaggaccctgagagttatgtccgagcgagtgcagtgaccgccatggggcagctgtccagccagggcctgcacgcccccaccagccctgagcatgcagaggcccggcagagcctgttcctggagctcctgcacatcctctccgtagactcggagggcttcccacggcgggcggtcatgcaagtcttcactgagtggctgcgggacggccacgccgacgcggcccaggacacggagcagttcgtggccactgtgctgcaggcggcgagccgggacctggactgggaggtccgcgcccagggcctggagctggccctcgtgttcctgggccagactttggggccgccgcgtacccactgcccctatgccgtggccctacccgaggtggccccagcccagccactcaccgaggcactgagggctctctgccacgtggggctctttgacttcgccttttgtgccttgtttgactgcgaccgccctgtggcgcagaagtcttgtgacctccttctcttcctgagggacaagattgcttcctacagcagcctgcgggaggccaggggcagccccaacactgcctccgcagaggccaccctgccgaggtggcgggcgggtgagcaggcccagcccccaggggaccaggagcctgaggctgtgctggccatgctcaggtccctagacctggagggcctgcggagcacgctggccgagagcagcgaccacgtggaaaagagtccccagtccctcctgcaggacatgctggccacgggaggcttcctgcagggggacgaggccgactgctactgagcagaaccagagtctgccactggggctcaggaccaagggaggcagcaccatgtccttctgtgggacactgccagccccagggctccagcccagcccggtggatcctctggggaagccaggaccaggagagaagcaaggtcaagaaatcccacagtttgatgtattaaagaaatgacttatttctactcaaaataaatggcattgaagtctttcttta

SEQ ID NO: 416210 - DNA, 4029 bp, Homo sapiens
ggcgggggtgatctgtcggagcgaccggcttggcgcctgcctgtccccagcccctctcagcttgaactccttccttcaagtctgggccctcgaggcttccagagcggcctccaggggtgcagtctcagttccccacgccagccgtctccgtcctccgcctcctccgggcctggcaggtggcactgtccggaggcggagccttgggcgaggggtggttgcggcggaggacgcaaccgagcgggcctgcggcctcaccatggacccagaatgcgcccagctgctcccggctctctgtgctgttctggtagatcccaggcagccggtggcagatgacacctgtttggagaagctcctggactggtttaaaacggtcactgaaggagagtccagtgtcgtgctgctgcaggagcacccctgcctggtggagctgctgtcccatgtgctgaaagtccaggacctgagttctggggtcctctccttctcactgcgcctggcaggaaccttcgcagcccaggaaaactgcttccagtatcttcagcagggggagttactaccagggctctttggggagccaggacccctcggccgagcaacctgggccgtccccaccgtgcgcagcggctggatccagggcctgcgctccctggcacagcaccccagcgccctgcgcttcctggccgaccatggtgcggtcgacaccatcttctccctgcagggagactccagcctgtttgtggcctcggcggccagtcagctcctggtgcacgtcctggctttgtccatgcgaggtggagccgaggggcagccctgcctgccggggggtgactggcccgcgtgtgcccagaagatcatggatcacgttgaagagtccttgtgctccgcggccacccccaaggtcactcaggccctgaacgtcctgaccacgaccttcgggcgctgccagagcccctggacggaagccctgtgggtgcggctgagtccccgcgtggcctgtctgctggagagagaccccatccccgccgcacactcgttcgtggacctgcttctctgtgtggctcgttctcccgtgttcagttcttccgacggcagcctgtgggagacagtggcgcgggctctgagctgcctgggtcccacccacatgggacccctggctttggggatcctgaagctcgagcactgtccacaggcactgaggacccaggccttccaggtccttctccagcccctggcctgtgtcctgaaggccacggttcaggcccccggacccccaggcttgctggacgggacggcagacgatgccacgacggtggacacactcctggcctccaagtcgtcctgcgccggcctcctgtgccgcaccctggctcacctggaggagctgcagccgctgccccagcgcccttcaccgtggccccaggcgtctctactgggggctacagtgactgtcctgcggctctgtgacggctcggctgcccctgcctccagtgtggggggccacctctgtgggaccctggcgggctgcgtccgggtccagcgagcagccctcgacttcctggggacgctgtcacaggggacaggcccccaggagctggtgacgcaggcgcttgctgtcctcctggagtgcctcgagagccccggctccagccccacggtacggtggtggggatagagagcgaggagaggagggaggcagaggcagtgggacccacccctgactccaccccgtcccgtgcaggcctctgcggatggggccttcacacagggccacagagctgctgctcagagagcttcacgatgcaggtggctgcatggggcgggcccagggcctcttgttggtgaagatacatcagcacgcaggggtgtgtggggccgtggggagcaggggcactggtcaggcggcctgcggggaattctggacaagggaaatgaggtggcaccaagacggccctgggcgtgggctttgggttctcctaagcgccatttgtgaatgtgcctactccacagcccctcacggagctgggccctggcaggtacagaccttgtgccacctgccgctgagcagacagcagacaactttggaggaagggcccagggcttcttgggatcctaaggaaaaggtgccctgcgtaattggtcatgttttgatgtagaaatcccgttgcctgggttgtgggtcttctggtgagggctgccaccacctcctcctgctcacagtctgggaagccggttctgcagcatattctgccctattaaaatcagcccaggaggggcgtggggctcacagctgtgattactgtgcgttggggggccgaggtggggggatcaatggagcccaggacttttgaggccagcctgggcaacatagcaagatcccatctctacaaaaaaatagaaaaattagccccaggagtatagctcaggggtagagcatttgactgcaaaaattagccaggcgtggtgatgtgtgcctctagccccagctactcatgaggctgaggcaggaggactgtttgagcctgggaggtggaggctgcagtgaactgtgattgcagtccagcctggatgacacattgagaccctgtctctaaaaaagaaggaagcccagcgttcccttctctctccacttcctgtccccattgctgtccctggagtacgggcagcacaggtgaaggcgagggggacagacagacagcctgcccctccgtctcccgtggccctgcagcccaccctatctgctccaggttctgaagaaggccttccaggccacgctcaggtggctcctgagctcacccaagacccccggctgctctgatctcggccccctcatcccgcagttcctcagagagctgttccctgtgctgcagaaacgcctgtgccacccctgctgggaggtgagggactccgccctcgagttcctgacccagctgagcaggcactggggaggacaggctgacttcagatgcgcactcttggcttcagaggtgcctcagctggccctgcagctcctccaggaccctgagagttatgtccgagcgagtgcagtgaccgccatggggcagctgtccagccagggcctgcacgcccccaccagccctgagcatgcagaggcccggcagagcctgttcctggagctcctgcacatcctctccgtagactcggagggcttcccacggcgggcggtcatgcaagtcttcactgagtggctgcgggacggccacgccgacgcggcccaggacacggagcagttcgtggccactgtgctgcaggcggcgagccgggacctggactgggaggtccgcgcccagggcctggagctggccctcgtgttcctgggccagactttggggccgccgcgtacccactgcccctatgccgtggccctacccgaggtggccccagcccagccactcaccgaggcactgagggctctctgccacgtggggctctttgacttcgccttttgtgccttgtttgactgcgaccgccctgtggcgcagaagtcttgtgacctccttctcttcctgagggacaagattgcttcctacagcagcctgcgggaggccaggggcagccccaacactgcctccgcagaggccaccctgccgaggtggcgggcgggtgagcaggcccagcccccaggggaccaggagcctgaggctgtgctggccatgctcaggtccctagacctggagggcctgcggagcacgctggccgagagcagcgaccacgtggaaaagagtccccagtccctcctgcaggacatgctggccacgggaggcttcctgcagggggacgaggccgactgctactgagcagaaccagagtctgccactggggctcaggaccaagggaggcagcaccatgtccttctgtgggacactgccagccccagggctccagcccagcccggtggatcctctggggaagccaggaccaggagagaagcaaggtcaagaaatcccacagtttgatgtattaaagaaatgacttatttctactcaaaataaatggcattgaagtctttcttta

SEQ ID NO: 416211 - DNA, 2982 bp, Homo sapiens
ggcgggggtgatctgtcggagcgaccggcttggcgcctgcctgtccccagcccctctcagcttgaactccttccttcaagtctgggccctcgaggcttccagagcggcctccaggggtgcagtctcagttccccacgccagccgtctccgtcctccgcctcctccgggcctggcaggtggcactgtccggaggcggagccttgggcgaggggtggttgcggcggaggacgcaaccgagcgggcctgcggcctcaccatggacccagaatgcgcccagctgctcccggctctctgtgctgttctggtagatcccaggcagccggtggcagatgacacctgtttggagaagctcctggactggtttaaaacggtcactgaaggagagtccagtgtcgtgctgctgcaggagcacccctgcctggtggagctgctgtcccatgtgctgaaagtccaggacctgagttctggggtcctctccttctcactgcgcctggcaggaaccttcgcagcccaggaaaactgcttccagtatcttcagcagggggagttactaccagggctctttggggagccaggacccctcggccgagcaacctgggccgtccccaccgtgcgcagcggctggatccagggcctgcgctccctggcacagcaccccagcgccctgcgcttcctggccgaccatggtgcggtcgacaccatcttctccctgcagggagactccagcctgtttgtggcctcggcggccagtcagctcctggtgcacgtcctggctttgtccatgcgaggtggagccgaggggcagccctgcctgccggggggtgactggcccgcgtgtgcccagaagatcatggatcacgttgaagagtccttgtgctccgcggccacccccaaggtcactcaggccctgaacgtcctgaccacgaccttcgggcgctgccagagcccctggacggaagccctgtgggtgcggctgagtccccgcgtggcctgtctgctggagagagaccccatccccgccgcacactcgttcgtggacctgcttctctgtgtggctcgttctcccgtgttcagttcttccgacggcagcctgtgggagacagtggcgcgggctctgagctgcctgggtcccacccacatgggacccctggctttggggatcctgaagctcgagcactgtccacaggcactgaggacccaggccttccaggtccttctccagcccctggcctgtgtcctgaaggccacggttcaggcccccggacccccaggcttgctggacgggacggcagacgatgccacgacggtggacacactcctggcctccaagtcgtcctgcgccggcctcctgtgccgcaccctggctcacctggaggagctgcagccgctgccccagcgcccttcaccgtggccccaggcgtctctactgggggctacagtgactgtcctgcggctctgtgacggctcggctgcccctgcctccagtgtggggggccacctctgtgggaccctggcgggctgcgtccgggtccagcgagcagccctcgacttcctggggacgctgtcacaggggacaggcccccaggagctggtgacgcaggcgcttgctgtcctcctggagtgcctcgagagccccggctccagccccacggttctgaagaaggccttccaggccacgctcaggtggctcctgagctcacccaagacccccggctgctctgatctcggccccctcatcccgcagttcctcagagagctgttccctgtgctgcagaaacgcctgtgccacccctgctgggaggtgagggactccgccctcgagttcctgacccagctgagcaggcactggggaggacaggctgacttcagatgcgcactcttggcttcagaggtgcctcagctggccctgcagctcctccaggaccctgagagttatgtccgagcgagtgcagtgaccgccatggggcagctgtccagccagggcctgcacgcccccaccagccctgagcatgcagaggcccggcagagcctgttcctggagctcctgcacatcctctccgtagactcggagggcttcccacggcgggcggtcatgcaagtcttcactgagtggctgcgggacggccacgccgacgcggcccaggacacggagcagttcgtggccactgtgctgcaggcggcgagccgggacctggactgggaggtccgcgcccagggcctggagctggccctcgtgttcctgggccagactttggggccgccgcgtacccactgcccctatgccgtggccctacccgaggtggccccagcccagccactcaccgaggcactgagggctctctgccacgtggggctctttgacttcgccttttgtgccttgtttgactgcgaccgccctgtggcgcagaagtcttgtgacctccttctcttcctgagggacaagattgcttcctacagcagcctgcgggaggccaggggcagccccaacactgcctccgcagaggccaccctgccgaggtggcgggcgggtgagcaggcccagcccccaggggaccaggagcctgaggctgtgctggccatgctcaggtccctagacctggagggcctgcggagcacgctggccgagagcagcgaccacgtggaaaagagtccccagtccctcctgcaggacatgctggccacgggaggcttcctgcagggggacgaggccgactgctactgagcagaaccagagtctgccactggggctcaggaccaagggaggcagcaccatgtccttctgtgggacactgccagccccagggctccagcccagcccggtggatcctctggggaagccaggaccaggagagaagcaaggtcaagaaatcccacagtttgatgtattaaagaaatgacttatttctactcaaaataaatggcattgaagtctttctttaaccctttttgagttaatttaataataatgatctgagacaaggg

SEQ ID NO: 416212 - DNA, 3119 bp, Homo sapiens
  misc_feature (2171)..(2171): n is a, c, g, or t
ggcgggggtgatctgtcggagcgaccggcttggcgcctgcctgtccccagcccctctcagcttgaactccttccttcaagtctgggccctcgaggcttccagagcggcctccaggggtgcagtctcagttccccacgccagccgtctccgtcctccgcctcctccgggcctggcaggtggcactgtccggaggcggagccttgggcgaggggtggttgcggcggaggacgcaaccgagcgggcctgcggcctcaccatggacccagaatgcgcccagctgctcccggctctctgtgctgttctggtagatcccaggcagccggtggcagatgacacctgtttggagaagctcctggactggtttaaaacggtcactgaaggagagtccagtgtcgtgctgctgcaggagcacccctgcctggtggagctgctgtcccatgtgctgaaagtccaggacctgagttctggggtcctctccttctcactgcgcctggcaggaaccttcgcagcccaggaaaactgcttccagtatcttcagcagggggagttactaccagggctctttggggagccaggacccctcggccgagcaacctgggccgtccccaccgtgcgcagcggctggatccagggcctgcgctccctggcacagcaccccagcgccctgcgcttcctggccgaccatggtgcggtcgacaccatcttctccctgcagggagactccagcctgtttgtggcctcggcggccagtcagctcctggtgcacgtcctggctttgtccatgcgaggtggagccgaggggcagccctgcctgccggggggtgactggcccgcgtgtgcccagaagatcatggatcacgttgaagagtccttgtgctccgcggccacccccaaggtcactcaggccctgaacgtcctgaccacgaccttcgggcgctgccagagcccctggacggaagccctgtgggtgcggctgagtccccgcgtggcctgtctgctggagagagaccccatccccgccgcacactcgttcgtggacctgcttctctgtgtggctcgttctcccgtgttcagttcttccgacggcagcctgtgggagacagtggcgcgggctctgagctgcctgggtcccacccacatgggacccctggctttggggatcctgaagctcgagcactgtccacaggcactgaggacccaggccttccaggtccttctccagcccctggcctgtgtcctgaaggccacggttcaggcccccggacccccaggcttgctggacgggacggcagacgatgccacgacggtggacacactcctggcctccaagtcgtcctgcgccggcctcctgtgccgcaccctggctcacctggaggagctgcagccgctgccccagcgcccttcaccgtggccccaggcgtctctactgggggctacagtgactgtcctgcggctctgtgacggctcggctgcccctgcctccagtgtggggggccacctctgtgggaccctggcgggctgcgtccgggtccagcgagcagccctcgacttcctggggacgctgtcacaggggacaggcccccaggagctggtgacgcaggcgcttgctgtcctcctggagtgcctcgagagccccggctccagccccacggttctgaagaaggccttccaggccacgctcaggtggctcctgagctcacccaagacccccggctgctctgatctcggccccctcatcccgcagttcctcagagagctgttccctgtgctgcagaaacgcctgtgccacccctgctgggaggtgagggactccgccctcgagttcctgacccagctgagcaggcactggggaggacaggctgacttcagatgcgcactcttggcttcagaggtgcctcagctggccctgcagctcctccaggaccctgagagttatgtccgagcgagtgcagtgaccgccatggggcagctgtccagccagggcctgcacgcccccaccagccctgagcatgcagaggcccggcagatgggtaaactgaggattggagggccgtgtgctcactgcgcagcatgggaaggtgtcagagcgggctgtggccctagactgcatgtccggggccagcccccatcatgtaccggagtcctgttgtgggagcctcgctcctgccacnccaccaaccatccgcacttgctccctgtcccccagagcctgttcctggagctcctgcacatcctctccgtagactcggagggcttcccacggcgggcggtcatgcaagtcttcactgagtggctgcgggacggccacgccgacgcggcccaggacacggagcagttcgtggccactgtgctgcaggcggcgagccgggacctggactgggaggtccgcgcccagggcctggagctggccctcgtgttcctgggccagactttggggccgccgcgtacccactgcccctatgccgtggccctacccgaggtggccccagcccagccactcaccgaggcactgagggctctctgccacgtggggctctttgacttcgccttttgtgccttgtttgactgcgaccgccctgtggcgcagaagtcttgtgacctccttctcttcctgagggacaagattgcttcctacagcagcctgcgggaggccaggggcagccccaacactgcctccgcagaggccaccctgccgaggtggcgggcgggtgagcaggcccagcccccaggggaccaggagcctgaggctgtgctggccatgctcaggtccctagacctggagggcctgcggagcacgctggccgagagcagcgaccacgtggaaaagagtccccagtccctcctgcaggacatgctggccacgggaggcttcctgcagggggacgaggccgactgctactgagcagaaccagagtctgccactggggctcaggaccaagggaggcagcaccatgtccttctgtgggacactgccagccccagggctccagcccagcccggtggatcctctggggaagccaggaccaggagagaagcaaggtcaagaaatcccacagtttgatgtattaaagaaatgacttatttctactcaaaataaatggcattgaagtctttcttta

SEQ ID NO: 416213 - DNA, 2566 bp, Homo sapiens
ggcgggggtgatctgtcggagcgaccggcttggcgcctgcctgtccccagcccctctcagcttgaactccttccttcaagtctgggccctcgaggcttccagagcggcctccaggggtgcagtctcagttccccacgccagccgtctccgtcctccgcctcctccgggcctggcaggtggcactgtccggaggcggagccttgggcgaggggtggttgcggcggaggacgcaaccgagcgggcctgcggcctcaccatggacccagaatgcgcccagctgctcccggctctctgtgctgttctggtagatcccaggcagccggtggcagatgacacctgtttggagaagctcctggactggtttaaaacggtcactgaaggagagtccagtgtcgtgctgctgcaggagcacccctgcctggtggagctgctgtcccatgtgctgaaagtccaggacctgagttctggggtcctctccttctcactgcgcctggcaggaaccttcgcagcccaggaaaactgcttccagtatcttcagcagggggagttactaccagggctctttggggagccaggacccctcggccgagcaacctgggccgtccccaccgtgcgcagcggctggatccagggcctgcgctccctggcacagcaccccagcgccctgcgcttcctggccgaccatgttctcccgtgttcagttcttccgacggcagcctgtgggagacagtggcgcgggctctgagctgcctgggtcccacccacatgggacccctggctttggggatcctgaagctcgagcactgtccacaggcactgaggacccaggccttccaggtccttctccagcccctggcctgtgtcctgaaggccacggttcaggcccccggacccccaggcttgctggacgggacggcagacgatgccacgacggtggacacactcctggcctccaagtcgtcctgcgccggcctcctgtgccgcaccctggctcacctggaggagctgcagccgctgccccagcgcccttcaccgtggccccaggcgtctctactgggggctacagtgactgtcctgcggctctgtgacggctcggctgcccctgcctccagtgtggggggccacctctgtgggaccctggcgggctgcgtccgggtccagcgagcagccctcgacttcctggggacgctgtcacaggggacaggcccccaggagctggtgacgcaggcgcttgctgtcctcctggagtgcctcgagagccccggctccagccccacggttctgaagaaggccttccaggccacgctcaggtggctcctgagctcacccaagacccccggctgctctgatctcggccccctcatcccgcagttcctcagagagctgttccctgtgctgcagaaacgcctgtgccacccctgctgggaggtgagggactccgccctcgagttcctgacccagctgagcaggcactggggaggacaggctgacttcagatgcgcactcttggcttcagaggtgcctcagctggccctgcagctcctccaggaccctgagagttatgtccgagcgagtgcagtgaccgccatggggcagctgtccagccagggcctgcacgcccccaccagccctgagcatgcagaggcccggcagagcctgttcctggagctcctgcacatcctctccgtagactcggagggcttcccacggcgggcggtcatgcaagtcttcactgagtggctgcgggacggccacgccgacgcggcccaggacacggagcagttcgtggccactgtgctgcaggcggcgagccgggacctggactgggaggtccgcgcccagggcctggagctggccctcgtgttcctgggccagactttggggccgccgcgtacccactgcccctatgccgtggccctacccgaggtggccccagcccagccactcaccgaggcactgagggctctctgccacgtggggctctttgacttcgccttttgtgccttgtttgactgcgaccgccctgtggcgcagaagtcttgtgacctccttctcttcctgagggacaagattgcttcctacagcagcctgcgggaggccaggggcagccccaacactgcctccgcagaggccaccctgccgaggtggcgggcgggtgagcaggcccagcccccaggggaccaggagcctgaggctgtgctggccatgctcaggtccctagacctggagggcctgcggagcacgctggccgagagcagcgaccacgtggaaaagagtccccagtccctcctgcaggacatgctggccacgggaggcttcctgcagggggacgaggccgactgctactgagcagaaccagagtctgccactggggctcaggaccaagggaggcagcaccatgtccttctgtgggacactgccagccccagggctccagcccagcccggtggatcctctggggaagccaggaccaggagagaagcaaggtcaagaaatcccacagtttgatgtattaaagaaatgacttatttctactcaaaataaatggcattgaagtctttcttta

SEQ ID NO: 416214 - DNA, 1688 bp, Homo sapiens
cttcctggcttggcccccaggcttgctggacgggacggcagacgatgccacgacggtggacacactcctggcctccaagtcgtcctgcgccggcctcctgtgccgcaccctggctcacctggaggagctgcagccgctgccccagcgcccttcaccgtggccccaggcgtctctactgggggctacagtgactgtcctgcggctctgtgacggctcggctgcccctgcctccagtgtggggggccacctctgtgggaccctggcgggctgcgtccgggtccagcgagcagccctcgacttcctggggacgctgtcacaggggacaggcccccaggagctggtgacgcaggcgcttgctgtcctcctggagtgcctcgagagccccggctccagccccacggttctgaagaaggccttccaggccacgctcaggtggctcctgagctcacccaagacccccggctgctctgatctcggccccctcatcccgcagttcctcagagagctgttccctgtgctgcagaaacgcctgtgccacccctgctgggaggtgagggactccgccctcgagttcctgacccagctgagcaggcactggggaggacaggctgacttcagatgcgcactcttggcttcagaggtgcctcagctggccctgcagctcctccaggaccctgagagttatgtccgagcgagtgcagtgaccgccatggggcagctgtccagccagggcctgcacgcccccaccagccctgagcatgcagaggcccggcagagcctgttcctggagctcctgcacatcctctccgtagactcggagggcttcccacggcgggcggtcatgcaagtcttcactgagtggctgcgggacggccacgccgacgcggcccaggacacggagcagttcgtggccactgtgctgcaggcggcgagccgggacctggactgggaggtccgcgcccagggcctggagctggccctcgtgttcctgggccagactttggggccgccgcgtacccactgcccctatgccgtggccctacccgaggtggccccagcccagccactcaccgaggcactgagggctctctgccacgtggggctctttgacttcgccttttgtgccttgtttgactgcgaccgccctgtggcgcagaagtcttgtgacctccttctcttcctgagggacaagattgcttcctacagcagcctgcgggaggccaggggcagccccaacactgcctccgcagaggccaccctgccgaggtggcgggcgggtgagcaggcccagcccccaggggaccaggagcctgaggctgtgctggccatgctcaggtccctagacctggagggcctgcggagcacgctggccgagagcagcgaccacgtggaaaagagtccccagtccctcctgcaggacatgctggccacgggaggcttcctgcagggggacgaggccgactgctactgagcagaaccagagtctgccactggggctcaggaccaagggaggcagcaccatgtccttctgtgggacactgccagccccagggctccagcccagcccggtggatcctctggggaagccaggaccaggagagaagcaaggtcaagaaatcccacagtttgatgtattaaagaaatgacttatttctactcaaaataaatggcattgaagtctttcttta

SEQ ID NO: 416215 - DNA, 2537 bp, Homo sapiens
  misc_feature (2316)..(2316): n is a, c, g, or t
ggcgggggtgatctgtcggagcgaccggcttggcgcctgcctgtccccagcccctctcagcttgaactccttccttcaagtctgggccctcgaggcttccagagcggcctccaggggtgcagtctcagttccccacgccagccgtctccgtcctccgcctcctccgggcctggcaggtggcactgtccggaggcggagccttgggcgaggggtggttgcggcggaggacgcaaccgagcgggcctgcggcctcaccatggacccagaatgcgcccagctgctcccggctctctgtgctgttctggtagatcccaggcagccggtggcagatgacacctgtttggagaagctcctggactggtttaaaacggtcactgaaggagagtccagtgtcgtgctgctgcaggagcacccctgcctggtggagctgctgtcccatgtgctgaaagtccaggacctgagttctggggtcctctccttctcactgcgcctggcaggaaccttcgcagcccaggaaaactgcttccagtatcttcagcagggggagttactaccagggctctttggggagccaggacccctcggccgagcaacctgggccgtccccaccgtgcgcagcggctggatccagggcctgcgctccctggcacagcaccccagcgccctgcgcttcctggccgaccatggtgcggtcgacaccatcttctccctgcagggagactccagcctgtttgtggcctcggcggccagtcagctcctggtgcacgtcctggctttgtccatgcgaggtggagccgaggggcagccctgcctgccggggggtgactggcccgcgtgtgcccagaagatcatggatcacgttgaagagtccttgtgctccgcggccacccccaaggtcactcaggccctgaacgtcctgaccacgaccttcgggcgctgccagagcccctggacggaagccctgtgggtgcggctgagtccccgcgtggcctgtctgctggagagagaccccatccccgccgcacactcgttcgtggacctgcttctctgtgtggctcgttctcccgtgttcagttcttccgacggcagcctgtgggagacagtggcgcgggctctgagctgcctgggtcccacccacatgggacccctggctttggggatcctgaagctcgagcactgtccacaggcactgaggacccaggccttccaggtccttctccagcccctggcctgtgtcctgaaggccacggttcaggcccccggacccccaggcttgctggacgggacggcagacgatgccacgacggtggacacactcctggcctccaagtcgtcctgcgccggcctcctgtgccgcaccctggctcacctggaggagctgcagccgctgccccagcgcccttcaccgtggccccaggcgtctctactgggggctacagtgactgtcctgcggctctgtgacggctcggctgcccctgcctccagtgtggggggccacctctgtgggaccctggcgggctgcgtccgggtccagcgagcagccctcgacttcctggggacgctgtcacaggggacaggcccccaggagctggtgacgcaggcgcttgctgtcctcctggagtgcctcgagagccccggctccagccccacggttctgaagaaggccttccaggccacgctcaggtggctcctgagctcacccaagacccccggctgctctgatctcggccccctcatcccgcagttcctcagagagctgttccctgtgctgcagaaacgcctgtgccacccctgctgggaggtgagggactccgccctcgagttcctgacccagctgagcaggcactggggaggacaggctgacttcagatgcgcactcttggcttcagaggtgcctcagctggccctgcagctcctccaggaccctgagagttatgtccgagcgagtgcagtgaccgccatggggcagctgtccagccagggcctgcacgcccccaccagccctgagcatgcagaggcccggcagagcctgttcctggagctcctgcacatcctctccgtagactcggagggcttcccacggcgggcggtcatgcaagtcttcactgagtggctgcgggacggccacgccgacgcggcccaggacacggagcagttcgtggccactgtgctgcaggcggcgagccgggacctggactgggaggtccgcgcccagggcctggagctggccctcgtgttcctgggccagactttggggccgccgcgtacccactgcacccagccctgtattcttatttcttcaggatatttattttntcttttcacctgttttaaaaataaaaccaaaagtatttgattaccaacaaaaacaacacaaacaaaccaccgaaccaacgaaaacaccaagaaaaaagcgaaaaaacaaaagaagggggcgcgcgggcggcaaggaccccacgaggggaggggccccgcgggggcacacgcggcggggggagggggcccagggggcggggggggcggggcgcggcgccggg

SEQ ID NO: 416216 - DNA, 2076 bp, Homo sapiens
ggcgggggtgatctgtcggagcgaccggcttggcgcctgcctgtccccagcccctctcagcttgaactccttccttcaagtctgggccctcgaggcttccagagcggcctccaggggtgcagtctcagttccccacgccagccgtctccgtcctccgcctcctccgggcctggcaggtggcactgtccggaggcggagccttgggcgaggggtggttgcggcggaggacgcaaccgagcgggcctgcggcctcaccatggacccagaatgcgcccagctgctcccggctctctgtgctgttctggtagatcccaggcagccggtggcagatgacacctgtttggagaagctcctggactggtttaaaacggtcactgaaggagagtccagtgtcgtgctgctgcaggagcacccctgcctggtggagctgctgtcccatgtgctgaaagtccaggacctgagttctggggtcctctccttctcactgcgcctggcaggaaccttcgcagcccaggaaaactgcttccagtatcttcagcagggggagttactaccagggctctttggggagccaggacccctcggccgagcaacctgggccgtccccaccgtgcgcagcggctggatccagggcctgcgctccctggcacagcaccccagcgccctgcgcttcctggccgaccatggtgcggtcgacaccatcttctccctgcagggagactccagcctgtttgtggcctcggcggccagtcagctcctggtgcacgtcctggctttgtccatgcgaggtggagccgaggggcagccctgcctgccggggggtgactggcccgcgtgtgcccagaagatcatggatcacgttgaagagtccttgtgctccgcggccacccccaaggtcactcaggccctgaacgtcctgaccacgaccttcgggcgctgccagagcccctggacggaagccctgtgggtgcggctgagtccccgcgtggcctgtctgctggagagagaccccatccccgccgcacactcgttcgtggacctgcttctctgtgtggctcgttctcccgtgttcagttcttccgacggcagcctgtgggagacagtggcgcgggctctgagctgcctgggtcccacccacatgggacccctggctttggggatcctgaagctcgagcactgtccacaggcactgaggacccaggccttccaggtccttctccagcccctggcctgtgtcctgaaggccacggttcaggcccccggacccccaggcttgctggacgggacggcagacgatgccacgacggtggacacactcctggcctccaagtcgtcctgcgccggcctcctgtgccgcaccctggctcacctggaggagctgcagccgctgccccagcgcccttcaccgtggccccaggcgtctctactgggggctacagtgactgtcctgcggctctgtgacggctcggctgcccctgcctccagtgtggggggccacctctgtgggaccctggcgggctgcgtccgggtccagcgagcagccctcgacttcctggggacgctgtcacaggggacaggcccccaggagctggtgacgcaggcgcttgctgtcctcctggagtgcctcgagagccccggctccagccccacggttctgaagaaggccttccaggccacgctcaggtggctcctgagctcacccaagacccccggctgctctgatctcggccccctcatcccgcagttcctcagagagctgttccctgtgctgcagaaacgcctgtgccacccctgctgggaggtgagggactccgccctcgagttcctgacccagctgagcaggcactggggaggacaggctgacttcagatgcgcactcttggcttcagaggtgcctcagctggcctccgtgttccctgggcccagactttgggccgcgtgttaccactgcctatgcggtggcctcccgaggtggccagccaaccatcaccgagcatgggctcctgccatgggctttagatcctttgctcgtgcctgaccgctggggcaattgaacccttcccgaggacatgtcag

SEQ ID NO: 416217 - DNA, 1182 bp, Homo sapiens
  misc_feature (5)..(5): n is a, c, g, or t
  misc_feature (68)..(68): n is a, c, g, or t
  misc_feature (75)..(75): n is a, c, g, or t
  misc_feature (100)..(100): n is a, c, g, or t
  misc_feature (111)..(111): n is a, c, g, or t
  misc_feature (116)..(116): n is a, c, g, or t
  misc_feature (118)..(118): n is a, c, g, or t
  misc_feature (124)..(124): n is a, c, g, or t
  misc_feature (133)..(133): n is a, c, g, or t
  misc_feature (137)..(137): n is a, c, g, or t
  misc_feature (145)..(145): n is a, c, g, or t
  misc_feature (205)..(205): n is a, c, g, or t
  misc_feature (215)..(215): n is a, c, g, or t
  misc_feature (235)..(235): n is a, c, g, or t
  misc_feature (266)..(266): n is a, c, g, or t
  misc_feature (282)..(282): n is a, c, g, or t
  misc_feature (303)..(303): n is a, c, g, or t
  misc_feature (308)..(308): n is a, c, g, or t
  misc_feature (317)..(317): n is a, c, g, or t
  misc_feature (321)..(321): n is a, c, g, or t
  misc_feature (334)..(334): n is a, c, g, or t
  misc_feature (368)..(368): n is a, c, g, or t
  misc_feature (387)..(387): n is a, c, g, or t
  misc_feature (417)..(417): n is a, c, g, or t
  misc_feature (420)..(420): n is a, c, g, or t
  misc_feature (480)..(480): n is a, c, g, or t
  misc_feature (532)..(532): n is a, c, g, or t
  misc_feature (539)..(539): n is a, c, g, or t
  misc_feature (544)..(544): n is a, c, g, or t
  misc_feature (563)..(563): n is a, c, g, or t
  misc_feature (688)..(688): n is a, c, g, or t
  misc_feature (704)..(704): n is a, c, g, or t
agttntgattctctccgccagcactttatgagtttttaactggagaacttgaactggccctggcgctngttttgnacaaggtggctctggccccccccgntcttgtggttncctgnangcattntttccatcnatantatccccngctccacgtcgtccttttcacctcttttcctcgtacccccgcaccccacaggatcctagnaatgtcttgnagcacagtcgcaggcggggnagagaatgaactcgggccctggggccagagnagttgctaagagcctntaaagccataactgtgggganagtgnacttgagcngctngcgggagaagatngctcggggtgtggctggggccacctgggggaatngctctggggaggaggaggnagaggaggatggcccagcagtcctggtggngcngcacactgattcagcaatggagccaatctgtgcccacccaagagcgctacaaggatgggntggtgaccctcggctgtgtgggtgttcccttatgtgggaaagtcctcgctgntcaatgngctgntggggcgaaaagtctttantatctccagaaccccggcccatacccgaaactttcatacctactttcttaccccctcttttaagctctgttactgcccaggcctcatcttcccatctcttctgcctaggcagttgcaggatgctngcagggatctaccctntcgcccagagccaggggcagccccaacactgcctccgcagaggccaccctgccgaggtggcgggcgggtgagcaggcccagcccccaggggaccaggagcctgaggctgtgctggccatgctcaggtccctagacctggagggcctgcggagcacgctggccgagagcagcgaccacgtggaaaagagtccccagtccctcctgcaggacatgctggccacgggaggcttcctgcagggggacgaggccgactgctactgagcagaaccagagtctgccactggggctcaggaccaagggaggcagcaccatgtccttctgtgggacactgccagccccagggctccagcccagcccggtggatcctctggggaagccaggaccaggagagaagcaaggtcaagaaatcccacagtttgatgtattaaagaaatgacttatttctactcaaaataaatggcattgaagtctttcttta

SEQ ID NO: 416218 - DNA, 918 bp, Homo sapiens
ggcgggggtgatctgtcggagcgaccggcttggcgcctgcctgtccccagcccctctcagcttgaactccttccttcaagtctgggccctcgaggcttccagagcggcctccaggggtgcagtctcagttccccacgccagccgtctccgtcctccgcctcctccgggcctggcaggtggcactgtccggaggcggagccttgggcgaggggtggttgcggcggaggacgcaaccgagcgggcctgcggcctcaccatggacccagaatgcgcccagctgctcccggctctctgtgctgttctggtagatcccaggcagccggtggcagatgacacctgtttggagaagctcctggactggtttaaaacggtcactgaaggagagtccagtgtcgtgctgctgcaggagcacccctgcctggtggagctgctgtcccatgtgctgaaagtccaggacctgagttctggggtcctctccttctcactgcgcctggcaggaaccttcgcagcccaggaaaactgcttccagtatcttcagcagggggagttactaccagggctctttggggagccaggacccctcggccgagcaacctgggccgtccccaccgtgcgcagcggctggatccagggcctgcgctccctggcacagcaccccagcgccctgcgcttcctggccgaccatggccgactgctactgagcagaaccagagtctgccactggggctcaggaccaagggaggcagcaccatgtccttctgtgggacactgccagccccagggctccagcccagcccggtggatcctctggggaagccaggaccaggagagaagcaaggtcaagaaatcccacagtttgatgtattaaagaaatgacttatttctactcaaaataaatggcattgaagtctttcttta

SEQ ID NO: 416219 - DNA, 1036 bp, Homo sapiens
tttttttaacagtatgaatttcctcttatagcaataatggatgagatttaaatgacagctttctcacattcattatggcatacagtgccccccaaccaagtcatcttggatgtgttgataaaagatttctcaatattcattatactcataagtactctcctctcatgcaaattctctaaaataacactagtgaaaatggtagctaatatttgtggtatgctacgttcaaggcaccattctaagagcttttacatgtaataacttacataatacttccaagaatcttacaataaaggtaatatacttaggtctatcttaaaatgattaaaccaaggtagaggttaagtatcatgatacatataacaaaaagatcaactagtagagctaagataacgttgaaaaagatatttgttttcaatatggctaaagggcttcctacatttactatattaaaactattctccaatttgctaatgtttaataggtttccagtaatgatgtttttctatatgaatgacactaccattttctctcacataaattatctgatgctgtgctttatgaggcaaatgtgcgcccatattcacatttgtgagaattctttgctgctaacaaccagagaacctcttcatagtgatctcaaataatcagacaattcacatgtaaacttgtgagccatgactaaagtcaatcccacattccttatattcaaaagatttctcactgatatgaattctctgatgttgagttagctgtgaaccacgagtaaaggccttcccacattccttacattgatatggtttctcaccagtatgaattctctgatgccgagaaagatgtgaactctgagtaaaggcctttctacattctctgcattcatagggcttctcaccagtatggattctctgatgtagagtaagctgagagccatgactaaaggccttgccacactccttgcattcatagggtttttctccagtgtgaattcgctgatgttgagtcaactgtgaaccacgaataaaggctttcccacatt

SEQ ID NO: 416220 - DNA, 319 bp, Homo sapiens
gcggaccatgctggcaccttaccttggactttccagcttccagaactgggttcaacaggatggtcttgggatcctaggcatcatggagggctgaagaaacatcaaggggagccccagaaattcaccacgggatcccagcctcaggcccgcctagacagtgtgcggggcttctcaccagtatggattctctgatgtagagtaagctgagagccatgactaaaggccttgccacactccttgcattcatagggtttttctccagtgtgaattcgctgatgttgagtcaactgtgaaccacgaataaaggctttcccacatt

SEQ ID NO: 416221 - DNA, 660 bp, Homo sapiens
gcccctggtgctctcagatgtcggccaggcttgcagacaggtgaatgcatctcattggctccagggaggcatgatgccaccgggcagctctttttaagagaaaagccagaaccggtggagcagcgacccctgagcagtgttctctgtgctgagcggcgggactgagctgttgagttagagccaacatgagtgagcgacaaggtgctggggcaaccaatggaaaagacaagacatctggtgaaaatgatggacagaagaaagttcaagaagaatttgacattgacatggatgcaccagagacagaacgtgcagcggtggccattcagtctcagttcagaaaattccagaagaagaaggctgggtctcagtcctagtgggagaaccccctcctagtccacctgaaaacaccaaattcaaccatcatctgtcaagaaattaaaagaacaacaccctagagagaagtcatccacacacaatccacacacgcatagcaaacctccaatgcatgtacagaaacctgtgatatttatacccttgtaggaaggtatagacaatggaattgtgagtagcttaatctctatgtttctctccattttcattcctcctgcaactattttccttgatgttgtaataaaatgaagttacgatgagtgaattcaa

SEQ ID NO: 416222 - DNA, 487 bp, Homo sapiens
  misc_feature (44)..(44): n is a, c, g, or t
  misc_feature (47)..(48): n is a, c, g, or t
  misc_feature (50)..(50): n is a, c, g, or t
gccgggagcgccagcccgggcccgccaggataggtattttgaanggnngngtcggtttgggacaaccacaatcatggacagaagaaagttcaagaagaatttgacattgacatggatgcaccagagacagaacgtgcagcggtggccattcagtctcagttcagaaaattccagaagaagaaggctgggtctcagtcctagtgggagaaccccctcctagtccacctgaaaacaccaaattcaaccatcatctgtcaagaaattaaaagaacaacaccctagagagaagtcatccacacacaatccacacacgcatagcaaacctccaatgcatgtacagaaacctgtgatatttatacccttgtaggaaggtatagacaatggaattgtgagtagcttaatctctatgtttctctccattttcattcctcctgcaactattttccttgatgttgtaataaaatgaagttacgatgagtgaattcaa

SEQ ID NO: 416223 - DNA, 688 bp, Homo sapiens
  misc_feature (661)..(661): n is a, c, g, or t
gcccctggtgctctcagatgtcggccaggcttgcagacaggtgaatgcatctcattggctccagggaggcatgatgccaccgggcagctctttttaagagaaaagccagaaccggtggagcagcgacccctgagcagtgttctctgtgctgagcggcgggactgagctgttgagttagagccaacatgagtgagcgacaaggtgctggggcaaccaatggaaaagacaagacatctggtgaaaatgatggacagaagaaagttcaagaagaatttgacattgacatggatgcaccagagacagaacgtgcagcggtggccattcagtctcagttcagaaaattccagaagaagaaggctgggtctcagtcctagtgggagaaccccctcctagtccacctgaaaacaccaaattcaaccatcatctgtcaagaaattaaaagaacaacaccctagagagaagtcatccacacacaatccacacacgcatagcaaacctccaatgcatgtacagaaacctgtgatatttatacccttgtaggaaggtatagacaatggaattgtgagtagcttaatctctatgtttctctccattttcattcctcctgcaactattttccttgatgttgtaataaaatgaagttacgatgagtgaattcaanaaaaaaaaaaaaaaattctccagggct

SEQ ID NO: 416224 - DNA, 781 bp, Homo sapiens
gcccctggtgctctcagatgtcggccaggcttgcagacaggtgaatgcatctcattggctccagggaggcatgatgccaccgggcagctctttttaagagaaaagccagaaccggtggagcagcgacccctgagcagtgttctctgtgctgagcggcgggactgagctgttgagttagagccaacatgagtgagcgacaaggtgctggggcaaccaatggaaaagacaagacatctggtgaaaatgtcagagtgtgaagaagggcaaactgtggcttttctgtggtttgctgttggggcagctagctgctgattcctgggaaggaatttcaattctttccatgtgctcagagagaagaaggcatttgatggacagaagaaagttcaagaagaatttgacattgacatggatgcaccagagacagaacgtgcagcggtggccattcagtctcagttcagaaaattccagaagaagaaggctgggtctcagtcctagtgggagaaccccctcctagtccacctgaaaacaccaaattcaaccatcatctgtcaagaaattaaaagaacaacaccctagagagaagtcatccacacacaatccacacacgcatagcaaacctccaatgcatgtacagaaacctgtgatatttatacccttgtaggaaggtatagacaatggaattgtgagtagcttaatctctatgtttctctccattttcattcctcctgcaactattttccttgatgttgtaataaaatgaagttacgatgagtgaattcaa

SEQ ID NO: 416225 - DNA, 635 bp, Homo sapiens
taaacagaccctattagactcagacccacgagcacaaagctagctgcaacgactctcttattttccaccgctacactcgggtgccccattctcttctttacacactcctgactggctcagcggaaggagctcctgccactcctctaacagcatctgaccttccccgccgccccgggaactggactctctgaagtatacagaaaagtagcgattccttaaatatggacagaagaaagttcaagaagaatttgacattgacatggatgcaccagagacagaacgtgcagcggtggccattcagtctcagttcagaaaattccagaagaagaaggctgggtctcagtcctagtgggagaaccccctcctagtccacctgaaaacaccaaattcaaccatcatctgtcaagaaattaaaagaacaacaccctagagagaagtcatccacacacaatccacacacgcatagcaaacctccaatgcatgtacagaaacctgtgatatttatacccttgtaggaaggtatagacaatggaattgtgagtagcttaatctctatgtttctctccattttcattcctcctgcaactattttccttgatgttgtaataaaatgaagttacgatgagtgaattcaa

SEQ ID NO: 416226 - DNA, 944 bp, Homo sapiens
gcccctggtgctctcagatgtcggccaggcttgcagacaggtgaatgcatctcattggctccagggaggcatgatgccaccgggcagctctttttaagagaaaagccagaaccggtggagcagcgacccctgagcagtgttctctgtgctgagcggcgggactgagctgttgagttagagccaacatgagtgagcgacaaggtgctggggcaaccaatggaaaagacaagacatctggtgaaaatgatggacagaagaaagttcaagaagaatttgacattgacatggatgcaccagagacagaacgtgcagcggtggccattcagtctcagttcagaaaattccagaagaagaaggctgggtctcagtcctagtgggagaaccccctcctagtccacctgaaaacaccaaattcaaccatcatctgtcaagaaattaaaagaacaacaccctagagagaagtcatccacacacaatccacacacgcatagcaaacctccaatgcatgtacagaaacctgtgatatttatacccttgtaggaaggtatagacaatggaattgtgagtagcttaatctctatgtttctctccattttcattcctcctgcaactattttccttgatgttgtaataaaatgaagttacgatgagtgaattcaaaaaaaaaaaaaaaaaaaaaaaaaaaaaaaaaaaaaaaaaaaaaaaaaaaaaaaaaaaaaaaaaaaaaaaaaaaaaaaaagaaaaaaaaaacaaaaaaaaagaagagagagagagagagagagagagagagaagacaaagaacagacatagaacaaggaggagaggcgagagagcgagaaggagagcggcggccgaccgaccgcgtgtggatgcgggcggcgacggcgggtggccccgacgggggggggcggggcaagcgggcagcgcgcgcgcggcgagcggga

SEQ ID NO: 416227 - DNA, 1089 bp, Homo sapiens
gcccctggtgctctcagatgtcggccaggcttgcagacaggtgaatgcatctcattggctccagggaggcatgatgccaccgggcagctctttttaagagaaaagccagaaccggtggagcagcgacccctgagcagtgttctctgtgctgagcggcgggactgagctgttgagttagagccaacatgagtgagcgacaaggtgctggggcaaccaatggaaaagacaagacatctggtgaaaatgtcgggtgccccattctcttctttacacactcctgactggctcagcggaaggagctcctgccactcctctaacagcatctgaccttccccgccgccccgggaactggactctctgaagtatacagaaaagtagcgattccttaaatatggacagaagaaagttcaagaagaatttgacattgacatggatgcaccagagacagaacgtgcagcggtggccattcagtctcagttcagaaaattccagaagaagaaggctgggtctcagtcctagtgggagaaccccctcctagtccacctgaaaacaccaaattcaaccatcatctgtcaagaaattaaaagaacaacaccctagagagaagtcatccacacacaatccacacacgcatagcaaacctccaatgcatgtacagaaacctgtgatatttatacccttgtaggaaggtatagacaatggaattgtgagtagcttaatctctatgtttctctccattttcattcctcctgcaactattttccttgatgttgtaataaaatgaagttacgatgagtgaattcaaaaaaaaaaaaaaaaaaaaaaaaaaaaaaaaaaaaaaaaaaaaaaaaaaaaaaaaaaaaaaaaaaaaaaaaaaaaaaaaagaaaaaaaaaacaaaaaaaaagaagagagagagagagagagagagagagagaagacaaagaacagacatagaacaaggaggagaggcgagagagcgagaaggagagcggcggccgaccgaccgcgtgtggatgcgggcggcgacggcgggtggccccgacgggggggggcggggcaagcgggcagcgcgcgcgcggcgagcggga

SEQ ID NO: 416228 - DNA, 606 bp, Homo sapiens
gcccctggtgctctcagatgtcggccaggcttgcagacaggtgaatgcatctcattggctccagggaggcatgatgccaccgggcagctctttttaagagaaaagccagaaccggtggagcagcgacccctgagcagtgttctctgtgctgagcggcgggactgagctgttgagttagagccaacatgagtgagcgacaaggtgctggggcaaccaatggaaaagacaagacatctggtgaaaatgatggacagaagaaagttcaagaagaatttgacattgacatggatgcaccagagacagaacgtgcagcggtggccattcagtctcagttcagaaaattccagaagaagaaggctgggtctcagtcctagtgggagaaccccctcctagtccacctgaaaacaccaaattcaaccatcatctgtcaagaaattcaaacctccaatgcatgtacagaaacctgtgatatttatacccttgtaggaaggtatagacaatggaattgtgagtagcttaatctctatgtttctctccattttcattcctcctgcaactattttccttgatgttgtaataaaatgaagttacgatgagtgaattcaa

SEQ ID NO: 416229 - DNA, 2824 bp, Homo sapiens
cagcggcggcccaggctctgggcactcgcgcggctcccgttcgcggagcacacagtcccggcgcgacgaggttccttcggagagcgagcgggagtcggtgctcggcctcctgcggggagcagcccgaggaatctgcagggagaggtcgggaggtgacaacgccagcatgccagtgctatcggaggactctggtttgcatgaaaccctggccctgctgacctcccagctcagacctgactccaaccacaaggaggagatgggcttcctgagggatgttttcagtgaaaaaagcctcagttacttaatgaagattcatgagaagcttcgctattatgaaaggcaaagtccaaccccagttctgcacagcgctgtggccctcgctgaggacgtgatggaggagttgcaggccgcctccgtgcacagtgatgagagggagctgctccagctgctgtccaccccgcacctgagggctgtgctcatggtacatgacacggttgcccagaagaattttgaccccgttctcccgcctctgcctgacaatatcgatgaggattttgatgaggaatcggtgaagatcgtccgcttggtgaagaacaaggaacccctgggtgccaccatccggcgggacgagcactcaggggctgttgtggtggccaggatcatgcgaggaggcgcagcagacaggagcggcctggtccacgttggagatgagctccgagaagtgaacgggatcgcagtcctgcacaagcggcccgacgagatcagccagattctggcccagtcccagggatccatcaccctaaaaatcatcccagccacccaggaggaagatcgcttaaaggagagcaaggtgttcatgcgcgccctcttccactacaaccctcgggaggaccgggccatcccttgccaggaggcgggcctgcccttccagcgcaggcaggtcctggaggtggtgagccaggacgaccccacgtggtggcaggccaagcgagtcggggacaccaaccttcgagccggcctcatcccctccaaggggttccaggagagacgactaagctaccggagagccgcgggcaccctgccgagcccccagagcctcaggaagcccccctatgatcagccttgtgacaaagagacctgtgactgtgagggctacctcaaagggcactatgtggctggtcttcggaggagcttccggctgggctgtagggagagactgggtggctcgcaggaaggaaagatgtcctccggagctgagtctccggagctgctgacttacgaagaggtggccaggtaccaacaccagcccggagagcggccccgcctggtggttctgatcgggtctctgggagcccgactgcacgagctgaagcaaaaggtggtggctgagaacccacagcactttggcgtcgctgttccacataccaccaggccccgaaagagccatgagaaggaaggagtggaatatcactttgtgtctaagcaagcatttgaggccgacttacatcacaacaagttcctggaacatggtgaatataaggaaaatctgtatggaaccagcctggaggccattcaggctgttatggccaaaaacaaagtttgtttggtggatgtggagccagaagcactgaaacaactgaggacctcagaatttaaaccctatattatatttgtaaagcctgcaattcaggaaaaaagaaaaacgccacctatgtccccagcttgtgaggacacagcagccccatttgatgagcagcagcaagagatggccgcttctgccgccttcatagaccggcattacgggcacctggtagacgccgtgctggtgaaggaggatctccagggtgcctacagccagctcaaagtggtcttagagaagctgagcaaggacactcactgggtacctgttagttgggtcaggtaactttatcccagaacatccaagctggacgggaccttgaagatcatctagtccagactccctcattttaccatcaaggaatctcaagcgcagagagggagagaattctccacaaattccatcatcgagaagagtataagtgggaagtcttgtttgttgttggtttttgtctgttgtttttcactgcacctctttggatcatgatttgaaaggggcatatcagaaaacaacacatttcatttattaaagtatcacaggcaagctgaccctgattctttgtaccaaagttaagtagccactgtcttttgtgggtggtagtggttaatttatacagtactgattcgcagaatgtttaagctttttaaacatagtgacgcttagtagtttttttggaagctaacttgttttatccagggggattttacatgtaactgaagttcccctgtcttcaagcactaaaacgttgatcttaaccttttttttgaagtgcttgcctggtaatagaaaacgggttctctgcctattttaaaatagtgaatatacgtaaattttctctggaaggctgaggcacacttcaccatcaacatgaattactgtactatcctgtactgcagtggtgccttcagggactcgaggaatgtaaggttgcctttcccctttctaaataccctcagattcctaacatcgagcccatgctttgtttgatttgttctattccatccattgtcccttttgttactgacagttgccttggtcctagccagtccctgccatgagatcataggggttcccattgtgctagatcttgggaaaccagatgactctccctgtcaaaactatggctacgtcactgtaaaccatttctgtcaagaataaaagtatgtagacccagagtgtgggcct

SEQ ID NO: 416230 - DNA, 2180 bp, Homo sapiens
cagcggcggcccaggctctgggcactcgcgcggctcccgttcgcggagcacacagtcccggcgcgacgaggttccttcggagagcgagcgggagtcggtgctcggcctcctgcggggagcagcccgaggaatctgcagggagaggtcgggaggtgacaacgccagcatgccagtgctatcggaggactctggtttgcatgaaaccctggccctgctgacctcccagctcagacctgactccaaccacaaggaggagatgggcttcctgagggatgttttcagtgaaaaaagcctcagttacttaatgaagattcatgagaagcttcgctattatgaaaggcaaagtccaaccccagttctgcacagcgctgtggccctcgctgaggacgtgatggaggagttgcaggccgcctccgtgcacagtgatgagagggagctgctccagctgctgtccaccccgcacctgagggctgtgctcatggtacatgacacggttgcccagaagaattttgaccccgttctcccgcctctgcctgacaatatcgatgaggattttgatgaggaatcggtgaagatcgtccgcttggtgaagaacaaggaacccctgggtgccaccatccggcgggacgagcactcaggggctgttgtggtggccaggatcatgcgaggaggcgcagcagacaggagcggcctggtccacgttggagatgagctccgagaagtgaacgggatcgcagtcctgcacaagcggcccgacgagatcagccagattctggcccagtcccagggatccatcaccctaaaaatcatcccagccacccaggaggaagatcgcttaaaggagagcaaggtgttcatgcgcgccctcttccactacaaccctcgggaggaccgggccatcccttgccaggaggcgggcctgcccttccagcgcaggcaggtcctggaggtggtgagccaggacgaccccacgtggtggcaggccaagcgagtcggggacaccaaccttcgagccggcctcatcccctccaaggggttccaggagagacgactaagctaccggagagccgcgggcaccctgccgagcccccagagcctcaggaagcccccctatgatcagccttgtgacaaagagacctgtgactgtgagggctacctcaaagggcactatgtggctggtcttcggaggagcttccggctgggctgtagggagagactgggtggctcgcaggaaggaaagatgtcctccggagctgagtctccggagctgctgacttacgaagaggtggccaggtaccaacaccagcccggagagcggccccgcctggtggttctgatcgggtctctgggagcccgactgcacgagctgaagcaaaaggtggtggctgagaacccacagcactttggcgtcgctgttccacataccaccaggccccgaaagagccatgagaaggaaggagtggaatatcactttgtgtctaagcaagcatttgaggccgacttacatcacaacaagttcctggaacatggtgaatataaggaaaatctgtatggaaccagcctggaggccattcaggctgttatggccaaaaacaaagtttgtttggtggatgtggagccagaagcactgaaacaactgaggacctcagaatttaaaccctatattatatttgtaaagcctgcaattcaggaaaaaagaaaaacgccacctatgtccccagcttgtgaggacacagcagccccatttgatgagcagcagcaagagatggccgcttctgccgccttcatagaccggcattacgggcacctggtagacgccgtgctggtgaaggaggatctccagggtgcctacagccagctcaaagtggtcttagagaagctgagcaaggacactcactgggtacctgttagttgggtcaggtaactttatcccagaacatccaagctggacgggaccttgaagatcatctagtccagactccctcattttaccatcaaggaatctcaagcgcagagagggagagaattctccacaaattccatcatcgagaagagtataagtgggaagtcttgtttgttgttggtttttgtctgttgtttttcactgcacctctttggatcatgatttgaaaggggcatatcagaaaacaacacatttcatttattaaagtatcacaggc

SEQ ID NO: 416231 - DNA, 1682 bp, Homo sapiens
atgccatggtgtccctctgcccctcctcccaagctggtcttcggaggagcttccggctgggctgtagggagagactgggtggctcgcaggaaggaaagatgtcctccggagctgagtctccggagctgctgacttacgaagaggtggccaggtaccaacaccagcccggagagcggccccgcctggtggttctgatcgggtctctgggagcccgactgcacgagctgaagcaaaaggtggtggctgagaacccacagcactttggcgtcgctgttccacataccaccaggccccgaaagagccatgagaaggaaggagtggaatatcactttgtgtctaagcaagcatttgaggccgacttacatcacaacaagttcctggaacatggtgaatataaggaaaatctgtatggaaccagcctggaggccattcaggctgttatggccaaaaacaaagtttgtttggtggatgtggagccagaagcactgaaacaactgaggacctcagaatttaaaccctatattatatttgtaaagcctgcaattcaggaaaaaagaaaaacgccacctatgtccccagcttgtgaggacacagcagccccatttgatgagcagcagcaagagatggccgcttctgccgccttcatagaccggcattacgggcacctggtagacgccgtgctggtgaaggaggatctccagggtgcctacagccagctcaaagtggtcttagagaagctgagcaaggacactcactgggtacctgttagttgggtcaggtaactttatcccagaacatccaagctggacgggaccttgaagatcatctagtccagactccctcattttaccatcaaggaatctcaagcgcagagagggagagaattctccacaaattccatcatcgagaagagtataagtgggaagtcttgtttgttgttggtttttgtctgttgtttttcactgcacctctttggatcatgatttgaaaggggcatatcagaaaacaacacatttcatttattaaagtatcacaggcaagctgaccctgattctttgtaccaaagttaagtagccactgtcttttgtgggtggtagtggttaatttatacagtactgattcgcagaatgtttaagctttttaaacatagtgacgcttagtagtttttttggaagctaacttgttttatccagggggattttacatgtaactgaagttcccctgtcttcaagcactaaaacgttgatcttaaccttttttttgaagtgcttgcctggtaatagaaaacgggttctctgcctattttaaaatagtgaatatacgtaaattttctctggaaggctgaggcacacttcaccatcaacatgaattactgtactatcctgtactgcagtggtgccttcagggactcgaggaatgtaaggttgcctttcccctttctaaataccctcagattcctaacatcgagcccatgctttgtttgatttgttctattccatccattgtcccttttgttactgacagttgccttggtcctagccagtccctgccatgagatcataggggttcccattgtgctagatcttgggaaaccagatgactctccctgtcaaaactatggctacgtcactgtaaaccatttctgtcaagaataaaagtatgtagacccagagtgtgggcct

SEQ ID NO: 416232 - DNA, 2337 bp, Homo sapiens
cagcggcggcccaggctctgggcactcgcgcggctcccgttcgcggagcacacagtcccggcgcgacgaggttccttcggagagcgagcgggagtcggtgctcggcctcctgcggggagcagcccgaggaatctgcagggagaggtcgggaggtgacaacgccagcatgccagtgctatcggaggactctggtttgcatgaaaccctggccctgctgacctcccagctcagacctgactccaaccacaaggaggagatgggcttcctgagggatgttttcagtgaaaaaagcctcagttacttaatgaagattcatgagaagcttcgctattatgaaaggcaaagtccaaccccagttctgcacagcgctgtggccctcgctgaggacgtgatggaggagttgcaggccgcctccgtgcacagtgatgagagggagctgctccagctgctgtccaccccgcacctgagggctgtgctcatggtacatgacacggttgcccagaagaattttgaccccgttctcccgcctctgcctgacaatatcgatgaggattttgatgaggaatcggtgaagatcgtccgcttggtgaagaacaaggaacccctgggtgccaccatccggcgggacgagcactcaggggctgttgtggtggccaggatcatgcgaggaggcgcagcagacaggagcggcctggtccacgttggagatgagctccgagaagtgaacgggatcgcagtcctgcacaagcggcccgacgagatcagccagattctggtccgtgctacaagcctgctagggatgtgctgggtcttcagacacccagagcaaggcacttcctggagccaggacagattctggcttagccttgctgttgtcctgaggaggtggcaggcaaagtggccttatggtgtgcccctaacagtgtgcccggggtatggggtggcagcaggaggaggggaacttcccttccatctgcctctcttagaccttctcctcagcacagccttccttccttcccctggttccctttcacaaggcccctcctgggtcctgggtcctgggtgtgaatcctggctctgcctccttccagctgtgcaaccttggacaagccatcagatcatctgagtttccatttcctttcctttaacgttgggatagagtttctttctcaaccaatgtgtggttatcattggcatgctaacatctggaaaagggtaaagcccttcagaagtgtaaggggattttaaggtataaaatgcttggctgaaaacctccatggtccattctggggagttgaagtcaaaactgaaattgtgaaaagccccaatcatagcttggtcccctttatcctcaggattcctcccctgacctgacactctgctaacttctgatggttttgggggcagaaacaggatgagatctgaaaagaggaggcccactgtttaaagccctctctgggctgggctcagtagttcacacctgtaatcccagcactttggaaggccgaggcaggtgggtcacctgaggtcaggtcgagacagcctgggcaacatggtgaaaccccgtctctactaaaaatacaaaaaattagctgagtgtggttgtgggcccctgtaatcccagctgcttgggaggctgaggcaggagaattgcttgaacccaggaggtggaggttgcagggagtcgagatcgtgccactgcactccagcctgggcaatgagagcaaaactccatctcaaaaaacaaaaaaacaacaacaaaataaagccctctctgtagaggatgcggattgcaggcaggcccttcagtccttttgcccaagcttgcttttttgtggctttgggtgccaaccttcttgtgctccagagcaagggtctgggctttctgggtagtggagaggccaggaggtgatcttttgggccctgctgtcctggtccgactgcattcttcctttgttgggcccctggcattgggctacagggtctctgtagatgagggtgaagggagctcctagaaagctgggcatggcctgagactggggagatggaagcaaagagggaagtattaatcagagaccagccccaaatcaggcaggaaagaggcaaaggaaaccgaaatgggttgttcagatgacccaggagaaaagcaaggaagggagccctctggggccgtagcggtcaggagggatggagaattggaattcaacacgtagtgtccttgggttctcatggaaagtcttccgtccctttgacttttgaaaatacagttaccaacccgccactgctaaatttgaactggcttaaaaataataaaaatactaaaaaatacaaaaatgt

SEQ ID NO: 416233 - DNA, 2994 bp, Homo sapiens
agcttccacgccgctgtttcttcatcaataaaatgggaacattcgcagtcatttctcaggactttgtgcagacaaaaagtttatcatagaaatcaccccacacaatgcttggcacatcgaggacactcagcacatcttagctttatttccttcctctctgaaaaaagtaagcagagttatttgttcccatcctctctgtccacagcctggtctcagagaacacagtagatgtgtagtcagtttgttcaataaatatgcttgatggagcttcaatacccacctccacccccttctcccagaatctgcagggagaggtcgggaggtgacaacgccagcatgccagtgctatcggaggactctggtttgcatgaaaccctggccctgctgacctcccagctcagacctgactccaaccacaaggaggagatgggcttcctgagggatgttttcagtgaaaaaagcctcagttacttaatgaagattcatgagaagcttcgctattatgaaaggcaaagtccaaccccagttctgcacagcgctgtggccctcgctgaggacgtgatggaggagttgcaggccgcctccgtgcacagtgatgagagggagctgctccagctgctgtccaccccgcacctgagggctgtgctcatggtacatgacacggttgcccagaagaattttgaccccgttctcccgcctctgcctgacaatatcgatgaggattttgatgaggaatcggtgaagatcgtccgcttggtgaagaacaaggaacccctgggtgccaccatccggcgggacgagcactcaggggctgttgtggtggccaggatcatgcgaggaggcgcagcagacaggagcggcctggtccacgttggagatgagctccgagaagtgaacgggatcgcagtcctgcacaagcggcccgacgagatcagccagattctggcccagtcccagggatccatcaccctaaaaatcatcccagccacccaggaggaagatcgcttaaaggagagcaaggtgttcatgcgcgccctcttccactacaaccctcgggaggaccgggccatcccttgccaggaggcgggcctgcccttccagcgcaggcaggtcctggaggtggtgagccaggacgaccccacgtggtggcaggccaagcgagtcggggacaccaaccttcgagccggcctcatcccctccaaggggttccaggagagacgactaagctaccggagagccgcgggcaccctgccgagcccccagagcctcaggaagcccccctatgatcagccttgtgacaaagagacctgtgactgtgagggctacctcaaagggcactatgtggctggtcttcggaggagcttccggctgggctgtagggagagactgggtggctcgcaggaaggaaagatgtcctccggagctgagtctccggagctgctgacttacgaagaggtggccaggtaccaacaccagcccggagagcggccccgcctggtggttctgatcgggtctctgggagcccgactgcacgagctgaagcaaaaggtggtggctgagaacccacagcactttggcgtcgctgttccacataccaccaggccccgaaagagccatgagaaggaaggagtggaatatcactttgtgtctaagcaagcatttgaggccgacttacatcacaacaagttcctggaacatggtgaatataaggaaaatctgtatggaaccagcctggaggccattcaggctgttatggccaaaaacaaagtttgtttggtggatgtggagccagaagcactgaaacaactgaggacctcagaatttaaaccctatattatatttgtaaagcctgcaattcaggaaaaaagaaaaacgccacctatgtccccagcttgtgaggacacagcagccccatttgatgagcagcagcaagagatggccgcttctgccgccttcatagaccggcattacgggcacctggtagacgccgtgctggtgaaggaggatctccagggtgcctacagccagctcaaagtggtcttagagaagctgagcaaggacactcactgggtacctgttagttgggtcaggtaactttatcccagaacatccaagctggacgggaccttgaagatcatctagtccagactccctcattttaccatcaaggaatctcaagcgcagagagggagagaattctccacaaattccatcatcgagaagagtataagtgggaagtcttgtttgttgttggtttttgtctgttgtttttcactgcacctctttggatcatgatttgaaaggggcatatcagaaaacaacacatttcatttattaaagtatcacaggcaagctgaccctgattctttgtaccaaagttaagtagccactgtcttttgtgggtggtagtggttaatttatacagtactgattcgcagaatgtttaagctttttaaacatagtgacgcttagtagtttttttggaagctaacttgttttatccagggggattttacatgtaactgaagttcccctgtcttcaagcactaaaacgttgatcttaaccttttttttgaagtgcttgcctggtaatagaaaacgggttctctgcctattttaaaatagtgaatatacgtaaattttctctggaaggctgaggcacacttcaccatcaacatgaattactgtactatcctgtactgcagtggtgccttcagggactcgaggaatgtaaggttgcctttcccctttctaaataccctcagattcctaacatcgagcccatgctttgtttgatttgttctattccatccattgtcccttttgttactgacagttgccttggtcctagccagtccctgccatgagatcataggggttcccattgtgctagatcttgggaaaccagatgactctccctgtcaaaactatggctacgtcactgtaaaccatttctgtcaagaataaaagtatgtagacccagagtgtgggcct

SEQ ID NO: 416234 - DNA, 1761 bp, Homo sapiens
agtcagttagcagagtggttaagggtataagctgggcatttggcagagagaccgattctggctgtgctctctactggttgtgggtcactgtgcacagtgctgaacctctccgtgcctcagttttctcagctgcaaaaggaaaagcctccttttgcctacatcaaagagttgttgtgtgaatcagtgatacgcctgcctggaaaggcacagtgcctgatacagggacatgcaatgaggtggaagtgcctggtttagacacagcagcagtgaactcccaaatgagtgcctaagcctgctgctgtccctgcgtgctgtgatgtgacatctctttgcccagctttccttctttctttaaaagataccaccaggccccgaaagagccatgagaaggaaggagtggaatatcactttgtgtctaagcaagcatttgaggccgacttacatcacaacaagttcctggaacatggtgaatataaggaaaatctgtatggaaccagcctggaggccattcaggctgttatggccaaaaacaaagtttgtttggtggatgtggagccagaagcactgaaacaactgaggacctcagaatttaaaccctatattatatttgtaaagcctgcaattcaggaaaaaagaaaaacgccacctatgtccccagcttgtgaggacacagcagccccatttgatgagcagcagcaagagatggccgcttctgccgccttcatagaccggcattacgggcacctggtagacgccgtgctggtgaaggaggatctccagggtgcctacagccagctcaaagtggtcttagagaagctgagcaaggacactcactgggtacctgttagttgggtcaggtaactttatcccagaacatccaagctggacgggaccttgaagatcatctagtccagactccctcattttaccatcaaggaatctcaagcgcagagagggagagaattctccacaaattccatcatcgagaagagtataagtgggaagtcttgtttgttgttggtttttgtctgttgtttttcactgcacctctttggatcatgatttgaaaggggcatatcagaaaacaacacatttcatttattaaagtatcacaggcaagctgaccctgattctttgtaccaaagttaagtagccactgtcttttgtgggtggtagtggttaatttatacagtactgattcgcagaatgtttaagctttttaaacatagtgacgcttagtagtttttttggaagctaacttgttttatccagggggattttacatgtaactgaagttcccctgtcttcaagcactaaaacgttgatcttaaccttttttttgaagtgcttgcctggtaatagaaaacgggttctctgcctattttaaaatagtgaatatacgtaaattttctctggaaggctgaggcacacttcaccatcaacatgaattactgtactatcctgtactgcagtggtgccttcagggactcgaggaatgtaaggttgcctttcccctttctaaataccctcagattcctaacatcgagcccatgctttgtttgatttgttctattccatccattgtcccttttgttactgacagttgccttggtcctagccagtccctgccatgagatcataggggttcccattgtgctagatcttgggaaaccagatgactctccctgtcaaaactatggctacgtcactgtaaaccatttctgtcaagaataaaagtatgtagacccagagtgtgggcct

SEQ ID NO: 416235 - DNA, 1683 bp, Homo sapiens
ttgaggctcagagagatgaagggacttgtccaagctggtcttcggaggagcttccggctgggctgtagggagagactgggtggctcgcaggaaggaaagatgtcctccggagctgagtctccggagctgctgacttacgaagaggtggccaggtaccaacaccagcccggagagcggccccgcctggtggttctgatcgggtctctgggagcccgactgcacgagctgaagcaaaaggtggtggctgagaacccacagcactttggcgtcgctgttccacataccaccaggccccgaaagagccatgagaaggaaggagtggaatatcactttgtgtctaagcaagcatttgaggccgacttacatcacaacaagttcctggaacatggtgaatataaggaaaatctgtatggaaccagcctggaggccattcaggctgttatggccaaaaacaaagtttgtttggtggatgtggagccagaagcactgaaacaactgaggacctcagaatttaaaccctatattatatttgtaaagcctgcaattcaggaaaaaagaaaaacgccacctatgtccccagcttgtgaggacacagcagccccatttgatgagcagcagcaagagatggccgcttctgccgccttcatagaccggcattacgggcacctggtagacgccgtgctggtgaaggaggatctccagggtgcctacagccagctcaaagtggtcttagagaagctgagcaaggacactcactgggtacctgttagttgggtcaggtaactttatcccagaacatccaagctggacgggaccttgaagatcatctagtccagactccctcattttaccatcaaggaatctcaagcgcagagagggagagaattctccacaaattccatcatcgagaagagtataagtgggaagtcttgtttgttgttggtttttgtctgttgtttttcactgcacctctttggatcatgatttgaaaggggcatatcagaaaacaacacatttcatttattaaagtatcacaggcaagctgaccctgattctttgtaccaaagttaagtagccactgtcttttgtgggtggtagtggttaatttatacagtactgattcgcagaatgtttaagctttttaaacatagtgacgcttagtagtttttttggaagctaacttgttttatccagggggattttacatgtaactgaagttcccctgtcttcaagcactaaaacgttgatcttaaccttttttttgaagtgcttgcctggtaatagaaaacgggttctctgcctattttaaaatagtgaatatacgtaaattttctctggaaggctgaggcacacttcaccatcaacatgaattactgtactatcctgtactgcagtggtgccttcagggactcgaggaatgtaaggttgcctttcccctttctaaataccctcagattcctaacatcgagcccatgctttgtttgatttgttctattccatccattgtcccttttgttactgacagttgccttggtcctagccagtccctgccatgagatcataggggttcccattgtgctagatcttgggaaaccagatgactctccctgtcaaaactatggctacgtcactgtaaaccatttctgtcaagaataaaagtatgtagacccagagtgtgggcct

SEQ ID NO: 416236 - DNA, 998 bp, Homo sapiens
cagcggcggcccaggctctgggcactcgcgcggctcccgttcgcggagcacacagtcccggcgcgacgaggttccttcggagagcgagcgggagtcggtgctcggcctcctgcggggagcagcccgaggaatctgcagggagaggtcgggaggtgacaacgccagcatgccagtgctatcggaggactctggtttgcatgaaaccctggccctgctgacctcccagctcagacctgactccaaccacaaggaggagatgggcttcctgagggatgttttcagtgaaaaaagcctcagttacttaatgaagattcatgagaagcttcgctattatgaaaggcaaagtccaaccccagttctgcacagcgctgtggccctcgctgaggacgtgatggaggagttgcaggccgcctccgtgcacagtgatgagagggagctgctccagctgctgtccaccccgcacctgagggctgtgctcatggtacatgacacggttgcccagaagaattttgaccccgttctcccgcctctgcctgacaatatcgatgaggattttgatgaggaatcggtgaagatcgtccgcttggtgaagaacaaggaacccctgggtgccaccatccggcgggacgagcactcaggggctgttgtggtggccaggatcatgcgaggaggcgcagcagacaggagcggcctgagactggggagatggaagcaaagagggaagtattaatcagagaccagccccaaatcaggcaggaaagaggcaaaggaaaccgaaatgggttgttcagatgacccaggagaaaagcaaggaagggagccctctggggccgtagcggtcaggagggatggagaattggaattcaacacgtagtgtccttgggttctcatggaaagtcttccgtccctttgacttttgaaaatacagttaccaacccgccactgctaaatttgaactggcttaaaaataataaaaatactaaaaaatacaaaaatgt

SEQ ID NO: 416237 - DNA, 368 bp, Homo sapiens
ctttaaacatgcaagaactcagagaatactgtactcataagccctactagattaggaaattttgacccaccactttcagttcaagacatgtcaggtggacaaaaacatagtaaatatatagaagaagacctaagaaagcaaaatcagtaagatagatcctttttaatgtattataatagtaattattaataatattttaacttttagtttcaggggtacatgtgcaggtttgttctataagtaaattttgtgtcaagggagtttgatatacagattattttgtcacccaggtaataagcatagtacctgataggtagtttttcgatcctcatcttcctccactctccaccctcaagttggtcccggtg

SEQ ID NO: 416238 - DNA, 918 bp, Homo sapiens
accagcccagcctttcagtgcaggctccagccctccacccccacccgagttgcaggatgtcgatgacagacttgctgaacgctgaggacatcaagaaggcggtgggagcctttagcgctaccgactccttcgaccacaaaaagttcttccaaatggtcggcctgaagaaaaagagtgcggatgatgtgaagaaggtgtttcacatgctggacaaggacaaaagtggcttcatcgaggaggatgagctgggattcatcctaaaaggcttctccccagatgccagagacctgtctgctaaagaaaccaagatgctgatggctgctggagacaaagatggggacggcaaaattggggttgacgaattctccactctggtggctgaaagctaagaagcactgactgcccctggtcttccacctctctgccctgaacacccaatctcggcccctcttgccaccctcctgcatttctgttcagttcgtttatgttattttttactcccccatcccctgtggccctctaatgacaccattcttctggaaaatgctggagaagcaataaaggttgtaccagtcaaaaaaaaggagaaagagaggagatcttagttaagagccgaagcttatccgttagtggggtaatttagcgtggaatgcgtcgtttaaagtggtcttggaagctgtgcgtaccgcttatgcctgaggaaccctttgcactggtatagaaagccgcgattccttcacagtgcctgaatggatggcgccttagcgtatcggggttgtgtgcgaccggaattgcgggcggcctggtttgcttctctggggccaaaaaggctggtgtttcgcgacaatgggggtccgcagttttgggttggtctaaccctttagtgcggaaaagaaatggggctagaaaacttccttt

SEQ ID NO: 416239 - DNA, 576 bp, Homo sapiens
accagcccagcctttcagtgcaggctccagccctccacccccacccgagttgcaggatgtcgatgacagacttgctgaacgctgaggacatcaagaaggcggtgggagcctttagcgctaccgactccttcgaccacaaaaagttcttccaaatggtcggcctgaagaaaaagagtgcggatgatgtgaagaaggtgtttcacatgctggacaaggacaaaagtggcttcatcgaggaggatgagctgggattcatcctaaaaggcttctccccagatgccagagacctgtctgctaaagaaaccaagatgctgatggctgctggagacaaagatggggacggcaaaattggggttgacgaattctccactctggtggctgaaagctaagaagcactgactgcccctggtcttccacctctctgccctgaacacccaatctcggcccctcttgccaccctcctgcatttctgttcagttcgtttatgttattttttactcccccatcccctgtggccctctaatgacaccattcttctggaaaatgctggagaagcaataaaggttgtaccagtca

SEQ ID NO: 416240 - DNA, 1372 bp, Homo sapiens
gaggctgaggtaggagtggagagagaaagggagcagggcctaggaggtcctgaggtgcaggctggccgctgaaggttcaggatcttcccccacgcggcaggacatccgccaaggttcccagatctgagacggcgcacctcctgcgtgtccttgacggcaggtggactttccagacccagctggtgacgccagtgccccctaaatcccagaggtggccccttccctcgtgccctggccgcagcccctgggatcccgcggacccctggcctggcggtgcaggagtggtagcaggtccgcgcgccttcttgccggcggccggcgctgctcagcggcgcggctggactgagccgctcccgctgcgctcagagtccgggcccctggcgccatgccaggcccggcgggcgtgcgcccggcgcgcagcactgcagcgctggtcatatgagcagaaatgatgagaaaagcactttttaatcttttcgcacttgctctgcccgctcaaacagttgcaggatgtcgatgacagacttgctgaacgctgaggacatcaagaaggcggtgggagcctttagcgctaccgactccttcgaccacaaaaagttcttccaaatggtcggcctgaagaaaaagagtgcggatgatgtgaagaaggtgtttcacatgctggacaaggacaaaagtggcttcatcgaggaggatgagctgggattcatcctaaaaggcttctccccagatgccagagacctgtctgctaaagaaaccaagatgctgatggctgctggagacaaagatggggacggcaaaattggggttgacgaattctccactctggtggctgaaagctaagaagcactgactgcccctggtcttccacctctctgccctgaacacccaatctcggcccctcttgccaccctcctgcatttctgttcagttcgtttatgttattttttactcccccatcccctgtggccctctaatgacaccattcttctggaaaatgctggagaagcaataaaggttgtaccagtcaaaaaaaaggagaaagagaggagatcttagttaagagccgaagcttatccgttagtggggtaatttagcgtggaatgcgtcgtttaaagtggtcttggaagctgtgcgtaccgcttatgcctgaggaaccctttgcactggtatagaaagccgcgattccttcacagtgcctgaatggatggcgccttagcgtatcggggttgtgtgcgaccggaattgcgggcggcctggtttgcttctctggggccaaaaaggctggtgtttcgcgacaatgggggtccgcagttttgggttggtctaaccctttagtgcggaaaagaaatggggctagaaaacttccttt

SEQ ID NO: 416241 - DNA, 486 bp, Homo sapiens
ccgggctccctcagccctccaatggagctaccgactccttcgaccacaaaaagttcttccaaatggtcggcctgaagaaaaagagtgcggatgatgtgaagaaggtgtttcacatgctggacaaggacaaaagtggcttcatcgaggaggatgagctgggattcatcctaaaaggcttctccccagatgccagagacctgtctgctaaagaaaccaagatgctgatggctgctggagacaaagatggggacggcaaaattggggttgacgaattctccactctggtggctgaaagctaagaagcactgactgcccctggtcttccacctctctgccctgaacacccaatctcggcccctcttgccaccctcctgcatttctgttcagttcgtttatgttattttttactcccccatcccctgtggccctctaatgacaccattcttctggaaaatgctggagaagcaataaaggttgtaccagtca

SEQ ID NO: 416242 - DNA, 354 bp, Homo sapiens
ctctagaggatccttcccgaatagcccgattcatcctaaaaggcttctccccagatgccagagacctgtctgctaaagaaaccaagatgctgatggctgctggagacaaagatggggacggcaaaattggggttgacgaattctccactctggtggctgaaagctaagaagcactgactgcccctggtcttccacctctctgccctgaacacccaatctcggcccctcttgccaccctcctgcatttctgttcagttcgtttatgttattttttactcccccatcccctgtggccctctaatgacaccattcttctggaaaatgctggagaagcaataaaggttgtaccagtca

SEQ ID NO: 416243 - DNA, 1080 bp, Homo sapiens
gaggctgaggtaggagtggagagagaaagggagcagggcctaggaggtcctgaggtgcaggctggccgctgaaggttcaggatcttcccccacgcggcaggacatccgccaaggttcccagatctgagacggcgcacctcctgcgtgtccttgacggcaggtggactttccagacccagctggtgacgccagtgccccctaaatcccagaggtggccccttccctcgtgccctggccgcagcccctgggatcccgcggacccctggcctggcggtgcaggagtggtagcaggtccgcgcgccttcttgccggcggccggcgctgctcagcggcgcggctggactgagccgctcccgctgcgctcagagtccgggcccctggcgccatgccaggcccggcgggcgtgcgcccggcgcgcagcactgcagcgctggtcatatgagcagaaatgatgagaaaagcactttttaatcttttcgcacttgctctgcccgctcaaacagttgcaggatgtcgatgacagacttgctgaacgctgaggacatcaagaaggcggtgggagcctttagcgctaccgactccttcgaccacaaaaagttcttccaaatggtcggcctgaagaaaaagagtgcggatgatgtgaagaaggtgtttcacatgctggacaaggacaaaagtggcttcatcgaggaggatgagctgggattcatcctaaaaggcttctccccagatgccagagacctgtctgctaaagaaaccaagatgctgatggctgctggagacaaagatggggacggcaaaattggggttgacgatccagcagatgttgactgagtagcaactctgtgcccggcaatggaagagaattctccactctggtggctgaaagctaagaagcactgactgcccctggtcttccacctctctgccctgaacacccaatctcggcccctcttgccaccctcctgcatttctgttcagttcgtttatgttattttttactcccccatcccctgtggccctctaatgacaccattcttctggaaaatgctggagaagcaataaaggttgtaccagtca

SEQ ID NO: 416244 - DNA, 737 bp, Homo sapiens
gaggctgaggtaggagtggagagagaaagggagcagggcctaggaggtcctgaggtgcaggctggccgctgaaggttcaggatcttcccccacgcggcaggacatccgccaaggttcccagatctgagacggcgcacctcctgcgtgtccttgacggcagttgcaggatgtcgatgacagacttgctgaacgctgaggacatcaagaaggcggtgggagcctttagcgctaccgactccttcgaccacaaaaagttcttccaaatggtcggcctgaagaaaaagagtgcggatgatgtgaagaaggtgtttcacatgctggacaaggacaaaagtggcttcatcgaggaggatgagctgggattcatcctaaaaggcttctccccagatgccagagacctgtctgctaaagaaaccaagatgctgatggctgctggagacaaagatggggacggcaaaattggggttgacgatccagcagatgttgactgagtagcaactctgtgcccggcaatggaagagaattctccactctggtggctgaaagctaagaagcactgactgcccctggtcttccacctctctgccctgaacacccaatctcggcccctcttgccaccctcctgcatttctgttcagttcgtttatgttattttttactcccccatcccctgtggccctctaatgacaccattcttctggaaaatgctggagaagcaataaaggttgtaccagtca

SEQ ID NO: 416245 - DNA, 820 bp, Homo sapiens
gtgttgccggatgcgcatgcgcaggcgccgtgtggcactcggcggtcgaaaggggagttcaaggagacgggggcgacgcggctgagggcttctcgtcggggtcggggctgcagccgtcatgccggggatagtggagctgcccactctagaggagctgaaagtagatgaggtgaaaattagttctgctgtgcttaaagctgcggcccatcactatggagctcaatgtgataagcccaacaaggaatttatgctctgccgctgggaagagaaagatccgaggcggtgtttagaggaaggcaaactggtcaacaagtgtgctttggacttctttaggcagataaaacgtcactgtgcagagccttttacagaatattggacttgcattgattatactggccagcagttatttcgtcactgtcgcaaacagcaggcaaagtttgacgagtgtgtgctggacaaactgggctgggtgcggcctgacctgggagaactgtcaaaggtcaccaaagtgaaaacagatcgacctttaccggagaatccctatcactcaagaccaagaccggatcccagccctgagatcgagggagatctgcagcctgccacacatggcagccgcttttatttctggaccaagtaaagatgggtccgtggcccacactcggtcatgtgctcagacaacgactgatgaaaacgcccatgcggtttgcatcgactgatagtgtgttctttccgggatcacaaacattaacaaaaaagttaacttatgtgacttggcagttattctataccatttcctgtccattaaaatttttaaaggaaa

SEQ ID NO: 416246 - DNA, 402 bp, Homo sapiens
gacaccaggaggcgcattgatggttacagattcctccaccctagctttcaactttgcttttgccctcttcacccttcccaggtcaccaaagtgaaaacagatcgacctttaccggagaatccctatcactcaagaccaagaccggatcccagccctgagatcgagggagatctgcagcctgccacacatggcagccgcttttatttctggaccaagtaaagatgggtccgtggcccacactcggtcatgtgctcagacaacgactgatgaaaacgcccatgcggtttgcatcgactgatagtgtgttctttccgggatcacaaacattaacaaaaaagttaacttatgtgacttggcagttattctataccatttcctgtccattaaaatttttaaaggaaa

SEQ ID NO: 416247 - DNA, 921 bp, Homo sapiens
  misc_feature (823)..(823): n is a, c, g, or t
  misc_feature (825)..(825): n is a, c, g, or t
  misc_feature (827)..(827): n is a, c, g, or t
gtgttgccggatgcgcatgcgcaggcgccgtgtggcactcggcggtcgaaaggggagttcaaggagacgggggcgacgcggctgagggcttctcgtcggggtcggggctgcagccgtcatgccggggatagtggagctgcccactctagaggagctgaaagtagatgaggtgaaaattagttctgctgtgcttaaagctgcggcccatcactatggagctcaatgtgataagcccaacaaggaatttatgctctgccgctgggaagagaaagatccgaggcggtgtttagaggaaggcaaactggtcaacaagtgtgctttggacttctttaggcagataaaacgtcactgtgcagagccttttacagaatattggacttgcattgattatactggccagcagttatttcgtcactgtcgcaaacagcaggcaaagtttgacgagtgtgtgctggacaaactgggctgggtgcggcctgacctgggagaactgtcaaaggtcaccaaagtgaaaacagatcgacctttaccggagaatccctatcactcaagaccaagaccggatcccagccctgagatcgagggagatctgcagcctgccacacatggcagccgcttttatttctggaccaagtaaagatgggtccgtggcccacactcggtcatgtgctcagacaacgactgatgaaaacgcccatgcggtttgcatcgactgatagtgtgttctttccgggatcacaaacattaacaaaaaagttaacttatgtgacttggcagttattctataccatttcctgtccattaaaatttttaaaggaaacgngnanaacacaccacaacagctcctacaatactacactaaacacaaaaaggggcggcgatacaacaccagggcgggcactacagctccccctgtttacg

SEQ ID NO: 416248 - DNA, 1201 bp, Homo sapiens
gtgttgccggatgcgcatgcgcaggcgccgtgtggcactcggcggtcgaaaggggagttcaaggagacgggggcgacgcggctgagggcttctcgtcggggtcggggctgcagccgtcatgccggggatagtggagctgcccactctagaggagctgaaagtagatgaggtgaaaattagttctgctgtgcttaaagctgcggcccatcactatggagctcaatgtgataagcccaacaaggaatttatgctctgccgctgggaagagaaagatccgaggcggtgtttagaggaaggcaaactggtcaacaagtgtgctttggacttctttaggcagataaaacgtcactgtgcagagccttttacagaatattggacttgcattgattatactggccagcagttatttcgtcactgtcgcaaacagcaggcaaagtttgacgagtgtgtgctggacaaactgggctgggtgcggcctgacctgggagaactgtcaaaggtcaccaaagtgaaaacagatcgacctttaccggagaatccctatcactcaagaccaagaccggatcccagccctgagatcgagggagatctgcagcctgccacacatggcagccgcttttatttctggaccaagtaaagatgggtccgtggcccacactcggtcatgtgctcagacaacgactgatgaaaacgcccatgcggtttgcatcgactgatagtgtgttctttccgggatcacaaacattaacaaaaaagttaacttatgtgacttggcagttattctataccatttcctgtccattaaaatttttaaaggaaaaaaaaaaaaaaaaaaaaaaacacaaccacaaaaccagacaacgacaacaacggacaacacagcgaaaacacaacacacataaaaaaaaaggaggggggggcgcgcaatatactaatcccccgggggggggagaccacgtatgatagccgacccaccgatcgtgtgagtaaacaaagggggcggcccactaaaggggatggcgtaattaaaacagaagcgagggcgagggccgcctaatacaaacaccgacggtcggagtgaagaccaccggacgcgtggagggtacctgtggaaggagaacgcacccaacttcgtgggggtggagacaactgagggggcaaaacccaccagagaaagatgcgccgcgcgggaagaaattaa

SEQ ID NO: 416249 - DNA, 776 bp, Homo sapiens
gtgttgccggatgcgcatgcgcaggcgccgtgtggcactcggcggtcgaaaggggagttcaaggagacgggggcgacgcggctgagggcttctcgtcggggtcggggctgcagccgtcatgccggggatagtggagctgcccactctagaggagctgaaagtagatgaggtgaaaattagttctgctgtgcttaaagctgcggcccatcactatggagctcaataaagatccgaggcggtgtttagaggaaggcaaactggtcaacaagtgtgctttggacttctttaggcagataaaacgtcactgtgcagagccttttacagaatattggacttgcattgattatactggccagcagttatttcgtcactgtcgcaaacagcaggcaaagtttgacgagtgtgtgctggacaaactgggctgggtgcggcctgacctgggagaactgtcaaaggtcaccaaagtgaaaacagatcgacctttaccggagaatccctatcactcaagaccaagaccggatcccagccctgagatcgagggagatctgcagcctgccacacatggcagccgcttttatttctggaccaagtaaagatgggtccgtggcccacactcggtcatgtgctcagacaacgactgatgaaaacgcccatgcggtttgcatcgactgatagtgtgttctttccgggatcacaaacattaacaaaaaagttaacttatgtgacttggcagttattctataccatttcctgtccattaaaatttttaaaggaaa

SEQ ID NO: 416250 - DNA, 656 bp, Homo sapiens
gtgttgccggatgcgcatgcgcaggcgccgtgtggcactcggcggtcgaaaggggagttcaaggagacgggggcgacgcggctgagggcttctcgtcggggtcggggctgcagccgtcatgccggggatagtggagctgcccactctagaggagctgaaagtagatgaggcagataaaacgtcactgtgcagagccttttacagaatattggacttgcattgattatactggccagcagttatttcgtcactgtcgcaaacagcaggcaaagtttgacgagtgtgtgctggacaaactgggctgggtgcggcctgacctgggagaactgtcaaaggtcaccaaagtgaaaacagatcgacctttaccggagaatccctatcactcaagaccaagaccggatcccagccctgagatcgagggagatctgcagcctgccacacatggcagccgcttttatttctggaccaagtaaagatgggtccgtggcccacactcggtcatgtgctcagacaacgactgatgaaaacgcccatgcggtttgcatcgactgatagtgtgttctttccgggatcacaaacattaacaaaaaagttaacttatgtgacttggcagttattctataccatttcctgtccattaaaatttttaaaggaaa

SEQ ID NO: 416251 - DNA, 760 bp, Homo sapiens
gtgttgccggatgcgcatgcgcaggcgccgtgtggcactcggcggtcgaaaggggagttcaaggagacgggggcgacgcggctgagggcttctcgtcggggtcggggctgcagccgtcatgccggggatagtggagctgcccactctagaggagctgaaagtagatgaggtgaaaattagttctgctgtgcttaaagctgcggcccatcactatggagctcaatgtgataagcccaacaaggaatttatgctctgccgctgggaagagaaagatccgaggcggtgtttagaggaaggcaaactggtcaacaagtgtgctttggacttctttagtggccagcagttatttcgtcactgtcgcaaacagcaggcaaagtttgacgagtgtgtgctggacaaactgggctgggtgcggcctgacctgggagaactgtcaaaggtcaccaaagtgaaaacagatcgacctttaccggagaatccctatcactcaagaccaagaccggatcccagccctgagatcgagggagatctgcagcctgccacacatggcagccgcttttatttctggaccaagtaaagatgggtccgtggcccacactcggtcatgtgctcagacaacgactgatgaaaacgcccatgcggtttgcatcgactgatagtgtgttctttccgggatcacaaacattaacaaaaaagttaacttatgtgacttggcagttattctataccatttcctgtccattaaaatttttaaaggaaa

SEQ ID NO: 416252 - DNA, 1564 bp, Homo sapiens
cacttccggggcggtggtgagaacgaggctcacttccgtccgtggggggagctgcggcggtggcggtgcaggaggccgggcaggggtgcggagggaccgacggacgcacgggcgggcggccgggagccatggagcgcggccctggggcccgggggcgcgggccggggtgggcttcccacggcacgacatggagacctgtggttgcgaggctccctggggctcggcttggaccgcgatggggctgggccctggcctcctaacggggctgctgtctggggcggtagctgggggggcgctctcccccctgcccgcgactcggagcacccccacccctcccctgccgggccaggccgggcggcgttgttggcgggggccccggtggaggcccggcctgggcggcgcccgccatgaatgggctgtcgctgagtgagctctgctgcctcttctgctgcccgccctgccccggccgcatcgctgccaagctcgccttcctgccgccggaggccacctactccctggtgcctgagcccgagccggggcctggtggggccggggccgcccccttggggaccctgagagcctcctcgggcgcacccgggcgctggaagctgcacctgacggagcgtgccgacttccagtacagccagcgcgagctggacaccatcgaggtcttccccaccaagagcgcccgcggcaaccgcgtctcctgcatgtatgttcgctgcgtgcctggtgccaggtacacggtcctcttctcgcacggcaatgccgtggacctgggccagatgagcagcttctacattggcctgggctcccgcctccactgcaacatcttctcctacgactactccggctacggtgccagctcgggcaggccttccgagaggaacctctatgccgacatcgacgccgcctggcaggccctgcgcaccaggtacggcatcagcccggacagcatcatcctgtacgggcagagcatcggcacggtgcccaccgtggacctggcctcgcgctacgagtgtgccgcggtggtgctgcactcgccgctcacctcgggcatgcgcgtcgccttccccgacaccaagaagacctactgcttcgacgccttccctaacatcgagaaggtgtccaagatcacgtctcccgtgctcatcatccacggcacggaggacgaggtgatcgacttctcgcacgggctggcgctctacgagcgctgccccaaggcggtggagccgctgtgggtggagggcgccgggcacaacgacatcgagctctacagccagtacctggagcgcctgcgtcgcttcatctcccaggagctgcccagccagcgcgcctagcggcggccccaaccggccggacctcagcaataaggcggcccccggacctcaccccgcgccggcccccacccaggggctgcatgtggaccccccgggcggcccaggggaccccgccccgacccaggggctgtggacgatgtacaggcaacagagctacgcactcctttccttttggaagcaagaagaaaatacgtgaaaacggaaattaaagatttaaaatttta

SEQ ID NO: 416253 - DNA, 5156 bp, Homo sapiens
  misc_feature (1081)..(1081): n is a, c, g, or t
  misc_feature (2526)..(2526): n is a, c, g, or t
cactgcagggtgctaagcagcctccacccagtccccagtggtgacacccaaaactgtgtccagacattgacaggtgtctccaggagggagactcgcctccatctgagaagcagaaccagcctgacagtccacctcccggctgaaaagtgcttgcatgtgcgatttgccttccgcctgggagtctgggggcactgggatgccatccttgccccaccctggctttcagagctctctcctctcctcctcgtgtgcccatgagtccggctcacaggaacgtgggtctcacatcaggtcctgagggagcaggtgtgtttctgggcctgaggctgctccttggtagtgagggtgtccccacgagccgtgtctgtggcgcctgcagctgcctgcatgtccatctgtgtccacatctgcctttgagcctcatcttcctggccccacggttttctcatgctgtgacccaaaagccaagcattccagggtgttctgctgaaattgagttgtgagcgtgtctctctcctcgctccagtctgaaggagaagcgtggtcggtagatagacgtctcagaccttcgtgttttcttcacgtctgtctgttggcaggtccttacactattgtggttgctttagcaacttagctgttgtcgacttaatgtgtttcatgacgttctgcagcaaggaagaaggtccgagtttccactctcaatcaggcaccttcgttcccctcccccctcacttgacttcctgtggggtgtgtggtgtctgcacttatagatgagaatgctgaggcctcaggagggcaagggactcgcccacggtcacggaaccctaagtcaggggtggagaaggaccccctgacgccagcccacctcccctgcccctcagcaggcctggctccagcacagagaagagccattgttgctgctctgggggccctaggagcctgggatgtatcctgcctttgtttctagagcctttgtttgttgtatttcctctgtctccagacatcgcaggccggtgggacccggcgcctgtgcacgctcacgtagcggggcctgttcgggtccctcgtgggtcccttcagntcgagctctgtccttgcctcagcggcccgtcacccatagggtggcagagatgggccgggggagggagtgggcagcagtgcggaccgagtcctggcgcatggggtttccctggtgctggagccgggcgtttcgggggtgtgggcggggctggggtcatatcccctgcatgccccgcatgccatggctgtactcacatggcaagaggtggtgatcgccagctcagggaaggtgggggttccttcatcctgtggagagggggctgaattggggtcccctgagctgtagggtgcagtgcctgacaggccgtggggagggccgaggggatggggactgacaggccccgggcccatgccgccccctggcacgggtggatgccccgcctcccgggggtgcccagctggactgtggcacccccaaaggaccccacatgtcactgttcccccgcagggcttcccacggcacgacatggagacctgtggttgcgaggctccctggggctcggcttggaccgcgatggggctgggccctggcctcctaacggggctgctgtctggggcggtagctgggggggcgctctcccccctgcccgcgactcggagcacccccacccctcccctgccgggccaggccgggcggcgttgttggcgggggccccggtggaggcccggcctgggcggcgcccgccatgaatgggctgtcgctgagtgagctctgctgcctcttctgctgcccgccctgccccggccgcatcgctgccaagctcgccttcctgccgccggaggccacctactccctggtgcctgagcccgagccggggcctggtggggccggggccgcccccttggggaccctgagagcctcctcgggcgcacccgggcgctggaagctgcacctgacggagcgtgccgacttccagtacagccagcgcgagctggacaccatcgaggtcttccccaccaagagcgcccgcggcaaccgcgtctcctgcatgtatgttcgctgcgtgcctggtgccaggtacacggtcctcttctcgcacggcaatgccgtggacctgggccagatgagcagcttctacattggcctgggctcccgcctccactgcaacatcttctcctacgactactccggctacggtgccagctcgggcaggccttccgagaggaacctctatgccgacatcgacgccgcctggcaggccctgcgcaccaggtgagggcgaccctgggggcagctcagcctgggcacacccaagaggggaccaggcggggggccggggggcgggcttccctgggaggaaggtgggcggccctgcaggaggggagccacagtggatgcacagggccagagagccggacaggcgagcttgggtgtgcaggtgccgcctccacatggctgaggtgtggccaggcggtcctcccacaccctggcctgtggagccaggntccctgggaacccctggcctgaggatgggaaggggctgagcttgtcacaggggtgtggatgccacccggcgggagggagtgggtggtggtctgggggtctgtgcacgtgtggctgggagcccatcggccgaggcagcacttggggccaagtgaggcgaggctgctgcatccaggtccggaggactggcccatgaggccctgtggctgcggagcttggccatcctggggcagggcctacagggtaaggtgcagacccgcagcacacatccgaggtctgggccagcctcgattccagatccagccctcctagtcatccacgtccccagccctgcgcttgcctgggcccttcaccggtgtttgagcaccgcccgggccagtgctgctttggacgaggagacccgggtgggcctctggtggcttttcctgctcaccatccactgggcctgtctcgtcctggccctgcccagcccactggtctgacctgctcccgcagggaccaggcacagctctgagaagtcagaggccctagggaggtggggtcgtcgttgccttggtgatatgcaggcagtccctgcagtgggcctgggagctggtcccctggcaccaccctggctctgggggcctcccagcagtgtgggacgctgacaccaatcaccacttcatgcgacttcctcggcccctcctgtctctactgcctgggccactggcagagtcacacctgccatggccagctctgagctctgtctgctcggccatctgtcctgctgccactttgtcctgcaggaacctaggcccagagctgtgagggggaggccagagcgtgcccagggcctccaccggggatgtgtcctgttcgtttgagtggtgacatccaggtggcagctcggggctcctgcctgtagcaggtggcagggctgggctggctcagcacactactgaccatggctgccagggagcaggccagggaggccgaggcagagctggagccacaggcaccagccaggcagcatcctttggggcatgggtgagtggcgagctgtggagtgctgccaggaggctgggattccaggccagggacggggacagccctgctggtggagatgccaggcagaggggacgcacacctgcccatgctcctgccttgcaagagggcgtctgcctgggatcagagcctagagcatgtgggaggagagttgtggggtcccggcatgggcagggtggcaggtgggtcccgtgtgcttgggactgggcacgaggaggccttgtaactggtgctggatcagctgggtcaggggccgcacaccaatgacctgggggtgagggtgcccctgggtgggagctggtggtgctgaggtggccgaggacttgtccactcccaagggaaggtgctggtgggagggggtgccacctccgcagccaccaccctcgatgctgacctgggttgcactggcatctcattgggcgtggggactccgagagtccaaaattgggtggagacatttggggacacagctgcctgaattcctcatggccaagggggtgggcaagggctgcagggaggaatagtgtccgctgtcctggccagtgcaccaggaacggttttctaaccctggcaggaaggtgtgaagcattcaggatgtgggggccacacagttcccagtgtgcacctaggggtgaccaggaggaggagaggcgccagggcctcccttacccccgccccaggggcactccgtaggcaggatccctgcagatcctagctaggaaacgccagtgaacggcagcgcagggaacggggcggggccgctggcttcgcccaccgccacggtgttgggggctgggggtggccctcgggactggtgtggagcctgagcctgacccactgacttggctgagtggggagactggagggtcgcatccggagctgggcccggggacgcccgctggtgggaagggtgcgcgagcgtcggaggccgcggctgaccctgctccggcgccgccaggtacggcatcagcccggacagcatcatcctgtacgggcagagcatcggcacggtgcccaccgtggacctggcctcgcgctacgagtgtgccgcggtggtgctgcactcgccgctcacctcgggcatgcgcgtcgccttccccgacaccaagaagacctactgcttcgacgccttccctaacatcgagaaggtgtccaagatcacgtctcccgtgctcatcatccacggcacggaggacgaggtgatcgacttctcgcacgggctggcgctctacgagcgctgccccaaggcggtggagccgctgtgggtggagggcgccgggcacaacgacatcgagctctacagccagtacctggagcgcctgcgtcgcttcatctcccaggagctgcccagccagcgcgcctagcggcggccccaaccggccggacctcagcaataaggcggcccccggacctcaccccgcgccggcccccacccaggggctgcatgtggaccccccgggcggcccaggggaccccgccccgacccaggggctgtggacgatgtacaggcaacagagctacgcactcctttccttttggaagcaagaagaaaatacgtgaaaacggaaattaaagatttaaaatttta

SEQ ID NO: 416254 - DNA, 3797 bp, Homo sapiens
  misc_feature (1167)..(1167): n is a, c, g, or t
cacttccggggcggtggtgagaacgaggctcacttccgtccgtggggggagctgcggcggtggcggtgcaggaggccgggcaggggtgcggagggaccgacggacgcacgggcgggcggccgggagccatggagcgcggccctggggcccgggggcgcgggccggggtgggcttcccacggcacgacatggagacctgtggttgcgaggctccctggggctcggcttggaccgcgatggggctgggccctggcctcctaacggggctgctgtctggggcggtagctgggggggcgctctcccccctgcccgcgactcggagcacccccacccctcccctgccgggccaggccgggcggcgttgttggcgggggccccggtggaggcccggcctgggcggcgcccgccatgaatgggctgtcgctgagtgagctctgctgcctcttctgctgcccgccctgccccggccgcatcgctgccaagctcgccttcctgccgccggaggccacctactccctggtgcctgagcccgagccggggcctggtggggccggggccgcccccttggggaccctgagagcctcctcgggcgcacccgggcgctggaagctgcacctgacggagcgtgccgacttccagtacagccagcgcgagctggacaccatcgaggtcttccccaccaagagcgcccgcggcaaccgcgtctcctgcatgtatgttcgctgcgtgcctggtgccaggtacacggtcctcttctcgcacggcaatgccgtggacctgggccagatgagcagcttctacattggcctgggctcccgcctccactgcaacatcttctcctacgactactccggctacggtgccagctcgggcaggccttccgagaggaacctctatgccgacatcgacgccgcctggcaggccctgcgcaccaggtgagggcgaccctgggggcagctcagcctgggcacacccaagaggggaccaggcggggggccggggggcgggcttccctgggaggaaggtgggcggccctgcaggaggggagccacagtggatgcacagggccagagagccggacaggcgagcttgggtgtgcaggtgccgcctccacatggctgaggtgtggccaggcggtcctcccacaccctggcctgtggagccaggntccctgggaacccctggcctgaggatgggaaggggctgagcttgtcacaggggtgtggatgccacccggcgggagggagtgggtggtggtctgggggtctgtgcacgtgtggctgggagcccatcggccgaggcagcacttggggccaagtgaggcgaggctgctgcatccaggtccggaggactggcccatgaggccctgtggctgcggagcttggccatcctggggcagggcctacagggtaaggtgcagacccgcagcacacatccgaggtctgggccagcctcgattccagatccagccctcctagtcatccacgtccccagccctgcgcttgcctgggcccttcaccggtgtttgagcaccgcccgggccagtgctgctttggacgaggagacccgggtgggcctctggtggcttttcctgctcaccatccactgggcctgtctcgtcctggccctgcccagcccactggtctgacctgctcccgcagggaccaggcacagctctgagaagtcagaggccctagggaggtggggtcgtcgttgccttggtgatatgcaggcagtccctgcagtgggcctgggagctggtcccctggcaccaccctggctctgggggcctcccagcagtgtgggacgctgacaccaatcaccacttcatgcgacttcctcggcccctcctgtctctactgcctgggccactggcagagtcacacctgccatggccagctctgagctctgtctgctcggccatctgtcctgctgccactttgtcctgcaggaacctaggcccagagctgtgagggggaggccagagcgtgcccagggcctccaccggggatgtgtcctgttcgtttgagtggtgacatccaggtggcagctcggggctcctgcctgtagcaggtggcagggctgggctggctcagcacactactgaccatggctgccagggagcaggccagggaggccgaggcagagctggagccacaggcaccagccaggcagcatcctttggggcatgggtgagtggcgagctgtggagtgctgccaggaggctgggattccaggccagggacggggacagccctgctggtggagatgccaggcagaggggacgcacacctgcccatgctcctgccttgcaagagggcgtctgcctgggatcagagcctagagcatgtgggaggagagttgtggggtcccggcatgggcagggtggcaggtgggtcccgtgtgcttgggactgggcacgaggaggccttgtaactggtgctggatcagctgggtcaggggccgcacaccaatgacctgggggtgagggtgcccctgggtgggagctggtggtgctgaggtggccgaggacttgtccactcccaagggaaggtgctggtgggagggggtgccacctccgcagccaccaccctcgatgctgacctgggttgcactggcatctcattgggcgtggggactccgagagtccaaaattgggtggagacatttggggacacagctgcctgaattcctcatggccaagggggtgggcaagggctgcagggaggaatagtgtccgctgtcctggccagtgcaccaggaacggttttctaaccctggcaggaaggtgtgaagcattcaggatgtgggggccacacagttcccagtgtgcacctaggggtgaccaggaggaggagaggcgccagggcctcccttacccccgccccaggggcactccgtaggcaggatccctgcagatcctagctaggaaacgccagtgaacggcagcgcagggaacggggcggggccgctggcttcgcccaccgccacggtgttgggggctgggggtggccctcgggactggtgtggagcctgagcctgacccactgacttggctgagtggggagactggagggtcgcatccggagctgggcccggggacgcccgctggtgggaagggtgcgcgagcgtcggaggccgcggctgaccctgctccggcgccgccaggtacggcatcagcccggacagcatcatcctgtacgggcagagcatcggcacggtgcccaccgtggacctggcctcgcgctacgagtgtgccgcggtggtgctgcactcgccgctcacctcgggcatgcgcgtcgccttccccgacaccaagaagacctactgcttcgacgccttccctaacatcgagaaggtgtccaagatcacgtctcccgtgctcatcatccacggcacggaggacgaggtgatcgacttctcgcacgggctggcgctctacgagcgctgccccaaggcggtggagccgctgtgggtggagggcgccgggcacaacgacatcgagctctacagccagtacctggagcgcctgcgtcgcttcatctcccaggagctgcccagccagcgcgcctagcggcggccccaaccggccggacctcagcaataaggcggcccccggacctcaccccgcgccggcccccacccaggggctgcatgtggaccccccgggcggcccaggggaccccgccccgacccaggggctgtggacgatgtacaggcaacagagctacgcactcctttccttttggaagcaagaagaaaatacgtgaaaacggaaattaaagatttaaaatttta

SEQ ID NO: 416255 - DNA, 1498 bp, Homo sapiens
cacttccggggcggtggtgagaacgaggctcacttccgtccgtggggggagctgcggcggtggcggtgcaggaggccgggcaggggtgcggagggaccgacggacgcacgggcgggcggccgggagccatggagcgcggccctggggcccgggggcgcgggccggggtgggcttcccacggcacgacatggagacctgtggttgcgaggctccctggggctcggcttggaccgcgatggggctgggccctggcctcctaacggggctgctgtctggggcggtagctgggggggcgctctcccccctgcccgcgactcggagcacccccacccctcccctgccgggccaggccgggcggcgttgttggcgggggccccggtggaggcccggcctgggcggcgcgcatcgctgccaagctcgccttcctgccgccggaggccacctactccctggtgcctgagcccgagccggggcctggtggggccggggccgcccccttggggaccctgagagcctcctcgggcgcacccgggcgctggaagctgcacctgacggagcgtgccgacttccagtacagccagcgcgagctggacaccatcgaggtcttccccaccaagagcgcccgcggcaaccgcgtctcctgcatgtatgttcgctgcgtgcctggtgccaggtacacggtcctcttctcgcacggcaatgccgtggacctgggccagatgagcagcttctacattggcctgggctcccgcctccactgcaacatcttctcctacgactactccggctacggtgccagctcgggcaggccttccgagaggaacctctatgccgacatcgacgccgcctggcaggccctgcgcaccaggtacggcatcagcccggacagcatcatcctgtacgggcagagcatcggcacggtgcccaccgtggacctggcctcgcgctacgagtgtgccgcggtggtgctgcactcgccgctcacctcgggcatgcgcgtcgccttccccgacaccaagaagacctactgcttcgacgccttccctaacatcgagaaggtgtccaagatcacgtctcccgtgctcatcatccacggcacggaggacgaggtgatcgacttctcgcacgggctggcgctctacgagcgctgccccaaggcggtggagccgctgtgggtggagggcgccgggcacaacgacatcgagctctacagccagtacctggagcgcctgcgtcgcttcatctcccaggagctgcccagccagcgcgcctagcggcggccccaaccggccggacctcagcaataaggcggcccccggacctcaccccgcgccggcccccacccaggggctgcatgtggaccccccgggcggcccaggggaccccgccccgacccaggggctgtggacgatgtacaggcaacagagctacgcactcctttccttttggaagcaagaagaaaatacgtgaaaacggaaattaaagatttaaaatttta

SEQ ID NO: 416256 - DNA, 1646 bp, Homo sapiens
cacttccggggcggtggtgagaacgaggctcacttccgtccgtggggggagctgcggcggtggcggtgcaggaggccgggcaggggtgcggagggaccgacggacgcacgggcgggcggccgggagccatggagcgcggccctggggcccgggggcgcgggccggggtgggcttcccacggcacgacatggagacctgtggttgcgaggctccctggggctcggcttggaccgcgatggggctgggccctggcctcctaacggggctgctgtctggggcggtagctgggggggcgctctcccccctgcccgcgactcggagcacccccacccctcccctgccgggccaggccgggcggcgttgttggcgggggccccggtggaggcccggcctgggcggcgcccgccatgaatgggctgtcgctgagtgagctctgctgcctcttctgctgcccgccctgccccggccgcatcgctgccaagctcgccttcctgccgccggaggccacctactccctggtgcctgagcccgagccggggcctggtggggccggggccgcccccttggggaccctgagagcctcctcgggcgcacccgggcgctggaagctgcacctgacggagcgtgccgacttccagtacagccagcgcgagctggacaccatcgaggtcttccccaccaagagcgcccgcggcaaccgcgtctcctgcatgtatgttcgctgcgtgcctggtgccaggtacacggtcctcttctcgcacggcaatgccgtggacctgggccagatgagcagcttctacattggcctgggctcccgcctccactgcaacatcttctcctacgactactccggctacggtgccagctcgggcaggccttccgagaggaacctctatgccgacatcgacgccgcctggcaggccctgcgcaccaggtacggcatcagcccggacagcatcatcctgtacgggcagagcatcggcacggtgcccaccgtggacctggcctcgcgctacgagtgtgccgcggtggtgctgcactcgccgctcacctcgggcatgcgcgtcgccttccccgacaccaagaagacctactgcttcgacgccttccctaagtgagcggcccgggcggggacgggggcggggcggggcccgggccgggcgcgaagtctcaccggctccacgaccctcccgcagcatcgagaaggtgtccaagatcacgtctcccgtgctcatcatccacggcacggaggacgaggtgatcgacttctcgcacgggctggcgctctacgagcgctgccccaaggcggtggagccgctgtgggtggagggcgccgggcacaacgacatcgagctctacagccagtacctggagcgcctgcgtcgcttcatctcccaggagctgcccagccagcgcgcctagcggcggccccaaccggccggacctcagcaataaggcggcccccggacctcaccccgcgccggcccccacccaggggctgcatgtggaccccccgggcggcccaggggaccccgccccgacccaggggctgtggacgatgtacaggcaacagagctacgcactcctttccttttggaagcaagaagaaaatacgtgaaaacggaaattaaagatttaaaatttta

SEQ ID NO: 416257 - DNA, 1532 bp, Homo sapiens
cacttccggggcggtggtgagaacgaggctcacttccgtccgtggggggagctgcggcggtggcggtgcaggaggccgggcaggggtgcggagggaccgacggacgcacgggcgggcggccgggagccatggagcgcggccctggggcccgggggcgcgggccggggtgggcttcccacggcacgacatggagacctgtggttgcgaggctccctggggctcggcttggaccgcgatggggctgggccctggcctcctaacggggctgctgtctggggcggtagctgggggggcgctctcccccctgcccgcgactcggagcacccccacccctcccctgccgggccaggccgggcggcgttgttggcgggggccccggtggaggcccggcctgggcggcgcccgccatgaatgggctgtcgctgagtgagctctgctgcctcttctgctgcccgccctgccccggccgcatcgctgccaagctcgccttcctgccgccggaggccacctactccctggtgcctgagcccgagccggggcctggtggggccggggccgcccccttggggaccctgagagcctcctcgggcgcacccgggcgctggaagctgcacctgacggagcgtgccgacttccagtacagccagcgcgagctggacaccatcgaggtcttccccaccaagagcgcccgcggcaaccgcgtctcctgcatgtatgttcgctgcgtgcctggtgccaggtacacggtcctcttctcgcacggcaatgccgtggacctgggccagatgagcagcttctacattggcctgggctcccgcctccactgcaacatcttctcctacgactactccggctacggtgccagctcgggcaggccttccgagaggaacctctatgccgacatcgacgccgcctggcaggccctgcgcaccaggtacggcatcagcccggacagcatcatcctgtacgggcagagcatcggcacggtgcccaccgtggacctggcctcgcgctacgagtgtgccgcggtggtgctgcactcgccgctcacctcgggcatgcgcgtcgccttccccgacaccaagaagacctactgcttcgacgccttccctaacatcgagaaggtgtccaagatcacgtctcccgtgctcatcatccacggcacggaggacgaggtgatcgacttctcgcacgggctggcgctctacgagcgctgccccaaggcggtggagccgctgtgggtggagggcgccgggcacaacgacatcgagctctacagccagtacctggagcgcctgcgtcgcttcatctcccaggagctgcccagccagcgcgcctagcggcggccccaaccggccggaccgcgccggcccccacccaggggctgcatgtggaccccccgggcggcccaggggaccccgccccgacccaggggctgtggacgatgtacaggcaacagagctacgcactcctttccttttggaagcaagaagaaaatacgtgaaaacggaaattaaagatttaaaatttta

SEQ ID NO: 416258 - DNA, 1518 bp, Homo sapiens
cacttccggggcggtggtgagaacgaggctcacttccgtccgtggggggagctgcggcggtggcggtgcaggaggccgggcaggggtgcggagggaccgacggacgcacgggcgggcggccgggagccatggagcgcggccctggggcccgggggcgcgggccggggtgggcttcccacggcacgacatggagacctgtggttgcgaggctccctggggctcggcttggaccgcgatggggctgggccctggcctcctaacggggctgctgtctggggcggtagctgggggggcgctctcccccctgcccgcgactcggagcacccccacccctcccctgccgggccaggccgggcggcgttgttggcgggggccccggtggaggcccggcctgggcggcgcccgccatgaatgggctgtcgctgagtgagctctgctgcctcttctgctgcccgccctgccccggccgcatcgctgccaagctcgccttcctgccgccggaggccacctactccctggtgcctgagcccgagccggggcctggtggggccggggccgcccccttggggaccctgagagcctcctcgggcgcacccgggcgctggaagctgcacctgacggagcgtgccgacttccagtacagccagcgcgagctggacaccatcgaggtcttccccaccaagagcgcccgcggcaaccgcgtctcctgcatgtatgttcgctgcgtgcctggtgccaggtacacggtcctcttctcgcacggcaatgccgtggacctgggccagatgagcagcttctacattggcctgggctcccgcctccactgcaacatcttctcctacgactactccggctacggtgccagctcgggcaggccttccgagaggaacctctatgccgacatcgacgccgcctggcaggccctgcgcaccaggtacggcatcagcccggacagcatcatcctgtacgggcagagcatcggcacggtgcccaccgtggacctggcctcgcgctacgagtgtgccgcggtggtgctgcactcgccgctcacctcgggcgctctcccccctgcccgcgactcggagcaccccccacccctcccctgccgggccaggccgggcggcgttgttggcgggggcccccggtggaggcccggcctgggcggcgccccgccatgactgggctgccgctgtgggtggagggcgccgggcacaacgacatcgagctctacagccagtacctggagcgcctgcgtcgcttcatctcccaggagctgcccagccagcgcgcctagcggcggccccaaccggccggacctcagcaataaggcggcccccggacctcaccccgcgccggcccccacccaggggctgcatgtggaccccccgggcggcccaggggaccccgccccgacccaggggctgtggacgatgtacaggcaacagagctacgcactcctttccttttggaagcaagaagaaaatacgtgaaaacggaaattaaagatttaaaatttta

SEQ ID NO: 416259 - DNA, 1015 bp, Homo sapiens
cacttccggggcggtggtgagaacgaggctcacttccgtccgtggggggagctgcggcggtggcggtgcaggaggccgggcaggggtgcggagggaccgacggacgcacgggcgggcggccgggagccatggagcgcggccctggggcccgggggcgcgggccggggtgggcttcccacggcacgacatggagacctgtggttgcgaggctccctggggctcggcttggaccgcgatggggctgggccctggcctcctaacggggctgctgtctggggcggtagctgggggggcgctctcccccctgcccgcgactcggagcacccccacccctcccctgccgggccaggccgggcggcgttgttggcgggggccccggtggaggcccggcctgggcggcgcccgccatgaatgggctgtcgctgagtgagctctgctgcctcttctgctgcccgccctgccccggccgcatcgctgccaagctcgccttcctgccgccggaggccacctactccctggtgcctgagcccgagccggggcctggtggggccggggccgcccccttggggaccctgagagcctcctcgggcgcacccgggcgctggaagctgcacctgacggagcgtgccgacttccagtacagccagcgcgagctggacaccatcgaggtcttccccaccaagagcgcccgcggcaaccgcgtctcctgcatgtatgttcgctgcgtgcctggtgccaggtacacggtcctcttctcgcacggcaatgccgtggacctgggccagatgagcagcttctacattggcctgggctcccgcctccactgcaacatcttctcctacgactactccggctacggtgccagctcgggcaggccttccgagaggaacctctatggaccccgccccgacccaggggctgtggacgatgtacaggcaacagagctacgcactcctttccttttggaagcaagaagaaaatacgtgaaaacggaaattaaagatttaaaatttta

SEQ ID NO: 416260 - DNA, 1879 bp, Homo sapiens
  misc_feature (1081)..(1081): n is a, c, g, or t
cactgcagggtgctaagcagcctccacccagtccccagtggtgacacccaaaactgtgtccagacattgacaggtgtctccaggagggagactcgcctccatctgagaagcagaaccagcctgacagtccacctcccggctgaaaagtgcttgcatgtgcgatttgccttccgcctgggagtctgggggcactgggatgccatccttgccccaccctggctttcagagctctctcctctcctcctcgtgtgcccatgagtccggctcacaggaacgtgggtctcacatcaggtcctgagggagcaggtgtgtttctgggcctgaggctgctccttggtagtgagggtgtccccacgagccgtgtctgtggcgcctgcagctgcctgcatgtccatctgtgtccacatctgcctttgagcctcatcttcctggccccacggttttctcatgctgtgacccaaaagccaagcattccagggtgttctgctgaaattgagttgtgagcgtgtctctctcctcgctccagtctgaaggagaagcgtggtcggtagatagacgtctcagaccttcgtgttttcttcacgtctgtctgttggcaggtccttacactattgtggttgctttagcaacttagctgttgtcgacttaatgtgtttcatgacgttctgcagcaaggaagaaggtccgagtttccactctcaatcaggcaccttcgttcccctcccccctcacttgacttcctgtggggtgtgtggtgtctgcacttatagatgagaatgctgaggcctcaggagggcaagggactcgcccacggtcacggaaccctaagtcaggggtggagaaggaccccctgacgccagcccacctcccctgcccctcagcaggcctggctccagcacagagaagagccattgttgctgctctgggggccctaggagcctgggatgtatcctgcctttgtttctagagcctttgtttgttgtatttcctctgtctccagacatcgcaggccggtgggacccggcgcctgtgcacgctcacgtagcggggcctgttcgggtccctcgtgggtcccttcagntcgagctctgtccttgcctcagcggcccgtcacccatagggtggcagagatgggccgggggagggagtgggcagcagtgcggaccgagtcctggcgcatggggtttccctggtgctggagccgggcgtttcgggggtgtgggcggggctggggtcatatcccctgcatgccccgcatgccatggctgtactcacatggcaagaggtggtgatcgccagctcagggaaggtgggggttccttcatcctgtggagagggggctgaattggggtcccctgagctgtagggtgcagtgcctgacaggccgtggggagggccgaggggatggggactgacaggccccgggcccatgccgccccctggcacgggtggatgccccgcctcccgggggtgcccagctggactgtggcacccccaaaggaccccacatgtcactgttcccccgcagggcttcccacggcacgacatggagacctgtggttgcgaggctccctggggctcggcttggaccgcgatggggctgggccctggcctcctaacggggctgctgtctggggcggtagctgggggggcgctctcccccctgcccgcgactcggagcacccccacccctcccctgccgggccaggccgggcggcgttgttggcgggggccccggtggaggcccggcctgggcggcgggaccccgccccgacccaggggctgtggacgatgtacaggcaacagagctacgcactcctttccttttggaagcaagaagaaaatacgtgaaaacggaaattaaagatttaaaatttta

SEQ ID NO: 416261 - DNA, 1631 bp, Homo sapiens
acattcagcaacaaaccaggttcattcaactgccaggtgtgtcccagaaacacctattctgagaaaggagccaaagaatgtataaggtgtaaagacgactctcaattttcagaggaaggatccagtgagtgtacagagcgccctccctgtaccacaaaagactatttccagatccatactccatgtgatgaagaaggaaagacacagataatgtacaagtggatagagcccaaaatctgccgggaggatctcacagatgctattagattgcccccttctggagagaagaaggattgtccgccttgcaaccctggattttataacaatggatcatcttcttgccatccctgtcctcctggaacattttcagatggaaccaaagaatgtagaccatgtccagcaggaacggagcctgcacttggctttgaatataaatggtggaatgtccttcctggcaacatgaaaacttcctgcttcaatgttgggaattcaaagtgcgatggaatgaatggttgggaggtggctggagatcatatccagagtggggctggaggttctgacaatgattacctgatcttaaacttgcatatcccaggatttaaaccaccaacatctatgactggagccacgggttctgaactaggaagaataacatttgtctttgagaccctctgttcagctgactgtgttttgtacttcatggtggatattaatagaaaaagtacaaatgtggtagaatcgtggggtggaaccaaagaaaaacaagcttacacccatatcatcttcaagaatgcaacttttacatttacatgggcattccagagaactaatcagggtcaagataatagacggttcatcaatgacatggtgaagatttattctatcacagccactaatgcagttgatggggtggcgtcctcatgccgtgcctgtgccctcggttctgaacagtcgggttcatcgtgtgtcccctgccctccaggccactacattgagaaagaaaccaaccagtgcaaggaatgtccacctgacacctacctgtccatacatcaggtctatggcaaagaggcttgtattccatgcgggcctgggagtaaaaacaatcaggaccattcggtttgctatagtgactgctttttctaccatgaaaaagaaaatcagagtttgcactatgactttagcaacctcagcagtgtgggctcattaatgaatggccccagcttcacctccaaaggaacaaaatacttccatttcttcaatatcagtttatgtgggcatgaggggaagaagatggctctctgtaccaacaatataacagactttacagtaaaagaaatagtggcagggtcagatgattacacaaatttggtaggggcatttgtatgccagtcaacaattattccttctgaaagtaagggtttccgagcagccttatcatcacaatccatcattctggcagatacattcataggagtcacagttgaaaccacattgaaaaatattaatataaaagaagatatgttcccagttccaacaagccaaataccagatgtgcatttcttttataagtcttctacagcaacaacatcttgtattaatggccgatcaactgctgtgaaaatgaggtgtaa

SEQ ID NO: 416262 - DNA, 1234 bp, Homo sapiens
aggagtttggctcaaggctggggctagtttctttcagtattttagacaacaacctaaacacctctatcagtgcctgggaatgttcaaggccctggcttggggtcaagcctgcaggttgggaggtggctggagatcatatccagagtggggctggaggttctgacaatgattacctgatcttaaacttgcatatcccaggatttaaaccaccaacatctatgactggagccacgggttctgaactaggaagaataacatttgtctttgagaccctctgttcagctgactgtgttttgtacttcatggtggatattaatagaaaaagtacaaatgtggtagaatcgtggggtggaaccaaagaaaaacaagcttacacccatatcatcttcaagaatgcaacttttacatttacatgggcattccagagaactaatcagggtcaagataatagacggttcatcaatgacatggtgaagatttattctatcacagccactaatgcagttgatggggtggcgtcctcatgccgtgcctgtgccctcggttctgaacagtcgggttcatcgtgtgtcccctgccctccaggccactacattgagaaagaaaccaaccagtgcaaggaatgtccacctgacacctacctgtccatacatcaggtctatggcaaagaggcttgtattccatgcgggcctgggagtaaaaacaatcaggaccattcggtttgctatagtgactgctttttctaccatgaaaaagaaaatcagagtttgcactatgactttagcaacctcagcagtgtgggctcattaatgaatggccccagcttcacctccaaaggaacaaaatacttccatttcttcaatatcagtttatgtgggcatgaggggaagaagatggctctctgtaccaacaatataacagactttacagtaaaagaaatagtggcagggtcagatgattacacaaatttggtaggggcatttgtatgccagtcaacaattattccttctgaaagtaagggtttccgagcagccttatcatcacaatccatcattctggcagatacattcataggagtcacagttgaaaccacattgaaaaatattaatataaaagaagatatgttcccagttccaacaagccaaataccagatgtgcatttcttttataagtcttctacagcaacaacatcttgtattaatggccgatcaactgctgtgaaaatgaggtgtaa

SEQ ID NO: 416263 - DNA, 1527 bp, Homo sapiens
acattcagcaacaaaccaggttcattcaactgccaggtgtgtcccagaaacacctattctgagaaaggagccaaagaatgtataaggtgtaaagacgactctcaattttcagaggaaggatccagtgagtgtacagagcgccctccctgtaccacaaaagactatttccagatccatactccatgtgatgaagaaggaaagacacagataatgtacaagtggatagagcccaaaatctgccgggaggatctcacagatgctattagattgcccccttctggagagaagaaggattgtccgccttgcaaccctggattttataacaatggatcatcttcttgccatccctgtcctcctggaacattttcagatggaaccaaagaatgtagaccatgtccagcaggaacggagcctgcacttggctttgaatataaatggtggaatgtccttcctggcaacatgaaaacttcctgcttcaatgttgggaattcaaagtgcgatggaatgaatggttgggaggtggctggagatcatatccagagtggggctggaggttctgacaatgattacctgatcttaaacttgcatatcccaggatttaaaccaccaacatctatgactggagccacgggttctgaactaggaagaataacatttgtctttgagaccctctgttcagctgactgtgttttgtacttcatggtggatattaatagaaaaagtacaaatgtggtagaatcgtggggtggaaccaaagaaaaacaagcttacacccatatcatcttcaagaatgcaacttttacatttacatgggcattccagagaactaatcagggtcaagataatagacggttcatcaatgacatggtgaagatttattctatcacagccactaatgcagttgatggggtggcgtcctcatgccgtgcctgtgccctcggttctgaacagtcgggttcatcgtgtgtcccctgccctccaggccactacattgagaaagaaaccaaccagtgcaaggaatgtccacctgacacctacctgtccatacatcaggtctatggcaaagaggcttgtattccatgcgggcctgggagtaaaaacaatcaggaccattcggtttgctatagtgactgctttttctaccatgaaaaagaaaatcagagtttgcactatgactttagcaacctcagcagtgtgggctcattaatgaatggccccagcttcacctccaaaggaacaaaatattgacacatatttaccaaccagtgccacgcctgacccagaaccttctcacttgaacaccaggaatggacttaaaggctttatggcgttcaggcttagactgctaaggtacgagttcaacctgattcatcagattaagctaaatacatacagccttgggtgtaggtggtatttacattaggactcctccctctcctatagaaactgtttctcaagcccaacttagggagagagcagcaggcaggaacaggacgatcacaaccttcatttctcattagtttctac

SEQ ID NO: 416264 - DNA, 2162 bp, Homo sapiens
agcagcgctgctgtccccgccgtgcgcccttcgccgctgagctcgcagcctccggcgcccacctccacctccagtgtcccgcctcgggccgtcgccctccagcggctcgcgagcgtgggagacgtacctgggcaggcactgtccagcccaggcccaggcacagccgtgaggggcgaggcacggggacatcctggcggccaccatggtggccacgtgcctgcaggtggtgggcttcgtcacgagcttcgtgggctggatcggggtcatcgtgaccacctccaccaatgactgggtggtgacctgcggctacaccatccccacctgccgcaagctggatgagctgggctccaaggggctgtgggccgactgcgtcatggccacggggctgtaccactgcaagcccctggtggacatcctcatcctgccgggctacgtgcaggcctgccgcgccctgatgattgctgcctcggtcctgggtctgccggccattttactgctgctgactgttcttccctgcatccggatgggccaggagcccggtgtggctaagtacaggcgggcccagctggctggtgttttgctcattctgctggctctctgcgcccttgttgccaccatctggttccctgtgtgcgcccaccgtgagaccaccatcgtgagctttggctactccctgtatgcaggctggattggtgctgtgctgtgcctcgtgggtggctgtgtcatcctctgctgcgctggagatgcccaggcctttggtgaaaaccgtttctactacactgcgggctctagctccccgactcatgcgaagagtgcccacgtataagagggctgcccggctgcccacagaggtgctgtagatgctgggcccagggccctaggtttgctcgtcacagtgtggggaagcccattcctctgccaggctctaaagccaaaggtctagaaaagcatcctgtctggcattttgtagtcttaacttctccccatttcccccatcttttggttgccttaaaagaaatctctagctcagataatgcccagacatttttttcccttggtgttgcccctattagctcttttcttgggcattcttttgctgtttattaaaaatatattatatatattttgtttctttaaatttcaaatgttttgcaaacatcactgagttaggtgggggtggggaagagaaatacaagatactttttttttttttttttttttttaaatagggcctcactctgttgctcaggctggagtgcggtggtgtgatctcggctcatgtagcctcaacctccccggctcaagtgatcctcctgcctcagcctcccaagtagctgggactacaggcgttcactactacacccagctaatttttaagttttttatagagatgagggctccctatgttgcccaggttggtctcgaactcctggactcaaagtatcctcccgcctcggcctcccaaagtgttgggattataggagtgagccaccacaccggccaagatgcttttcaaactgatacagatgacaatgggagcctcataaagatggcttttgtttcttcccttcaaggtcatttacttgtacgagacagaaaaagatagcattggggacatgggatgggggagggagggcaatagtggaacgaactttccatgggaaactttcccttttgtaagttgagggccaggggtagggatattttttagtttgtgattttacatttatctgtacatactttttcaagattgatcatttttataaccatggttttcctgaaatcctcaattcatcaatatgaaggaaatgaaccacatagactttatgcaataaataacagtgcaagtgagtataactctaactgatgttccacaaaacatttttgatttcaggtttgtatgatgtagtttttaatcgtacattttcatatgcttcaaactaacacatttttaaagctttcccccacttttctctctatttgtattgttagccatcttgaagtgatgttgtttaacataaattgtactgttgaatttggctttacgggtgtaaacactgatggtatatcagtatctgagaccccaaactctccaaatactgatggtgcattttattcttgaagtgaaatctgtgcaataaaataacagactgtctgcaaaa

SEQ ID NO: 416265 - DNA, 2425 bp, Homo sapiens
  misc_feature (2255)..(2255): n is a, c, g, or t
  misc_feature (2260)..(2260): n is a, c, g, or t
  misc_feature (2263)..(2263): n is a, c, g, or t
  misc_feature (2270)..(2271): n is a, c, g, or t
  misc_feature (2274)..(2274): n is a, c, g, or t
  misc_feature (2276)..(2276): n is a, c, g, or t
  misc_feature (2280)..(2280): n is a, c, g, or t
  misc_feature (2288)..(2288): n is a, c, g, or t
  misc_feature (2292)..(2292): n is a, c, g, or t
  misc_feature (2300)..(2300): n is a, c, g, or t
  misc_feature (2305)..(2305): n is a, c, g, or t
  misc_feature (2310)..(2310): n is a, c, g, or t
  misc_feature (2320)..(2320): n is a, c, g, or t
  misc_feature (2332)..(2332): n is a, c, g, or t
  misc_feature (2335)..(2335): n is a, c, g, or t
  misc_feature (2342)..(2342): n is a, c, g, or t
  misc_feature (2345)..(2346): n is a, c, g, or t
  misc_feature (2350)..(2350): n is a, c, g, or t
  misc_feature (2352)..(2352): n is a, c, g, or t
  misc_feature (2360)..(2360): n is a, c, g, or t
  misc_feature (2362)..(2362): n is a, c, g, or t
  misc_feature (2371)..(2372): n is a, c, g, or t
  misc_feature (2377)..(2377): n is a, c, g, or t
  misc_feature (2389)..(2389): n is a, c, g, or t
  misc_feature (2396)..(2396): n is a, c, g, or t
  misc_feature (2403)..(2403): n is a, c, g, or t
  misc_feature (2421)..(2421): n is a, c, g, or t
agcagcgctgctgtccccgccgtgcgcccttcgccgctgagctcgcagcctccggcgcccacctccacctccagtgtcccgcctcgggccgtcgccctccagcggctcgcgagcgtgggagacgtacctgggcaggcactgtccagcccaggcccaggcacagccgtgaggggcgaggcacggggacatcctggcggccaccatggtggccacgtgcctgcaggtggtgggcttcgtcacgagcttcgtgggctggatcggggtcatcgtgaccacctccaccaatgactgggtggtgacctgcggctacaccatccccacctgccgcaagctggatgagctgggctccaaggggctgtgggccgactgcgtcatggccacggggctgtaccactgcaagcccctggtggacatcctcatcctgccgggctacgtgcaggcctgccgcgccctgatgattgctgcctcggtcctgggtctgccggccattttactgctgctgactgttcttccctgcatccggatgggccaggagcccggtgtggctaagtacaggcgggcccagctggctggtgttttgctcattctgctggctctctgcgcccttgttgccaccatctggttccctgtgtgcgcccaccgtgagaccaccatcgtgagctttggctactccctgtatgcaggctggattggtgctgtgctgtgcctcgtgggtggctgtgtcatcctctgctgcgctggagatgcccaggcctttggtgaaaaccgtttctactacactgcgggctctagctccccgactcatgcgaagagtgcccacgtataagagggctgcccggctgcccacagaggtgctgtagatgctgggcccagggccctaggtttgctcgtcacagtgtggggaagcccattcctctgccaggctctaaagccaaaggtctagaaaagcatcctgtctgggcaacaagagcaaaaaactctgtctcaaataataataatgataatagtaatatttctaattactagcctagtatagacactactggggaccaggctactcctgttcgttgcctgtagatgtttattattttagctggatggtataagtttgatgatggactgttcatatgttcttgcaaatgcagtgaactatattacacaccattaattataagtcttccacactcagattctgtgaaagtccccctaatttgttgatgacataaagctccacctctacaatcatatgccttttttaaggagtgtcatgaatccagatactgagatcaggaacttacataaggccaactaaaaaaaccctttacaatgtattttacatatattatagtttgtaagtataaacattcaactactgttaatggacttctaagagaagtcgagtcatttctgtgtgttggaacctcctgtgatcatcatccagaggaagtttcatatacgctggaaatccagtttcataaaatgttacctaaaatgtaatgacctcaaatggagtgtactcagtaactctagaataggaaggatcttctgatctttgcaaagattgcagaggcgtctctgatgagataattgagttccttcctctgattttctgaattgaacctgcagcaattcatctttttaatcaagctgctaaagtacaatggatctctgcagtgatttaggatgtccagttctaggaagcattgttctgggctttcagaatgtaggaggagatctttgtactatttcagtctttttgataaacaagtcataaagaagaaaccagttgtctgagattgccataaactgtaaactctttgacagtaacataaagagatggattaaattggaatacaaccaaatttatctggaggttctgaacaaaggctggtcactgaagtaatcatagaattgacagccaagcactcctttccatcagttaagtaaagaacgaaataaactgtttacatgattttatcccccattctgaatggaagacaaaagcttcaggaacccttgatggcagataaaatgtcctgtggagtcttcttggtaatcattagagcacgttgttttatcatctgagacagtaagaaccgaaacaatttaacaatgtcttcaaaggctttgctagattagacagtacgaaaaataaacatcaagaatgtggaaactatcatgtacaagaaagaccatgcaatgttgactcttttttttattttttcctctctctcttttgagacagagtcttgctngagtncantggcgcnntcncngctnactgcaanctcngcctcccnggttnaagcnattctcctgnctagcctcctgngtngctgggnttnnaggngnccgccacnangcctggctnnttttngtatttttagtngagacgnggtttcnccatgttggccaggctgntctc

SEQ ID NO: 416266 - DNA, 902 bp, Homo sapiens
caaatttaaattttattagtcgattagctgtactttttaaaatgttttattctgaaaatgaattttccacaataatgcaattcaaagtgaactcatttatctggcttttctacaaaggacaattgaaacacttaaggcgaaattcacttattcatctccatttaagaatggaaaaaaagtaacagacttcagatactggttaaggttaacaaaatatgggaaggctcctttttcttttctttctttttttttggtagtctcgtgtaaaagctttacattactatggatattttatagtaagacacttttgtttctgactttctttataaacccatttttaaatttaaaggcacacaataaagctttatgcatttattaaaatatacacattttgttaaatttagaattttcccttagtatcttgataaatcaatatattgtcaacaccacacatttgaaaataaaacacatttcataatacatctgcatattatttctttcttcatgatacactacattgtacagcacaccaatgggaattaaaaaccacaaaacgaacaaactttaacaaatacagcaatttcataccaaaaaaagatagcagagaacaacactaggaattaccatctgtaaatgcaagttgtacttctcaaggacgaaacgaaaaagaaacaagttagtaaaatttacaagctgtatttataactttggatattaattaaacagtaacgtttcttttccacagtgagaaaagctagaatgtggagtcctgtcatcagatgatgtgactacatggaatgaggactatagctgctctcttaaaaacctgcagccccctctctcagcccagacagttgaggtatttatgcaccatcataacattaacagcatctttgctttgg

SEQ ID NO: 416267 - DNA, 921 bp, Homo sapiens
agcagcgctgctgtccccgccgtgcgcccttcgccgctgagctcgcagcctccggcgcccacctccacctccagtgtcccgcctcgggccgtcgccctccagcggctcgcgagcgtgggagacgtacctgggcaggcactgtccagcccaggcccaggcacagccgtgaggggcgaggcacggggacatcctggcggccaccatggtggccacgtgcctgcaggtggtgggcttcgtcacgagcttcgtgggctggatcggggtcatcgtgaccacctccaccaatgactgggtggtgacctgcggctacaccatccccacctgccgcaagctggatgagctgggctccaaggggctgtgggccgactgcgtcatggccacggggctgtaccactgcaagcccctggtggacatcctcatcctgccgggctacgtgcaggcctgccgcgccctgatgattgctgcctcggtcctgggtctgccggccattttactgctgctgactgttcttccctgcatccggatgggccaggagcccggtgtggctaagtacaggcgggcccagctggctggtgttttgctcattctgctggactcagggtgacaagaagtggattctaaagtgctgagggctcagtgggccagcccaggcctggagtctgaatgaagaggcatcagtgtgccggaacttcatgactgggttcagtgccagacctgcagacgttgaaagtgaatgtcatcatgaagcccacatggctggatggtgagaaaagctagaatgtggagtcctgtcatcagatgatgtgactacatggaatgaggactatagctgctctcttaaaaacctgcagccccctctctcagcccagacagttgaggtatttatgcaccatcataacattaacagcatctttgctttgg

SEQ ID NO: 416268 - DNA, 2731 bp, Homo sapiens
agcagcgctgctgtccccgccgtgcgcccttcgccgctgagctcgcagcctccggcgcccacctccacctccagtgtcccgcctcgggccgtcgccctccagcggctcgcgagcgtgggagacgtacctgggcaggcactgtccagcccaggcccaggcacagccgtgaggggcgaggcacggggacatcctggcggccaccatggtggccacgtgcctgcaggtggtgggcttcgtcacgagcttcgtgggctggatcggggtcatcgtgaccacctccaccaatgactgggtggtgacctgcggctacaccatccccacctgccgcaagctggatgagctgggctccaaggggctgtgggccgactgcgtcatggccacggggctgtaccactgcaagcccctggtggacatcctcatcctgccgggctacgtgcaggcctgccgcgccctgatgattgctgcctcggtcctgggtctgccggccattttactgctgctgactgttcttccctgcatccggatgggccaggagcccggtgtggctaagtacaggcgggcccagctggctggtgttttgctcattctgctggctctctgcgcccttgttgccaccatctggttccctgtgtgcgcccaccgtgagaccaccatcgtgagctttggctactccctgtatgcaggctggattggtgctgtgctgtgcctcgtgggtggctgtgtcatcctctgctgcgctggagatgcccaggcctttggtgaaaaccgtttctactacactgcgggctctagctccccgactcatgcgaagagtgcccacgtataagagggctgcccggctgcccacagaggtgctgtagatgctgggcccagggccctaggtttgctcgtcacagtgtggggaagcccattcctctgccaggctctaaagccaaaggtctagaaaagcatcctgtctggcattttgtagtcttaacttctccccatttcccccatcttttggttgccttaaaagaaatctctagctcagataatgcccagacatttttttcccttggtgttgcccctattagctcttttcttgggcattcttttgctgtttattaaaaatatattatatatattttgtttctttaaatttcaaatgttttgcaaacatcactgagttaggtgggggtggggaagagaaatacaagatactttttttttttttttttttttttaaatagggcctcactctgttgctcaggctggagtgcggtggtgtgatctcggctcatgtagcctcaacctccccggctcaagtgatcctcctgcctcagcctcccaagtagctgggactacaggcgttcactactacacccagctaatttttaagttttttatagagatgagggctccctatgttgcccaggttggtctcgaactcctggactcaaagtatcctcccgcctcggcctcccaaagtgttgggattataggagtgagccaccacaccggccaagatgcttttcaaactgatacagatgacaatgggagcctcataaagatggcttttgtttcttcccttcaaggtcatttacttgtacgagacagaaaaagatagcattggggacatgggatgggggagggagggcaatagtggaacgaactttccatgggaaactttcccttttgtaagttgagggccaggggtagggatattttttagtttgtgattttacatttatctgtacatactttttcaagattgatcatttttataaccatggttttcctgaaatcctcaattcatcaatatgaaggaaatgaaccacatagactttatgcaataaataacagtgcaagtgagtataactctaactgatgttccacaaaacatttttgatttcaggtttgtatgatgtagtttttaatcgtacattttcatatgcttcaaactaacacatttttaaagctttcccccacttttctctctatttgtattgttagccatcttgaagtgatgttgtttaacataaattgtactgttgaatttggctttacgggtgtaaacactgatggtatatcagtatctgagaccccaaactctccaaatactgatggtgcattttattcttgaagtgaaatctgtgcaataaaataacagactgtctgcaaaaaaaaaaaaaaaaaaaaaaaacaaaaaaaacaaacaacaaaacaaaaacaaagacagagcagacccacaatcaagaaattaggagacaacagcagacacagcacaaacacaacatagcacgaggcggagtcacccacaaagtggcgccactacacgccgagcacaacacccaccgaggagcggagcgtacgggatcacgaccatgtcggcaggcaaagagagagcggagatcggcagacgggaacaacccaataagtatgcggtagtcggacgacttaattaatcggagagagtaagacaagagaagcgaacatagagaacaagcagaagacggatcaacacgagagaatagcaatcggtcggacacaacgagagcaaactcaattcgctaaagaccataaaaattatagagacgcgacaccagtcctgagcaccaccgtgaggagtcagaaaacagccacgactagcacacacgcgacgacggaccgcacacaccaccaccagcagacgagatagcacgatacacacaacgagatacatcacaactgaaataagaaagaccatcaaccc

SEQ ID NO: 416269 - DNA, 2321 bp, Homo sapiens
agcagcgctgctgtccccgccgtgcgcccttcgccgctgagctcgcagcctccggcgcccacctccacctccagtgtcccgcctcgggccgtcgccctccagcggctcgcgagcgtgggagacgtacctgggcaggcactgtccagcccaggcccaggcacagccgtgaggggcgaggcacggggacatcctggcggccaccatggtggccacgtgcctgcaggtggtgggcttcgtcacgagcttcgtgggctggatcggggtcatcgtgaccacctccaccaatgactgggtggtgacctgcggctacaccatccccacctgccgcaagctggatgagctgggctccaaggggctgtgggccgactgcgtcatggccacggggctgtaccactgcaagcccctggtggacatcctcatcctgccgggctacgtgcaggcctgccgcgccctgatgattgctgcctcggtcctgggtctgccggccattttactgctgctgactgttcttccctgcatccggatgggccaggagcccggtgtggctaagtacaggcgggcccagctggctggtgttttgctcattctgctggctctctgcgcccttgttgccaccatctggttccctgtgtgcgcccaccgtgagaccaccatcgtgagctttggctactccctgtatgcaggctggattggtgctgtgctgtgcctcgtgggtggctgtgtcatcctctgctgcgctggagatgcccaggcctttggtgaaaaccgtttctactacactgcgggctctagctccccgactcatgcgaagagtgcccacgtataagagggctgcccggctgcccacagaggtgctgtagatgctgggcccagggccctaggtttgctcgtcacagtgtggggaagcccattcctctgccaggctctaaagccaaaggtctagaaaagcatcctgtctggcattttgtagtcttaacttctccccatttcccccatcttttggttgccttaaaagaaatctctagctcagataatgcccagacatttttttcccttggtgttgcccctattagctcttttcttgggcattcttttgctgtttattaaaaatatattatatatattttgtttctttaaatttcaaatgttttgcaaacatcactgagttaggtgggggtggggaagagaaatacaagatactttttttttttttttttttttttaaatagggcctcactctgttgctcaggctggagtgcggtggtgtgatctcggctcatgtagcctcaacctccccggctcaagtgatcctcctgcctcagcctcccaagtagctgggactacaggcgttcactactacacccagctaatttttaagttttttatagagatgagggctccctatgttgcccaggttggtctcgaactcctggactcaaagtatcctcccgcctcggcctcccaaagtgttgggattataggagtgagccaccacaccggccaagatgcttttcaaactgatacagatgacaatgggagcctcataaagatggcttttgtttcttcccttcaaggtcatttacttgtacgagacagaaaaagatagcattggggacatgggatgggggagggagggcaatagtggaacgaactttccatgggaaactttcccttttgtaagttgagggccaggggtagggatattttttagtttgtgattttacatttatctgtacatactttttcaagattgatcatttttataaccatggttttcctgaaatcctcaattcatcaatatgaaggaaatgaaccacatagactttatgcaataaataacagtgcaagtgagtataactctaactgatgttccacaaaacatttttgatttcaggtttgtatgatgtagtttttaatcgtacattttcatatgcttcaaactaacacatttttaaagctttcccccacttttctctctatttgtattgttagccatcttgaagtgatgttgtttaacataaattgtactgttgaatttggctttacgggtgtaaacactgatggtatatcagtatctgagaccccaaactctccaaatactgatggtgcattttattcttgaagtgaaatctgtgcaataaaataacagactgtctgcaaaaaaaactggccttcaatcttctgttgtatccagaggtatcattattgatttaaaaaaatctcattaatctctactggtaatttatagggaatctgatcagtgattcaagaacaagtaattctgcattgccttgaataattaaaaagttatattttattca

SEQ ID NO: 416270 - DNA, 544 bp, Homo sapiens
gtaagacagctttctcagtggtaccctacctatgagggagcctgatgaatctcagatcttgtggttgctgccttctcaagttcaagagaaatgtgaaaggaagccaagtgaagccagtgggggatggactcccacaatctgtatccctttgtattttatgggcagtttacacagagggctaagtaatgtctctgggagtcactgaccatgaagataagtttaaaaagagaaagaggattttgaaggtaggaaatacctaagggaaagacctgaaagatggaagccttctcagtcttcacagtggaatcctttttgaacacctatgcccaggtcccacagcagatcaattgaatcagaattttctgggcatcaggccaggcaaagatattttttgaaagcttcccaggtgatgcttatgtgcaggcaagactgagcagctcagttaataaagaaggaggccgaggtgggcggatcacctgaggttggaagttcaagaccagcctggccaacatggtgaaaccccatctctactaaaaatacaaaa

SEQ ID NO: 416271 - DNA, 505 bp, Homo sapiens
atggtggccacgtgcctgcaggtggtgggcttcgtcacgagcttcgtgggctggatcggggtcatcgtgaccacctccaccaatgactgggtggtgacctgcggctacaccatccccacctgccgcaagctggatgagctgggctccaaggggctgtgggccgactgcgtcatggccacggggctgtaccactgcaagcccctggtggacatcctcatcctgccgggtaaggacccgagcttggcggcggctcccaaatccttatcctctgggtagagagcgggatattagacggcgtcacagagacattttgggggcttgaagacctttgggtacgtttttgacatccctagtcccaccttgttgtaaaagaattaggcagccccgaacttaacttctctaggccgcagtattcttatctggaatttgagataatagtggcaatgtggccggtggtaacactggccgggtccctttgagaatgaacaaaccggaacacctaata

SEQ ID NO: 416272 - DNA, 1853 bp, Homo sapiens
agactgcgggcctgcggggaagggcgaagcggggcgggaccgggggcgggagcagcgcggggcgggaccctacccgcggcccacgcggagccaggaggcgcggactacagctcccggcctgccccgcgtgcggtccccgcccgcccccagcgcccgggaggaggatgcagacgccgcggcggcgatgaggatggaggccggggaggcagcgccgccggcgggggcgggcggccgcgccgcaggcggctggggcaagtgggtgcggctcaacgtggggggcacggtgttcctgaccacccggcagacgctgtgccgcgagcagaagtccttcctcagccgcctgtgccagggggaagagctgcagtcggaccgggatgagaccggggcctacctcattgaccgtgaccccacctacttcgggcccatcctgaacttcctccggcatggcaagctggtgctggacaaggacatggctgaggagggggtcctggaggaagccgagttctacaacatcggcccgctgatccgcatcatcaaagaccggatggaagagaaggactacacggtcacccaggtcccacccaagcatgtgtaccgcgtgctgcagtgccaggaggaggagctcacgcaaatggtctccaccatgtctgatggctggcgcttcgagcagctggtgaacatcggctcctcctacaactacggcagcgaggaccaggcagagttcctgtgtgtggtgtccaaggagctccacagcaccccaaacgggctgagctcagagtccagccgcaaaaccaagagcacggaggagcagctggaggagcagcagcagcaggaggaggaggtggaggaggtggaggtggaacaggtgcaggtggaggcagatgcacaggagaaaggttcccgtccgcaccctctcagacctgaggctgagcttgcagtgagggcttctcctcggcccctcgcccgcccccagagctgccatccctgctgttacaagccagaggcacccggatgtgaggccccagatcacctccagggacttggggttcccatctgaaatcctttatttttgtaccatggggtgggccccgggcctgagaaggaagaagcaccctctccccggcctcctctgtctgcacccgtggggctgtgacttactcctgcctccaggggcggggcggggcccccctgggacctcttaaggcccaaggtgggccccaggacctctgggcagagtggactgctcatggcagatgtgtggcaatgtctggctgtgtctctccggcacctgcgtcccctctcccgggctcccctgctgcatggtggatgtgctccttcctggcccggtcacattgcctccttgagccttagtccagggggtcactcctcccaccccacctacctcacagggttgttgtgagggtgcacagaggagcaaagtccctgaaggccctcaggcagtatataggggccgcccaccttcagctgccctgggatgggaaggacccagcccgacccctgggcataacactgtgtttgcaaatggagattcaggtattggggatgcaggttgtggggagctggcctggcagagtaggggtagttggcttggccttctctttggtgatcccacccccagccatttgcattgctggcccagcgcctggcctggggggcggggagaggcagcagaaggggctgggcaggggcggtggaggactcaggaactgcccggggagagtgggtatggcggctgagccaggggccctcctgtgtttgacttcccgggatgggtccttgcttctcagctgtgtccgaccccaccatgtaataaaacccaaaggaacagccca

SEQ ID NO: 416273 - DNA, 1968 bp, Homo sapiens
agactgcgggcctgcggggaagggcgaagcggggcgggaccgggggcgggagcagcgcggggcgggaccctacccgcggcccacgcggagccaggaggcgcggactacagctcccggcctgccccgcgtgcggtccccgcccgcccccagcgcccgggaggaggatgcagacgccgcggcggcgatgaggatggaggccggggaggcagcgccgccggcgggggcgggcggccgcgccgcaggcggctggggcaagtgggtgcggctcaacgtggggggcacggtgttcctgaccacccggcagacgctgtgccgcgagcagaagtccttcctcagccgcctgtgccagggggaagagctgcagtcggaccgggatgagaccggggcctacctcattgaccgtgaccccacctacttcgggcccatcctgaacttcctccggcatggcaagctggtgctggacaaggacatggctgaggagggggtcctggaggaagccgagttctacaacatcggcccgctgatccgcatcatcaaagaccggatggaagagaaggactacacggtcacccaggtcccacccaagcatgtgtaccgcgtgctgcagtgccaggaggaggagctcacgcaaatggtctccaccatgtctgatggctggcgcttcgagcagctggtgaacatcggctcctcctacaactacggcagcgaggaccaggcagagttcctgtgtgtggtgtccaaggagctccacagcaccccaaacgggctgagctcagagtccagccgcaaaaccaagagcacggaggagcagctggaggagcagcagcagcaggaggaggaggtggaggaggtggaggtggaacaggtgcaggtggaggcagatgcacaggagaaaggtgcagccaacccccaggaggatgattgctaagcaaagccggagcctcccgcccactccttgctggagccagctgcagaaccgggggccccggggctgctgggggggcaccagggttagctcagccacttgcctggcgcctcacccgcataaccatcccttctctcactttctctttgcagcccagtcatctcaggatcccgctaaccttttcttcatccacctcttcttcctcctggatctcatctgcaccctgcctcttccctctctgcccctgtccgggttttctctctgcctgctcacgcctccatcccgggtctgccctggtcccagcctcccgtgccctccacccaggccccctggccctgcatcccagagcgtcctgcctgccgcctcctgcgccccttctggtacctcctgcctcccagcctggggaggaggggcgcagctgcacctcctctgtgcccactaaccctgccgggcacctctgagactgggccctggctgcaggccctgccccccctcctctcctcccggcctcctcctcacgtttcctccttgcaggttcccgtccgcaccctctcagacctgaggctgagcttgcagtgagggcttctcctcggcccctcgcccgcccccagagctgccatccctggtttgtagcttggcggtgctggagggaggggtggagcgaggagggtgctcatctcttgatccttggacttgagccgagctttcggctgattatctccacccaccaaagtttctcatccgaccttgccctgcatcaccccctccttaccggccccacctccgcccctcccatcctcctgcccttcccctcttttttttctagctgttacaagccagaggcacccggatgtgaggccccagatcacctccagggacttggggttcccatctgaaatcctttatttttgtaccatgggcccggggagagtgggtatggcggctgagccaggggccctcctgtgtttgacttcccgggatgggtccttgcttctcagctgtgtccgaccccaccatgtaataaaacccaaaggaacagccca

SEQ ID NO: 416274 - DNA, 355 bp, Homo sapiens
gtgtcactgccttgtggcatcccctatttctgtggggatggggaggacaggccacttttggatacccttggcccatgaagtgtcagccagagtggcttaaggattgcagagtggcagaaaaagccctggccatgtgcccacaagccccctatcccactcttttctgcctgctctgtgaccttgggcaagtcactgtccctctctgggccacaattgcctctaaaattgggagcccggggagagtgggtatggcggctgagccaggggccctcctgtgtttgacttcccgggatgggtccttgcttctcagctgtgtccgaccccaccatgtaataaaacccaaaggaacagccca

SEQ ID NO: 416275 - DNA, 2469 bp, Homo sapiens
agactgcgggcctgcggggaagggcgaagcggggcgggaccgggggcgggagcagcgcggggcgggaccctacccgcggcccacgcggagccaggaggcgcggactacagctcccggcctgccccgcgtgcggtccccgcccgcccccagcgcccgggaggaggatgcagacgccgcggcggcgatgaggatggaggccggggaggcagcgccgccggcgggggcgggcggccgcgccgcaggcggctggggcaagtgggtgcggctcaacgtggggggcacggtgttcctgaccacccggcagacgctgtgccgcgagcagaagtccttcctcagccgcctgtgccagggggaagagctgcagtcggaccgggatgagaccggggcctacctcattgaccgtgaccccacctacttcgggcccatcctgaacttcctccggcatggcaagctggtgctggacaaggacatggctgaggagggggtcctggaggaagccgagttctacaacatcggcccgctgatccgcatcatcaaagaccggatggaagagaaggactacacggtcacccaggtcccacccaagcatgtgtaccgcgtgctgcagtgccaggaggaggagctcacgcaaatggtctccaccatgtctgatggctggcgcttcgagcagctggtgaacatcggctcctcctacaactacggcagcgaggaccaggcagagttcctgtgtgtggtgtccaaggagctccacagcaccccaaacgggctgagctcagagtccagccgcaaaaccaagagcacggaggagcagctggaggagcagcagcagcaggaggaggaggtggaggaggtggaggtggaacaggtgcaggtggaggcagatgcacaggagaaaggtgcagccaacccccaggaggatgattgctaagcaaagccggagcctcccgcccactccttgctggagccagctgcagaaccgggggccccggggctgctgggggggcaccagggttagctcagccacttgcctggcgcctcacccgcataaccatcccttctctcactttctctttgcagcccagtcatctcaggatcccgctaaccttttctccctcccaccactgcctcctcctccgcttcccgctggaggtcctgcctcatcttcatccacctcttcttcctcctggatctcatctgcaccctgcctcttccctctctgcccctgtccgggttttctctctgcctgctcacgcctccatcccgggtctgccctggtcccagcctcccgtgccctccacccaggccccctggccctgcatcccagagcgtcctgcctgccgcctcctgcgccccttctggtacctcctgcctcccagcctggggaggaggggcgcagctgcacctcctctgtgcccactaaccctgccgggcacctctgagactgggccctggctgcaggccctgccccccctcctctcctcccggcctcctcctcacgtttcctccttgcaggttcccgtccgcaccctctcagacctgaggctgagcttgcagtgagggcttctcctcggcccctcgcccgcccccagagctgccatccctgctgttacaagccagaggcacccggatgtgaggccccagatcacctccagggacttggggttcccatctgaaatcctttatttttgtaccatggggtgggccccgggcctgagaaggaagaagcaccctctccccggcctcctctgtctgcacccgtggggctgtgacttactcctgcctccaggggcggggcggggcccccctgggacctcttaaggcccaaggtgggccccaggacctctgggcagagtggactgctcatggcagatgtgtggcaatgtctggctgtgtctctccggcacctgcgtcccctctcccgggctcccctgctgcatggtggatgtgctccttcctggcccggtcacattgcctccttgagccttagtccagggggtcactcctcccaccccacctacctcacagggttgttgtgagggtgcacagaggagcaaagtccctgaaggccctcaggcagtatataggggccgcccaccttcagctgccctgggatgggaaggacccagcccgacccctgggcataacactgtgtttgcaaatggagattcaggtattggggatgcaggttgtggggagctggcctggcagagtaggggtagttggcttggccttctctttggtgatcccacccccagccatttgcattgctggcccagcgcctggcctggggggcggggagaggcagcagaaggggctgggcaggggcggtggaggactcaggaactgcccggggagagtgggtatggcggctgagccaggggccctcctgtgtttgacttcccgggatgggtccttgcttctcagctgtgtccgaccccaccatgtaataaaacccaaaggaacagccca

SEQ ID NO: 416276 - DNA, 2288 bp, Homo sapiens
agactgcgggcctgcggggaagggcgaagcggggcgggaccgggggcgggagcagcgcggggcgggaccctacccgcggcccacgcggagccaggaggcgcggactacagctcccggcctgccccgcgtgcggtccccgcccgcccccagcgcccgggaggaggatgcagacgccgcggcggcgatgaggatggaggccggggaggcagcgccgccggcgggggcgggcggccgcgccgcaggcggctggggcaagtgggtgcggctcaacgtggggggcacggtgttcctgaccacccggcagacgctgtgccgcgagcagaagtccttcctcagccgcctgtgccagggggaagagctgcagtcggaccgggatgagaccggggcctacctcattgaccgtgaccccacctacttcgggcccatcctgaacttcctccggcatggcaagctggtgctggacaaggacatggctgaggagggggtcctggaggaagccgagttctacaacatcggcccgctgatccgcatcatcaaagaccggatggaagagaaggactacacggtcacccaggtcccacccaagcatgtgtaccgcgtgctgcagtgccaggaggaggagctcacgcaaatggtctccaccatgtctgatggctggcgcttcgagcagctggtgaacatcggctcctcctacaactacggcagcgaggaccaggcagagttcctgtgtgtggtgtccaaggagctccacagcaccccaaacgggctgagctcagagtccagccgcaaaaccaagagcacggaggagcagctggaggagcagcagcagcaggaggaggaggtggaggaggtggaggtggaacaggtgcaggtggaggcagatgcacaggagaaagcccagtcatctcaggatcccgctaaccttttctccctcccaccactgcctcctcctccgcttcccgctggaggtcctgcctcatcttcatccacctcttcttcctcctggatctcatctgcaccctgcctcttccctctctgcccctgtccgggttttctctctgcctgctcacgcctccatcccgggtctgccctggtcccagcctcccgtgccctccacccaggccccctggccctgcatcccagagcgtcctgcctgccgcctcctgcgccccttctggtacctcctgcctcccagcctggggaggaggggcgcagctgcacctcctctgtgcccactaaccctgccgggcacctctgagactgggccctggctgcaggccctgccccccctcctctcctcccggcctcctcctcacgtttcctccttgcaggttcccgtccgcaccctctcagacctgaggctgagcttgcagtgagggcttctcctcggcccctcgcccgcccccagagctgccatccctgctgttacaagccagaggcacccggatgtgaggccccagatcacctccagggacttggggttcccatctgaaatcctttatttttgtaccatggggtgggccccgggcctgagaaggaagaagcaccctctccccggcctcctctgtctgcacccgtggggctgtgacttactcctgcctccaggggcggggcggggcccccctgggacctcttaaggcccaaggtgggccccaggacctctgggcagagtggactgctcatggcagatgtgtggcaatgtctggctgtgtctctccggcacctgcgtcccctctcccgggctcccctgctgcatggtggatgtgctccttcctggcccggtcacattgcctccttgagccttagtccagggggtcactcctcccaccccacctacctcacagggttgttgtgagggtgcacagaggagcaaagtccctgaaggccctcaggcagtatataggggccgcccaccttcagctgccctgggatgggaaggacccagcccgacccctgggcataacactgtgtttgcaaatggagattcaggtattggggatgcaggttgtggggagctggcctggcagagtaggggtagttggcttggccttctctttggtgatcccacccccagccatttgcattgctggcccagcgcctggcctggggggcggggagaggcagcagaaggggctgggcaggggcggtggaggactcaggaactgcccggggagagtgggtatggcggctgagccaggggccctcctgtgtttgacttcccgggatgggtccttgcttctcagctgtgtccgaccccaccatgtaataaaacccaaaggaacagccca

SEQ ID NO: 416277 - DNA, 2054 bp, Homo sapiens
agactgcgggcctgcggggaagggcgaagcggggcgggaccgggggcgggagcagcgcggggcgggaccctacccgcggcccacgcggagccaggaggcgcggactacagctcccggcctgccccgcgtgcggtccccgcccgcccccagcgcccgggaggaggatgcagacgccgcggcggcgatgaggatggaggccggggaggcagcgccgccggcgggggcgggcggccgcgccgcaggcggctggggcaagtgggtgcggctcaacgtggggggcacggtgttcctgaccacccggcagacgctgtgccgcgagcagaagtccttcctcagccgcctgtgccagggggaagagctgcagtcggaccgggatgagaccggggcctacctcattgaccgtgaccccacctacttcgggcccatcctgaacttcctccggcatggcaagctggtgctggacaaggacatggctgaggagggggtcctggaggaagccgagttctacaacatcggcccgctgatccgcatcatcaaagaccggatggaagagaaggactacacggtcacccaggtcccacccaagcatgtgtaccgcgtgctgcagtgccaggaggaggagctcacgcaaatggtctccaccatgtctgatggctggcgcttcgagcagctggtgaacatcggctcctcctacaactacggcagcgaggaccaggcagagttcctgtgtgtggtgtccaaggagctccacagcaccccaaacgggctgagctcagagtccagccgcaaaaccaagagcacggaggagcagctggaggagcagcagcagcaggaggaggaggtggaggaggtggaggtggaacaggtgcaggtggaggcagatgcacaggagaaaggttcccgtccgcaccctctcagacctgaggctgagcttgcagtgagggcttctcctcggcccctcgcccgcccccagagctgccatccctggtttgtagcttggcggtgctggagggaggggtggagcgaggagggtgctcatctcttgatccttggacttgagccgagctttcggctgattatctccacccaccaaagtttctcatccgaccttgccctgcatcaccccctccttaccggccccacctccgcccctcccatcctcctgcccttcccctcttttttttctagctgttacaagccagaggcacccggatgtgaggccccagatcacctccagggacttggggttcccatctgaaatcctttatttttgtaccatggggtgggccccgggcctgagaaggaagaagcaccctctccccggcctcctctgtctgcacccgtggggctgtgacttactcctgcctccaggggcggggcggggcccccctgggacctcttaaggcccaaggtgggccccaggacctctgggcagagtggactgctcatggcagatgtgtggcaatgtctggctgtgtctctccggcacctgcgtcccctctcccgggctcccctgctgcatggtggatgtgctccttcctggcccggtcacattgcctccttgagccttagtccagggggtcactcctcccaccccacctacctcacagggttgttgtgagggtgcacagaggagcaaagtccctgaaggccctcaggcagtatataggggccgcccaccttcagctgccctgggatgggaaggacccagcccgacccctgggcataacactgtgtttgcaaatggagattcaggtattggggatgcaggttgtggggagctggcctggcagagtaggggtagttggcttggccttctctttggtgatcccacccccagccatttgcattgctggcccagcgcctggcctggggggcggggagaggcagcagaaggggctgggcaggggcggtggaggactcaggaactgcccggggagagtgggtatggcggctgagccaggggccctcctgtgtttgacttcccgggatgggtccttgcttctcagctgtgtccgaccccaccatgtaataaaacccaaaggaacagccca

SEQ ID NO: 416278 - DNA, 1999 bp, Homo sapiens
agactgcgggcctgcggggaagggcgaagcggggcgggaccgggggcgggagcagcgcggggcgggaccctacccgcggcccacgcggagccaggaggcgcggactacagctcccggcctgccccgcgtgcggtccccgcccgcccccagcgcccgggaggaggatgcagacgccgcggcggcgatgaggatggaggccggggaggcagcgccgccggcgggggcgggcggccgcgccgcaggcggctggggcaagtgggtgcggctcaacgtggggggcacggtgttcctgaccacccggcagacgctgtgccgcgagcagaagtccttcctcagccgcctgtgccagggggaagagctgcagtcggaccgggatgagaccggggcctacctcattgaccgtgaccccacctacttcgggcccatcctgaacttcctccggcatggcaagctggtgctggacaaggacatggctgaggagggggtcctggaggaagccgagttctacaacatcggcccgctgatccgcatcatcaaagaccggatggaagagaaggactacacggtcacccaggtcccacccaagcatgtgtaccgcgtgctgcagtgccaggaggaggagctcacgcaaatggtctccaccatgtctgatggctggcgcttcgagcagctggtgaacatcggctcctcctacaactacggcagcgaggaccaggcagagttcctgtgtgtggtgtccaaggagctccacagcaccccaaacgggctgagctcagagtccagccgcaaaaccaagagcacggaggagcagctggaggagcagcagcagcaggaggaggaggtggaggaggtggaggtggaacaggtgcaggtggaggcagatgcacaggagaaaggttcccgtccgcaccctctcagacctgaggctgagcttgcagtgagggcttctcctcggcccctcgcccgcccccagagctgccatccctgctgttacaagccagaggcacccggatgtgaggccccagatcacctccagggacttggggttcccatctgaaatcctttatttttgtaccatggggtgggccccgggcctgagaaggaagaagcaccctctccccggcctcctctgtctgcacccgtggggctgtgacttactcctgcctccaggggcggggcggggcccccctgggacctcttaaggcccaaggtgggccccaggacctctgggcagagtggactgctcatggcagatgtgtggcaatgtctggctgtgtctctccggcacctgcgtcccctctcccgggctcccctgctgcatggtggatgtgctccttcctggcccggtcacattgcctccttgagccttagtccagggggtcactcctcccaccccacctacctcacagggttgttgtgagggtgcacagaggagcaaagtccctgaaggccctcaggcagtatataggggccgcccaccttcagctgccctgggatgggaaggacccagcccgacccctgggcataacactgtgtttgcaaatggagattcaggtattggggatgcaggttgtggggagctggcctggcagagtaggggtagttggcttggccttctctttggtgatcccacccccagccatttgcattgctggcccagcgcctggcctggggggcggggagaggcagcagaaggggctgggcaggggcggtggaggactcaggaactgcccggggagagtgggtatggcggctgagccaggggccctcctgtgtttgacttcccgggatgggtccttgcttctcagctgtgtccgaccccaccatgtaataaaacccaaaggaacagcccatataaaaaaaaaaaataaaaaaaaaattttataaatattttataaatatatttaatttttgtgtggggggtgtgctttattgttcttaatgttagtaatattatattaatattatttcttgggggggggccccggccccaattgcc

SEQ ID NO: 416279 - DNA, 1989 bp, Homo sapiens
atactcaggactaggggttccatctgaaatcctttatatatggtaccatggggtgggccccgagagcctgagaacggactacacggtcacccaggtcccacccaagcatgtgtaccgcgtgctgcagtgccaggaggaggagctcacgcaaatggtctccaccatgtctgatggctggcgcttcgagcagctggtgaacatcggctcctcctacaactacggcagcgaggaccaggcagagttcctgtgtgtggtgtccaaggagctccacagcaccccaaacgggctgagctcagagtccagccgcaaaaccaagagcacggaggagcagctggaggagcagcagcagcaggaggaggaggtggaggaggtggaggtggaacaggtgcaggtggaggcagatgcacaggagaaaggtgcagccaacccccaggaggatgattgctaagcaaagccggagcctcccgcccactccttgctggagccagctgcagaaccgggggccccggggctgctgggggggcaccagggttagctcagccacttgcctggcgcctcacccgcataaccatcccttctctcactttctctttgcagcccagtcatctcaggatcccgctaaccttttctccctcccaccactgcctcctcctccgcttcccgctggaggtcctgcctcatcttcatccacctcttcttcctcctggatctcatctgcaccctgcctcttccctctctgcccctgtccgggttttctctctgcctgctcacgcctccatcccgggtctgccctggtcccagcctcccgtgccctccacccaggccccctggccctgcatcccagagcgtcctgcctgccgcctcctgcgccccttctggtacctcctgcctcccagcctggggaggaggggcgcagctgcacctcctctgtgcccactaaccctgccgggcacctctgagactgggccctggctgcaggccctgccccccctcctctcctcccggcctcctcctcacgtttcctccttgcaggttcccgtccgcaccctctcagacctgaggctgagcttgcagtgagggcttctcctcggcccctcgcccgcccccagagctgccatccctgctgttacaagccagaggcacccggatgtgaggccccagatcacctccagggacttggggttcccatctgaaatcctttatttttgtaccatggggtgggccccgggcctgagaaggaagaagcaccctctccccggcctcctctgtctgcacccgtggggctgtgacttactcctgcctccaggggcggggcggggcccccctgggacctcttaaggcccaaggtgggccccaggacctctgggcagagtggactgctcatggcagatgtgtggcaatgtctggctgtgtctctccggcacctgcgtcccctctcccgggctcccctgctgcatggtggatgtgctccttcctggcccggtcacattgcctccttgagccttagtccagggggtcactcctcccaccccacctacctcacagggttgttgtgagggtgcacagaggagcaaagtccctgaaggccctcaggcagtatataggggccgcccaccttcagctgccctgggatgggaaggacccagcccgacccctgggcataacactgtgtttgcaaatggagattcaggtattggggatgcaggttgtggggagctggcctggcagagtaggggtagttggcttggccttctctttggtgatcccacccccagccatttgcattgctggcccagcgcctggcctggggggcggggagaggcagcagaaggggctgggcaggggcggtggaggactcaggaactgcccggggagagtgggtatggcggctgagccaggggccctcctgtgtttgacttcccgggatgggtccttgcttctcagctgtgtccgaccccaccatgtaataaaacccaaaggaacagccca

SEQ ID NO: 416280 - DNA, 1626 bp, Homo sapiens
agactgcgggcctgcggggaagggcgaagcggggcgggaccgggggcgggagcagcgcggggcgggaccctacccgcggcccacgcggagccaggaggcgcggactacagctcccggcctgccccgcgtgcggtccccgcccgcccccagcgcccgggaggaggatgcagacgccgcggcggcgatgaggatggaggccggggaggcagcgccgccggcgggggcgggcggccgcgccgcaggcggctggggcaagtgggtgcggctcaacgtggggggcacggtgttcctgaccacccggcagacgctgtgccgcgagcagaagtccttcctcagccgcctgtgccagggggaagagctgcagtcggaccggctgcccctgtccgggttttctctctgcctgctcacgcctccatcccgggtctgccctggtcccagcctcccgtgccctccacccaggccccctggccctgcatcccagagcgtcctgcctgccgcctcctgcgccccttctggtacctcctgcctcccagcctggggaggaggggcgcagctgcacctcctctgtgcccactaaccctgccgggcacctctgagactgggccctggctgcaggccctgccccccctcctctcctcccggcctcctcctcacgtttcctccttgcaggttcccgtccgcaccctctcagacctgaggctgagcttgcagtgagggcttctcctcggcccctcgcccgcccccagagctgccatccctgctgttacaagccagaggcacccggatgtgaggccccagatcacctccagggacttggggttcccatctgaaatcctttatttttgtaccatggggtgggccccgggcctgagaaggaagaagcaccctctccccggcctcctctgtctgcacccgtggggctgtgacttactcctgcctccaggggcggggcggggcccccctgggacctcttaaggcccaaggtgggccccaggacctctgggcagagtggactgctcatggcagatgtgtggcaatgtctggctgtgtctctccggcacctgcgtcccctctcccgggctcccctgctgcatggtggatgtgctccttcctggcccggtcacattgcctccttgagccttagtccagggggtcactcctcccaccccacctacctcacagggttgttgtgagggtgcacagaggagcaaagtccctgaaggccctcaggcagtatataggggccgcccaccttcagctgccctgggatgggaaggacccagcccgacccctgggcataacactgtgtttgcaaatggagattcaggtattggggatgcaggttgtggggagctggcctggcagagtaggggtagttggcttggccttctctttggtgatcccacccccagccatttgcattgctggcccagcgcctggcctggggggcggggagaggcagcagaaggggctgggcaggggcggtggaggactcaggaactgcccggggagagtgggtatggcggctgagccaggggccctcctgtgtttgacttcccgggatgggtccttgcttctcagctgtgtccgaccccaccatgtaataaaacccaaaggaacagccca

SEQ ID NO: 416281 - DNA, 994 bp, Homo sapiens
agactgcgggcctgcggggaagggcgaagcggggcgggaccgggggcgggagcagcgcggggcgggaccctacccgcggcccacgcggagccaggaggcgcggactacagctcccggcctgccccgcgtgcggtccccgcccgcccccagcgcccgggaggaggatgcagacgccgcggcggcgatgaggatggaggccggggaggcagcgccgccggcgggggcgggcggccgcgccgcaggcggctggggcaagtgggtgcggctcaacgtggggggcacggtgttcctgaccacccggcagacgctgtgccgcgagcagaagtccttcctcagccgcctgtgccagggggaagagctgcagtcggaccgggatgagaccggggcctacctcattgaccgtgaccccacctacttcgggcccatcctgaacttcctccggcatggcaagctggtgctggacaaggacatggctgaggagggggtcctggaggaagccgagttctacaacatcggcccgctgatccgcatcatcaaagaccggatggaagagaaggactacacggtcacccaggtcccacccaagcatgtgtaccgcgtgctgcagtgccaggaggaggagctcacgcaaatggtctccaccatgtctgatggctggcgcttcgagcagctggtgaacatcggctcctcctacaactacggcagcgaggaccaggcagagttcctgtgtgtggtgtccaaggagctccacagcaccccaaacgggctgagctcagagtccagccgcaaaaccaagagcacggaggagcagctggaggagcagcagcagcaggaggaggaggtggaggaggtggaggtggaacaggtgcaggtggaggcagatgcacaggagaaaggtgcagccaacccccaggaggtactcgaggtgtctaagcttatccggagcgtacacgcgcactcactggtctaaagcctgtctcctggatatcaagac

SEQ ID NO: 416282 - DNA, 261 bp, Homo sapiens
ctccccccaaccacctcttctttctctccctctcttcttctttgggtatgttgcgggggtggtggcagcaggtgctcatgcccctcctggggtgcctggtgctcccacaggtgccctctatgtgacccttctgcccacaggtcccacccaagcatgtgtaccgcgtgctgcagtgccaggaggaggagctcacgcaaatggtctccaccatgtctgatggctggcgcttcgagcaggtgcgctggggacaggggcgtgcca

SEQ ID NO: 416283 - DNA, 2651 bp, Homo sapiens
tgcggcggcgtggctgtgggtcccggattagcggcggcatgggacggttgagttggcaggtggcggccgcggcggctgtgggcctggctctgactctggaggcgctgccttgggtgctgcgctggctgcggtccaggcggcggcggccgcggcgcgaggcgctgttcttcccgtctcaggtgacctgtaccgaggccctgctgcgggctccgggcgcggagctggccgagctccccgagggctgcccgtgcggcctgccccacggcgagagcgcgctaagccgcctgctgcgtgccctgctggccgcccgcgccagcctggatctctgcctgttcgccttctccagcccgcagctgggccgcgccgtgcagttgctgcaccagcgtggggtgcgagtgcgggtcgtcaccgactgcgactacatggccctcaacggctcgcaaatcggtctgctgcgcaaggcagggatccaggtccggcacgatcaagacccaggctacatgcatcacaagtttgccatcgtggacaagagggtgctcatcactggctcgctcaactggaccacgcaagccatccagaacaacagggagaatgttctcatcacggaggacgacgagtacgtgcggctttttctggaagaatttgagcgcatctgggaacagtttaaccctacaaagtatacctttttcccaccaaagaaaagtcacggaagctgtgccccacctgtctccagagctggagggagattgctttcatggcacagaacttgcggcacctccagcgaaagccaaacctaaccaagaatggggctgagccctccctgcgggctgctgtgcgttctgagggagggagacctcggcactagaaaaaaatcgttaaactaaagtctcgtctattagaatactaaattgaactaaagaaggttaggaaagggaaatttctgttacttcgggtcagttatttcgggccagacctttttcttgctcctttgccaaaataacttcagtcacgacctgccacggggtgctttcatgagtgtggtccgtatcttggtttggaatcgaaacttctgctacagcacagaaaaggcacagtgcctcttccaggtcgatcccattcccttccctgattctagaaaagtccctcctgctttggctgatgtgggccctttcagcatctccctgagatttcatccctctctccatgtggcacgactggggttggttggggcctacagtctccttgtccctcacagtctgcccctgtcagggctcggtcctcagagtaaggaaaggaaatggaagtcaggaggaagggaagatgtgagtgtgcggtgcgggtggcaaaagcagccttcggggcaaccccgtgagcgtcattgccaccaaaggctggctgttcccttgattccttgcataattgctctttaaaaccagtatgcacgccagtgccaagctcttcagcagcctgtccttgggtagtaagtgctgtggtctgtcaggactgatggccagcagctgtttctatgttgggcttttaactttttttattttatttatttatttatttatcttttttgagatggagtctcactctgtggcccaggctggagtgcagtggcgcaacctcggctcactgcatcctctgcctcctgggttcaaacgattgtcctgcctcagcctcccgagtagctgggattacaggtgcctgccacaacacctggctgatttttttttgggtatttttagtagagacagggtttcaccatgttggttaggctggtctcaaactcctgacctcaagtgatccaccacttccgcctcccaaagtgctgggattacaggtgtgagccgccatgcccggccgggcttttaacttttaatgtcctaatgttaaggtaattttgttgtgtgtttagaagtgaccttacctttaacacctgtggagttagtgcgtgcacattgctggctcagcgtaacccatcacgggaccggaggagaggagagcggggaagaggagagcagcttcaggccgtggtgtctcccacgtctgtgttcttatttgcagctcagggtttgcattcccaggtagaacaggtgtcgtacactgtgaaatgttccaggttatttgtttataatgtgtgtgtcatatacagatagctccaatgacatctgaagttgtgacttcatcatcttgtcatatttctgtatgatgagccccagggcccatcctgaggtctgctagccatgtgcttagtctcacctccccagcccacgctggcattaccacccagagacccttcagtgctgtgtgtttttcctttttagggttacttttgactcacagtgttaggcaagccagcttggaagttaacttttaaaaaaattcaattgaagctgtaaagtataatatatagattggaagtcaccagaaattgttttagtttgtgaattcccccagtgtatgttctgaaaagaaaatgggagagcttgtaaagcatctcctaaatgcgaagccgcgtgaccctggacttctggcacatctgaataaacatgttcttattctggaaaaaaatataatatatttactttcttacattttctctaaatatacttggagggggggcccggtcccacaatggccttgtgggg

SEQ ID NO: 416284 - DNA, 2687 bp, Homo sapiens
  misc_feature (2556)..(2556): n is a, c, g, or t
tgcggcggcgtggctgtgggtcccggattagcggcggcatgggacggttgagttggcaggtggcggccgcggcggctgtgggcctggctctgactctggaggcgctgccttgggtgctgcgctggctgcggtccaggcggcggcggccgcggcgcgaggcgctgttcttcccgtctcaggtgacctgtaccgaggccctgctgcgggctccgggcgcggagctggccgagctccccgagggctgcccgtgcggcctgccccacggcgagagcgcgctaagccgcctgctgcgtgccctgctggccgcccgcgccagcctggatctctgcctgttcgccttctccagcccgcagctgggccgcgccgtgcagttgctgcaccagcgtggggtgcgagtgcgggtcgtcaccgactgcgactacatggccctcaacggctcgcaaatcggtctgctgcgcaaggcagggatccaggtccggcacgatcaagacccaggctacatgcatcacaagtttgccatcgtggacaagagggtgctcatcactggctcgctcaactggaccacgcaagccatccagaacaacagggagaatgttctcatcacggaggacgacgagtacgtgcggctttttctggaagaatttgagcgcatctgggaacagtttaaccctacaaagtatacctttttcccaccaaagaaaagtcacggaagctgtgccccacctgtctccagagctggagggagattgctttcatggcacagaacttgcggcacctccagcgaaagccaaacctaaccaagaatggggctgagccctccctgcgggctgctgtgcgttctgagggagggagacctcggcactagaaaaaaatcgttaaactaaagtctcgtctattagaatactaaattgaactaaagaaggttaggaaagggaaatttctgttacttcgggtcagttatttcgggccagacctttttcttgctcctttgccaaaataacttcagtcacgacctgccacggggtgctttcatgagtgtggtccgtatcttggtttggaatcgaaacttctgctacagcacagaaaaggcacagtgcctcttccaggtcgatcccattcccttccctgattctagaaaagtccctcctgctttggctgatgtgggccctttcagcatctccctgagatttcatccctctctccatgtggcacgactggggttggttggggcctacagtctccttgtccctcacagtctgcccctgtcagggctcggtcctcagagtaaggaaaggaaatggaagtcaggaggaagggaagatgtgagtgtgcggtgcgggtggcaaaagcagccttcggggcaaccccgtgagcgtcattgccaccaaaggctggctgttcccttgattccttgcataattgctctttaaaaccagtatgcacgccagtgccaagctcttcagcagcctgtccttgggtagtaagtgctgtggtctgtcaggactgatggccagcagctgtttctatgttgggcttttaactttttttattttatttatttatttatttatcttttttgagatggagtctcactctgtggcccaggctggagtgcagtggcgcaacctcggctcactgcatcctctgcctcctgggttcaaacgattgtcctgcctcagcctcccgagtagctgggattacaggtgcctgccacaacacctggctgatttttttttgggtatttttagtagagacagggtttcaccatgttggttaggctggtctcaaactcctgacctcaagtgatccaccacttccgcctcccaaagtgctgggattacaggtgtgagccgccatgcccggccgggcttttaacttttaatgtcctaatgttaaggtaattttgttgtgtgtttagaagtgaccttacctttaacacctgtggagttagtgcgtgcacattgctggctcagcgtaacccatcacgggaccggaggagaggagagcggggaagaggagagcagcttcaggccgtggtgtctcccacgtctgtgttcttatttgcagctcagggtttgcattcccaggtagaacaggtgtcgtacactgtgaaatgttccaggttatttgtttataatgtgtgtgtcatatacagatagctccaatgacatctgaagttgtgacttcatcatcttgtcatatttctgtatgatgagccccagggcccatcctgaggtctgctagccatgtgcttagtctcacctccccagcccacgctggcattaccacccagagacccttcagtgctgtgtgtttttcctttttagggttacttttgactcacagtgttaggcaagccagcttggaagttaacttttaaaaaaattcaattgaagctgtaaagtataatatatagattggaagtcaccagaaattgttttagtttgtgaattcccccagtgtatgttctgaaaagaaaatgggagagcttgtaaagcatctcctaaatgcgaagccgcgtgaccctggacttctggcacatctgataactgtctntctggagtggcaaaaccaaaaaaaatttggggggggccaaaatttaacttttgggcggccaagaagaatgcaatgtaagacacggtagtgggttcacaaaaggggcgggtgcacgagggggcgaacagcgc

SEQ ID NO: 416285 - DNA, 392 bp, Homo sapiens
ccatatttttttaatggctgccataatatttcaagtatgaatatagcataatttataggcagtctccctcttgaaaaaatgtataaatgggaaaatgctttccccaaataatgtggatgtgaaaattcttatacttctatacttggtatttctgttgagcaggttcctataatgggtatttcctaggtcctagttcatgtgcattttaaattttgatcacttctgccaaactaccctcagaaaaggtttgaccaaagttgccatctcattaacaaattatgacctgtttctcttgtccgttgtcactggatagtgtcttttttttctccctgagacggggtcttgctttgttgcactccagcctgggcgacagaaaaaaaaccgtctcacaa

SEQ ID NO: 416286 - DNA, 452 bp, Homo sapiens
attaccatatcatagaaatttacttttttaacacaaaaatggaatattgtgcactactcagtagcttgttttttttcgctcagtggtatctcatgaataaccttccatatttttttaatggctgcataatatttcaagtatgaatatagcataatttataggcagtctcctcttgaaaaaatgtataaatgggaaaatgctttcccaaataatgtggatgtgaaaattcttatacttctatacttggtatttctgttgagcaggttcctataatgggtatttctaggtcctagttcatgtgcattttaaattttgatcacttctgccaaactaccctcagaaaaggtttgaccaaagttgccatctcattaacaaattatgacctgtttctcttgccgttgtcactggatagtgtcttttttttctccctgagacggggtcttgctttgttg

SEQ ID NO: 416287 - DNA, 2161 bp, Homo sapiens
atatacttgcgcgccgacgccgccgctcgcttgtgaaactggaaggctgccatggctagcccagccgcctcctcggtgcgaccaccgaggcccaagaaagagccgcagacgctcgtcatccccaagaatgcggcggaggagcagaagctcaagctggagcggctcatgaagaacccggacaaagcagttccaattccagagaaaatgagtgaatgggcacctcgacctcccccagaatttgtccgagatgtcatgggttcaagtgctggggccggcagtggagagttccacgtgtacagacatctgcgccggagagaatatcagcgacaggactacatggatgccatggctgagaagcaaaaattggatgcagagtttcagaaaagactggaaaagaataaaattgctgcagaggagcagaccgcaaagcgccggaagaagcgccagaagttaaaagagaagaaattactggcaaagaagatgaaacttgaacagaagaaacaagaaggacccggtcagcccaaggagcaggggtccagcagctctgcggaggcatctggaacagaggaggaggaggaagtgcccagtttcaccatggggcgatgacaatgtttgccacagcctctgcctggaacctggctcgtgctgtgaccagaagggaaaggcggctgtttggctctttctcccccgcaaggacccgctgacccgctggatggagagcaaaggagacccctcccgagccgctcacagtcctgtatttggcaggtttgggagcctgaggggccatctccctgacactcagaggcactgccttgcagacaccatccgtgctcctggtaaagggggacagagagcctcaccttgccacatatttgaacagtgatgagtttggggctggtttctgggaagggaacgtttatttagtaaagagcagaacacccttgcgttttgttgggacatgtggaccgtgagtcgcaaacactctggagaaggctgagatgccaccattcccacggggactgaagacacattacgtggacctggtcccaggctcagtgaggagatggcctcagctgtggggctggtccatgttgcccactcactccagtgggaagtggggaccacgccatagagggtctgctcccactgcagctcccggtgctctcgtgttctgggaaggcctgggtgtgtgcacaaggaggcccgggccagggacttcaccaggggctgggtcacaagggcacagggtgtgtggaaagcgctgtgggggaagagccggtcaccggagagtgagcaggcggagactccaagctgggctgagccagagcagaaggcgagggattcccagccggacgggggttctctcaccaacagctgtgatttcatcccgaagtggaagggggtctaaacagaacaggctgagagaggcgggactgggtcaagtgggtggagctcctccttgcatgactgcaactgtcggggctttccgccggctcacagcagttggggccagcggggagaagagaggcggaactgctgtgtcctcatgtggcgcagcctcaaactggcatccaggcactgggcccgtgcagagaaggcacctgcagagagcagggcagcccggcgcaggggcatgcgcctagaatcccagctactcggaaggccaaggcaggaggaccgcttgagtccagggattcaaggccaacctgggcaatagagcgagaccctgtctcttaaaaaacgatgatgatgaacacagaggacggggcactgtgctgggagccagggggcctgggaggagccgagaccagccttttacctcggggttttgaggccaacagggacgacagagacagtttctagttagagccttggctccatttttggatgatttagccccgagttcctgagtctattttatgccccttacgtactttgatagaactaaggaaatagtggttttgagtgaagggaaaggaaacccagaaacattttacgttgcttttacttctgtagtgtagattgccccggcccctctctgagccctgtagcatctgtgatagcttctgtcccttcatcggttcatgtcacagggattttctttcccaggaagcggacacggagagtcagccctaataaatgagcacatgccctggctgta

SEQ ID NO: 416288 - DNA, 1159 bp, Homo sapiens
tgcacatgcgcgccacctccgcactgccctggcttcctgcgcctcttcaggtcatcgcttgctctcgttcccaggctttggcctctagtggacgagaatcaccgagtctgcggggctggacgctgactgcccgggccagcacctaggcgggcgggagctgtgcggcccagggttcacgcgggccgggtagaggctcgagccgggacccccgagcgtgaaccccggagccggcggcgctggggccagaggggccgggcgggaggtggtggcggaggcgaaggggcgacgggacctgggcctggcccgtgtgtgtcctcggcggcctggcgccggccgtcgctgtacggtgagccccagggaggcggatctgggccccgagaaggacccccgcctggatttgccccgtaggcccggcccgggcccctcgggagcagaacagctttggtgaggtggacaggaggtgacctcgcgagcagacgcgcgcgccagcgacagcagcccgccccggcctctcgggagccgtggggcagaggctgcggagccccaggagggccggagccctcatgacttcagtgacctgcttctgcccctctaggtctatcagccacagtctctgcaagtttccaagagcagcagaaaatgaacacattgcaggggccagtgtcattcaaagatgtggctgtggatttcacccaggaggagtggcagcaactggaccctgatgagaagatagcatacggggatgtgatgttggagaactacagccatctagtttctgtggggtatgattatcaccaagccaaacatcatcatggagtggaggtgaaggaagtggagcagggagaggagccgtggataatggaaggtgaatttccatgtcaacatagtccagctttcacagcattgaaaagatcattggctggtggctctgactgtttccggctatgacgatgtaccactcgggaccctttctctggatgtttgccatctaatatgtataaaaagatcagaaatatgaaaaaaaggtaacaatgacattaacacttggtctcatcattatcacacaagtaggcttatgctgccacttccatggcagagtctgagttagtcctgaaataattgatttttatattatgaagtttattaacttttttccctt

SEQ ID NO: 416289 - DNA, 1076 bp, Homo sapiens
tgaattgtggtgctagctacacaaccatccacatttatcaaacttattgaaccatatacttctatttattgattcatagacagattttcactctgtcgcccacactggagtgcagtgtctcgatctctgctcactgtaacttctgcctctcagcctcaagtgatctgcccacctcagccttccaaagtgctgagattacagtcctgagccactgctttcggccttacagaattgttttgttttggggcattcagaagtctgacataaaaattaacttgagacttttatgttcattctttttatcttccattttctttccttccttgctttaaaaataccttggacttattttctgccctcgattttatttacttctttaggcattcagataccaaaacctcgtcctctacctatgcttgcgaattgagtcacagcttgtggtttaccttatttccccaagtccatgctcagttgatgtgatgatatagcgctccctcagctttcccctctttccccagtgctcatttatgacccgtctgtgtgttcatttccccttccccataactggcatcatgctctgtccatagtagacattcaggaagtgtgaatttcataagggaatgttggttccttttcttgccttttcaggcagtgtccccctagaacccgttttctacttttttggttttctttgtatcccttaaaagagtttttctaatctcaacttctaagaccttttttcttgtgtatttttgcagtttgcctccagattgatatgtctgacacttttaacctagttgaatattttacttgacaacatagcagtaccagtgagatagttcacttccttctttctcagaatgtctgatgataaactgtgcacattccaaaatcatgaattctgtctaccttcctcacctcccagtatttgattgtgttagtctcctctccattgtttgtgttctttgtcttctgtgaaatgccttgcagatcatcagcacattgtttcttttgacattagtgttcagtattctcccatacctggattacagtggatccatcttccattcaaatga

SEQ ID NO: 416290 - DNA, 910 bp, Homo sapiens
tgcacatgcgcgccacctccgcactgccctggcttcctgcgcctcttcaggtcatcgcttgctctcgttcccaggctttggcctctagtggacgagaatcaccgagtctgcggggctggacgctgactgcccgggccagcacctaggcgggcgggagctgtgcggcccagggttcacgcgggccgggtagaggctcgagccgggacccccgagcgtgaaccccggagccggcggcgctggggccagaggggccgggcgggaggtggtggcggaggcgaaggggcgacgggacctgggcctggcccgtgtgtgtcctcggcggcctggcgccggccgtcgctgtacggtctatcagccacagtctctgcaagtttccaagagcagcagaaaatgaacacattgcaggggccagtgtcattcaaagatgtggctgtggatttcacccaggaggagtggcagcaactggaccctgatgagaagatagcatacggggatgtgatgttggagaactacagccatctagtttctgtggggtatgattatcaccaagccaaacatcatcatggagtggaggtgaaggaagtggagcagggagaggagccgtggataatggaaggtgaatttccatgtcaacatagtccagctttcacagcattgaaaagatcattggctggtggctctgactgtttccggctatgacgatgtaccactcgggaccctttctctggatgtttgccatctaatatgtataaaaagatcagaaatatgaaaaaaaggtaacaatgacattaacacttggtctcatcattatcacacaagtaggcttatgctgccacttccatggcagagtctgagttagtcctgaaataattgatttttatattatgaagtttattaacttttttccctt

SEQ ID NO: 416291 - DNA, 492 bp, Homo sapiens
agactctgtctcccaaaaaaaaaaggaacatgctctctcattcaaggttacccttctatcactccaaggattcactccataatcttatctttcttgatatgttacattcactaaaacgttcacatcaaatcaagtttgtagacacttgtccttaccaccttacaaaaagtgagatggtatcaacagaggtgagacactgctttacctgcatgtcacttttggcagctttcacagcattgaaaagatcattggctggtggctctgactgtttccggctatgacgatgtaccactcgggaccctttctctggatgtttgccatctaatatgtataaaaagatcagaaatatgaaaaaaaggtaacaatgacattaacacttggtctcatcattatcacacaagtaggcttatgctgccacttccatggcagagtctgagttagtcctgaaataattgatttttatattatgaagtttattaacttttttccctt

SEQ ID NO: 416292 - DNA, 272 bp, Homo sapiens
ggtttatacttaaatgctttcatgtttaaatgttgcaggacaaagcagttccaattccagagaaaatgagtgaatggggtggaaaagaccagctatacggagaatcatcagtatggttagaagatatcccaggggaaacaaagagcctggggggaaaggaggaaaagcggtctctagccttatgcaacgtacaccctttggactcagaactctcagtggactaacgtgggtcacctctgtgtagctctgctctgtgctggagagtcaaacct

SEQ ID NO: 416293 - DNA, 2360 bp, Homo sapiens
atatacttgcgcgccgacgccgccgctcgcttgtgaaactggaaggctgccatggctagcccagccgcctcctcggtgcgaccaccgaggcccaagaaagagccgcagacgctcgtcatccccaagaatgcggcggaggagcagaagctcaagctggagcggctcatgaagaacccggacaaagcagttccaattccagagaaaatgagtgaatgggcacctcgacctcccccagaatttgtccgagatgtcatgggttcaagtgctggggccggcagtggagagttccacgtgtacagacatctgcgccggagagaatatcagcgacaggactacatggatgccatggctgagaagcaaaaattggatgcagagtttcagaaaagactggaaaagaataaaattgctgcagaggagcagaccgcaaagcgccggaagaagcgccagaagttaaaagagaagaaattactggcaaagaagatgaaacttgaacagaagaaacaagaaggacccggtcagcccaaggagcaggggtccagcagctctgcggaggcatctggaacagaggaggaggaggaagtgcccagtttcaccatggggcgatgacaatgtttgccacagcctctgcctggaacctggctcgtgctgtgaccagaagggaaaggcggctgtttggctctttctcccccgcaaggacccgctgacccgctggatggagagcaaaggagacccctcccgagccgctcacagtcctgtatttggcaggtttgggagcctgaggggccatctccctgacactcagaggcactgccttgcagacaccatccgtgctcctggtaaagggggacagagagcctcaccttgccacatatttgaacagtgatgagtttggggctggtttctgggaagggaacgtttatttagtaaagagcagaacacccttgcgttttgttgggacatgtggaccgtgagtcgcaaacactctggagaaggctgagatgccaccattcccacggggactgaagacacattacgtggacctggtcccaggctcagtgaggagatggcctcagctgtggggctggtccatgttgcccactcactccagtgggaagtggggaccacgccatagagggtctgctcccactgcagctcccggtgctctcgtgttctgggaaggcctgggtgtgtgcacaaggaggcccgggccagggacttcaccaggggctgggtcacaagggcacagggtgtgtggaaagcgctgtgggggaagagccggtcaccggagagtgagcaggcggagactccaagctgggctgagccagagcagaaggcgagggattcccagccggacgggggttctctcaccaacagctgtgatttcatcccgaagtggaagggggtctaaacagaacaggctgagagaggcgggactgggtcaagtgggtggagctcctccttgcatgactgcaactgtcggggctttccgccggctcacagcagttggggccagcggggagaagagaggcggaactgctgtgtcctcatgtggcgcagcctcaaactggcatccaggcactgggcccgtgcagagaaggcacctgcagagagcagggcagcccggcgcaggggcatgcgcctagaatcccagctactcggaaggccaaggcaggaggaccgcttgagtccagggattcaaggccaacctgggcaatagagcgagaccctgtctcttaaaaaacgatgatgatgaacacagaggacggggcactgtgctgggagccagggggcctgggaggagccgagaccagccttttacctcggggttttgaggccaacagggacgacagagacagtttctagttagagccttggctccatttttggatgatttagccccgagttcctgagtctattttatgccccttacgtactttgatagaactaaggaaatagtggttttgagtgaagggaaaggaaacccagaaacattttacgttgcttttacttctgtagtgtagattgccccggcccctctctgagccctgtagcatctgtgatagcttctgtcccttcatcggttcatgtcacagggattttctttcccaggaagcggacacggagagtcagccctaataaatgagcacatgccctggctgtaaaaaaaaaaaaaaaaaaaaaaaaaaaaaaaaaaaaaaccgggggggtcttatgggggggggggaaaaagaggggaaagaaagggggacaggggcaaaaggggtcccggagacccggtttccgggaaccaagggggaaaactcggggggtcccccaaagggggggcggataaaatgggaaaaccgggggaaccgggataa

SEQ ID NO: 416294 - DNA, 2797 bp, Homo sapiens
tgcacatgcgcgccacctccgcactgccctggcttcctgcgcctcttcaggtcatcgcttgctctcgttcccaggctttggcctctagtggacgagaatcaccgagtctgcggggctggacgctgactgcccgggccagcacctaggcgggcgggagctgtgcggcccagggttcacgcgggccgggtagaggctcgagccgggacccccgagcgtgaaccccggagccggcggcgctggggccagaggggccgggcgggaggtggtggcggaggcgaaggggcgacgggacctgggcctggcccgtgtgtgtcctcggcggcctggcgccggccgtcgctgtacggtgagccccagggaggcggatctgggccccgagaaggacccccgcctggatttgccccgtaggcccggcccgggcccctcgggagcagaacagctttggtgaggtggacaggaggtgacctcgcgagcagacgcgcgcgccagcgacagcagcccgccccggcctctcgggagccgtggggcagaggctgcggagccccaggagggccggagccctcatgacttcagtgacctgcttctgcccctctaggtctatcagccacagtctctgcaagtttccaagagcagcagaaaatgaacacattgcaggggccagtgtcattcaaagatgtggctgtggatttcacccaggaggagtggcagcaactggaccctgatgagaagatagcatacggggatgtgatgttggagaactacagccatctagtttctgtggggtatgattatcaccaagccaaacatcatcatggagtggaggtgaaggaagtggagcagggagaggagccgtggataatggaaggtgaatttccatgtcaacatagtccaggttcaagtgctggggccggcagtggagagttccacgtgtacagacatctgcgccggagagaatatcagcgacaggactacatggatgccatggctgagaagcaaaaattggatgcagagtttcagaaaagactggaaaagaataaaattgctgcagaggagcagaccgcaaagcgccggaagaagcgccagaagttaaaagagaagaaattactggcaaagaagatgaaacttgaacagaagaaacaagaaggacccggtcagcccaaggagcaggggtccagcagctctgcggaggcatctggaacagaggaggaggaggaagtgcccagtttcaccatggggcgatgacaatgtttgccacagcctctgcctggaacctggctcgtgctgtgaccagaagggaaaggcggctgtttggctctttctcccccgcaaggacccgctgacccgctggatggagagcaaaggagacccctcccgagccgctcacagtcctgtatttggcaggtttgggagcctgaggggccatctccctgacactcagaggcactgccttgcagacaccatccgtgctcctggtaaagggggacagagagcctcaccttgccacatatttgaacagtgatgagtttggggctggtttctgggaagggaacgtttatttagtaaagagcagaacacccttgcgttttgttgggacatgtggaccgtgagtcgcaaacactctggagaaggctgagatgccaccattcccacggggactgaagacacattacgtggacctggtcccaggctcagtgaggagatggcctcagctgtggggctggtccatgttgcccactcactccagtgggaagtggggaccacgccatagagggtctgctcccactgcagctcccggtgctctcgtgttctgggaaggcctgggtgtgtgcacaaggaggcccgggccagggacttcaccaggggctgggtcacaagggcacagggtgtgtggaaagcgctgtgggggaagagccggtcaccggagagtgagcaggcggagactccaagctgggctgagccagagcagaaggcgagggattcccagccggacgggggttctctcaccaacagctgtgatttcatcccgaagtggaagggggtctaaacagaacaggctgagagaggcgggactgggtcaagtgggtggagctcctccttgcatgactgcaactgtcggggctttccgccggctcacagcagttggggccagcggggagaagagaggcggaactgctgtgtcctcatgtggcgcagcctcaaactggcatccaggcactgggcccgtgcagagaaggcacctgcagagagcagggcagcccggcgcaggggcatgcgcctagaatcccagctactcggaaggccaaggcaggaggaccgcttgagtccagggattcaaggccaacctgggcaatagagcgagaccctgtctcttaaaaaacgatgatgatgaacacagaggacggggcactgtgctgggagccagggggcctgggaggagccgagaccagccttttacctcggggttttgaggccaacagggacgacagagacagtttctagttagagccttggctccatttttggatgatttagccccgagttcctgagtctattttatgccccttacgtactttgatagaactaaggaaatagtggttttgagtgaagggaaaggaaacccagaaacattttacgttgcttttacttctgtagtgtagattgccccggcccctctctgagccctgtagcatctgtgatagcttctgtcccttcatcggttcatgtcacagggattttctttcccaggaagcggacacggagagtcagccctaataaatgagcacatgccctggctgta

SEQ ID NO: 416295 - DNA, 2816 bp, Homo sapiens
tgcacatgcgcgccacctccgcactgccctggcttcctgcgcctcttcaggtcatcgcttgctctcgttcccaggctttggcctctagtggacgagaatcaccgagtctgcggggctggacgctgactgcccgggccagcacctaggcgggcgggagctgtgcggcccagggttcacgcgggccgggtagaggctcgagccgggacccccgagcgtgaaccccggagccggcggcgctggggccagaggggccgggcgggaggtggtggcggaggcgaaggggcgacgggacctgggcctggcccgtgtgtgtcctcggcggcctggcgccggccgtcgctgtacggtgagccccagggaggcggatctgggccccgagaaggacccccgcctggatttgccccgtaggcccggcccgggcccctcgggagcagaacagctttggtgaggtggacaggaggtgacctcgcgagcagacgcgcgcgccagcgacagcagcccgccccggcctctcgggagccgtggggcagaggctgcggagccccaggagggtgatttctgcctttgcaggccggagccctcatgacttcagtgacctgcttctgcccctctaggtctatcagccacagtctctgcaagtttccaagagcagcagaaaatgaacacattgcaggggccagtgtcattcaaagatgtggctgtggatttcacccaggaggagtggcagcaactggaccctgatgagaagatagcatacggggatgtgatgttggagaactacagccatctagtttctgtggggtatgattatcaccaagccaaacatcatcatggagtggaggtgaaggaagtggagcagggagaggagccgtggataatggaaggtgaatttccatgtcaacatagtccaggttcaagtgctggggccggcagtggagagttccacgtgtacagacatctgcgccggagagaatatcagcgacaggactacatggatgccatggctgagaagcaaaaattggatgcagagtttcagaaaagactggaaaagaataaaattgctgcagaggagcagaccgcaaagcgccggaagaagcgccagaagttaaaagagaagaaattactggcaaagaagatgaaacttgaacagaagaaacaagaaggacccggtcagcccaaggagcaggggtccagcagctctgcggaggcatctggaacagaggaggaggaggaagtgcccagtttcaccatggggcgatgacaatgtttgccacagcctctgcctggaacctggctcgtgctgtgaccagaagggaaaggcggctgtttggctctttctcccccgcaaggacccgctgacccgctggatggagagcaaaggagacccctcccgagccgctcacagtcctgtatttggcaggtttgggagcctgaggggccatctccctgacactcagaggcactgccttgcagacaccatccgtgctcctggtaaagggggacagagagcctcaccttgccacatatttgaacagtgatgagtttggggctggtttctgggaagggaacgtttatttagtaaagagcagaacacccttgcgttttgttgggacatgtggaccgtgagtcgcaaacactctggagaaggctgagatgccaccattcccacggggactgaagacacattacgtggacctggtcccaggctcagtgaggagatggcctcagctgtggggctggtccatgttgcccactcactccagtgggaagtggggaccacgccatagagggtctgctcccactgcagctcccggtgctctcgtgttctgggaaggcctgggtgtgtgcacaaggaggcccgggccagggacttcaccaggggctgggtcacaagggcacagggtgtgtggaaagcgctgtgggggaagagccggtcaccggagagtgagcaggcggagactccaagctgggctgagccagagcagaaggcgagggattcccagccggacgggggttctctcaccaacagctgtgatttcatcccgaagtggaagggggtctaaacagaacaggctgagagaggcgggactgggtcaagtgggtggagctcctccttgcatgactgcaactgtcggggctttccgccggctcacagcagttggggccagcggggagaagagaggcggaactgctgtgtcctcatgtggcgcagcctcaaactggcatccaggcactgggcccgtgcagagaaggcacctgcagagagcagggcagcccggcgcaggggcatgcgcctagaatcccagctactcggaaggccaaggcaggaggaccgcttgagtccagggattcaaggccaacctgggcaatagagcgagaccctgtctcttaaaaaacgatgatgatgaacacagaggacggggcactgtgctgggagccagggggcctgggaggagccgagaccagccttttacctcggggttttgaggccaacagggacgacagagacagtttctagttagagccttggctccatttttggatgatttagccccgagttcctgagtctattttatgccccttacgtactttgatagaactaaggaaatagtggttttgagtgaagggaaaggaaacccagaaacattttacgttgcttttacttctgtagtgtagattgccccggcccctctctgagccctgtagcatctgtgatagcttctgtcccttcatcggttcatgtcacagggattttctttcccaggaagcggacacggagagtcagccctaataaatgagcacatgccctggctgta

SEQ ID NO: 416296 - DNA, 2584 bp, Homo sapiens
ggaatgcaacagcgtggtctcggctcactgcaacttccacctcccaggttcaaaggattctcgtgcctcagcctcctgagtagctgggactacaggcatgtgacactatgcctggctaattttttttgttatttttaagtagagacggggttttgccatgttggcccaggcaggtggatcacttgaggccagaatttgagaccagcctggccaacatggcgaaaccctgtgtcactcttttagacccttctgagtgtttgcaggttgagtgttcacagggtgttagcctattgagctttcttttgtggttcttatgcaggtgatttctgcctttgcaggccggagccctcatgacttcagtgacctgcttctgcccctctaggtctatcagccacagtctctgcaagtttccaagagcagcagaaaatgaacacattgcaggggccagtgtcattcaaagatgtggctgtggatttcacccaggaggagtggcagcaactggaccctgatgagaagatagcatacggggatgtgatgttggagaactacagccatctagtttctgtggggtatgattatcaccaagccaaacatcatcatggagtggaggtgaaggaagtggagcagggagaggagccgtggataatggaaggtgaatttccatgtcaacatagtccaggttcaagtgctggggccggcagtggagagttccacgtgtacagacatctgcgccggagagaatatcagcgacaggactacatggatgccatggctgagaagcaaaaattggatgcagagtttcagaaaagactggaaaagaataaaattgctgcagaggagcagaccgcaaagcgccggaagaagcgccagaagttaaaagagaagaaattactggcaaagaagatgaaacttgaacagaagaaacaagaaggacccggtcagcccaaggagcaggggtccagcagctctgcggaggcatctggaacagaggaggaggaggaagtgcccagtttcaccatggggcgatgacaatgtttgccacagcctctgcctggaacctggctcgtgctgtgaccagaagggaaaggcggctgtttggctctttctcccccgcaaggacccgctgacccgctggatggagagcaaaggagacccctcccgagccgctcacagtcctgtatttggcaggtttgggagcctgaggggccatctccctgacactcagaggcactgccttgcagacaccatccgtgctcctggtaaagggggacagagagcctcaccttgccacatatttgaacagtgatgagtttggggctggtttctgggaagggaacgtttatttagtaaagagcagaacacccttgcgttttgttgggacatgtggaccgtgagtcgcaaacactctggagaaggctgagatgccaccattcccacggggactgaagacacattacgtggacctggtcccaggctcagtgaggagatggcctcagctgtggggctggtccatgttgcccactcactccagtgggaagtggggaccacgccatagagggtctgctcccactgcagctcccggtgctctcgtgttctgggaaggcctgggtgtgtgcacaaggaggcccgggccagggacttcaccaggggctgggtcacaagggcacagggtgtgtggaaagcgctgtgggggaagagccggtcaccggagagtgagcaggcggagactccaagctgggctgagccagagcagaaggcgagggattcccagccggacgggggttctctcaccaacagctgtgatttcatcccgaagtggaagggggtctaaacagaacaggctgagagaggcgggactgggtcaagtgggtggagctcctccttgcatgactgcaactgtcggggctttccgccggctcacagcagttggggccagcggggagaagagaggcggaactgctgtgtcctcatgtggcgcagcctcaaactggcatccaggcactgggcccgtgcagagaaggcacctgcagagagcagggcagcccggcgcaggggcatgcgcctagaatcccagctactcggaaggccaaggcaggaggaccgcttgagtccagggattcaaggccaacctgggcaatagagcgagaccctgtctcttaaaaaacgatgatgatgaacacagaggacggggcactgtgctgggagccagggggcctgggaggagccgagaccagccttttacctcggggttttgaggccaacagggacgacagagacagtttctagttagagccttggctccatttttggatgatttagccccgagttcctgagtctattttatgccccttacgtactttgatagaactaaggaaatagtggttttgagtgaagggaaaggaaacccagaaacattttacgttgcttttacttctgtagtgtagattgccccggcccctctctgagccctgtagcatctgtgatagcttctgtcccttcatcggttcatgtcacagggattttctttcccaggaagcggacacggagagtcagccctaataaatgagcacatgccctggctgta

SEQ ID NO: 416297 - DNA, 2804 bp, Homo sapiens
caggagttcaagaccagcctggcaaacatggtgaagccctgtctctactaaaaatacaaaaattagctaggcatggtggcatgtgctgtagtcccagctactcgggaggctgaggcaggagaatcgcttgaacccgggaggcggaggttgcagtgagccgagattgtgccactgcactccagcctaggtaacagagcaggactccatctcagtcaatcaatcaatcaatcaatctcagcggttgaactacccttgacatggttcagctctgtatccacacccaaatctcatgtcaaattgtaattcccagtgttgtgggagggacctggtgggaggtgattggctcatgggggccgacttcccccttgctgttctcgtgatattgagtgagcgcttgtgggatctggttgtttaaaagcgtgcagccctcccacttcactctctctgtctctcctgctccaacatggccagacgtgcctgcttccccttcgccttctgccgtgattgtcagtttcctgaggcctccccagccacgcttcctgtacagcctgcagaactgccggagccctcatgacttcagtgacctgcttctgcccctctaggtctatcagccacagtctctgcaagtttccaagagcagcagaaaatgaacacattgcaggggccagtgtcattcaaagatgtggctgtggatttcacccaggaggagtggcagcaactggaccctgatgagaagatagcatacggggatgtgatgttggagaactacagccatctagtttctgtggggtatgattatcaccaagccaaacatcatcatggagtggaggtgaaggaagtggagcagggagaggagccgtggataatggaaggtgaatttccatgtcaacatagtccaggttcaagtgctggggccggcagtggagagttccacgtgtacagacatctgcgccggagagaatatcagcgacaggactacatggatgccatggctgagaagcaaaaattggatgcagagtttcagaaaagactggaaaagaataaaattgctgcagaggagcagaccgcaaagcgccggaagaagcgccagaagttaaaagagaagaaattactggcaaagaagatgaaacttgaacagaagaaacaagaaggacccggtcagcccaaggagcaggggtccagcagctctgcggaggcatctggaacagaggaggaggaggaagtgcccagtttcaccatggggcgatgacaatgtttgccacagcctctgcctggaacctggctcgtgctgtgaccagaagggaaaggcggctgtttggctctttctcccccgcaaggacccgctgacccgctggatggagagcaaaggagacccctcccgagccgctcacagtcctgtatttggcaggtttgggagcctgaggggccatctccctgacactcagaggcactgccttgcagacaccatccgtgctcctggtaaagggggacagagagcctcaccttgccacatatttgaacagtgatgagtttggggctggtttctgggaagggaacgtttatttagtaaagagcagaacacccttgcgttttgttgggacatgtggaccgtgagtcgcaaacactctggagaaggctgagatgccaccattcccacggggactgaagacacattacgtggacctggtcccaggctcagtgaggagatggcctcagctgtggggctggtccatgttgcccactcactccagtgggaagtggggaccacgccatagagggtctgctcccactgcagctcccggtgctctcgtgttctgggaaggcctgggtgtgtgcacaaggaggcccgggccagggacttcaccaggggctgggtcacaagggcacagggtgtgtggaaagcgctgtgggggaagagccggtcaccggagagtgagcaggcggagactccaagctgggctgagccagagcagaaggcgagggattcccagccggacgggggttctctcaccaacagctgtgatttcatcccgaagtggaagggggtctaaacagaacaggctgagagaggcgggactgggtcaagtgggtggagctcctccttgcatgactgcaactgtcggggctttccgccggctcacagcagttggggccagcggggagaagagaggcggaactgctgtgtcctcatgtggcgcagcctcaaactggcatccaggcactgggcccgtgcagagaaggcacctgcagagagcagggcagcccggcgcaggggcatgcgcctagaatcccagctactcggaaggccaaggcaggaggaccgcttgagtccagggattcaaggccaacctgggcaatagagcgagaccctgtctcttaaaaaacgatgatgatgaacacagaggacggggcactgtgctgggagccagggggcctgggaggagccgagaccagccttttacctcggggttttgaggccaacagggacgacagagacagtttctagttagagccttggctccatttttggatgatttagccccgagttcctgagtctattttatgccccttacgtactttgatagaactaaggaaatagtggttttgagtgaagggaaaggaaacccagaaacattttacgttgcttttacttctgtagtgtagattgccccggcccctctctgagccctgtagcatctgtgatagcttctgtcccttcatcggttcatgtcacagggattttctttcccaggaagcggacacggagagtcagccctaataaatgagcacatgccctggctgta

SEQ ID NO: 416298 - DNA, 2694 bp, Homo sapiens
tgcacatgcgcgccacctccgcactgccctggcttcctgcgcctcttcaggtcatcgcttgctctcgttcccaggctttggcctctagtggacgagaatcaccgagtctgcggggctggacgctgactgcccgggccagcacctaggcgggcgggagctgtgcggcccagggttcacgcgggccgggtagaggctcgagccgggacccccgagcgtgaaccccggagccggcggcgctggggccagaggggccgggcgggaggtggtggcggaggcgaaggggcgacgggacctgggcctggcccgtgtgtgtcctcggcggcctggcgccggccgtcgctgtacggtgagccccagggaggcggatctgggccccgagaaggacccccgcctggatttgccccgtaggcccggcccgggcccctcgggagcagaacagctttggtgaggtggacaggaggtgacctcgcgagcagacgcgcgcgccagcgacagcagcccgccccggcctctcgggagccgtggggcagaggctgcggagccccaggagggggccagtgtcattcaaagatgtggctgtggatttcacccaggaggagtggcagcaactggaccctgatgagaagatagcatacggggatgtgatgttggagaactacagccatctagtttctgtggggtatgattatcaccaagccaaacatcatcatggagtggaggtgaaggaagtggagcagggagaggagccgtggataatggaaggtgaatttccatgtcaacatagtccaggttcaagtgctggggccggcagtggagagttccacgtgtacagacatctgcgccggagagaatatcagcgacaggactacatggatgccatggctgagaagcaaaaattggatgcagagtttcagaaaagactggaaaagaataaaattgctgcagaggagcagaccgcaaagcgccggaagaagcgccagaagttaaaagagaagaaattactggcaaagaagatgaaacttgaacagaagaaacaagaaggacccggtcagcccaaggagcaggggtccagcagctctgcggaggcatctggaacagaggaggaggaggaagtgcccagtttcaccatggggcgatgacaatgtttgccacagcctctgcctggaacctggctcgtgctgtgaccagaagggaaaggcggctgtttggctctttctcccccgcaaggacccgctgacccgctggatggagagcaaaggagacccctcccgagccgctcacagtcctgtatttggcaggtttgggagcctgaggggccatctccctgacactcagaggcactgccttgcagacaccatccgtgctcctggtaaagggggacagagagcctcaccttgccacatatttgaacagtgatgagtttggggctggtttctgggaagggaacgtttatttagtaaagagcagaacacccttgcgttttgttgggacatgtggaccgtgagtcgcaaacactctggagaaggctgagatgccaccattcccacggggactgaagacacattacgtggacctggtcccaggctcagtgaggagatggcctcagctgtggggctggtccatgttgcccactcactccagtgggaagtggggaccacgccatagagggtctgctcccactgcagctcccggtgctctcgtgttctgggaaggcctgggtgtgtgcacaaggaggcccgggccagggacttcaccaggggctgggtcacaagggcacagggtgtgtggaaagcgctgtgggggaagagccggtcaccggagagtgagcaggcggagactccaagctgggctgagccagagcagaaggcgagggattcccagccggacgggggttctctcaccaacagctgtgatttcatcccgaagtggaagggggtctaaacagaacaggctgagagaggcgggactgggtcaagtgggtggagctcctccttgcatgactgcaactgtcggggctttccgccggctcacagcagttggggccagcggggagaagagaggcggaactgctgtgtcctcatgtggcgcagcctcaaactggcatccaggcactgggcccgtgcagagaaggcacctgcagagagcagggcagcccggcgcaggggcatgcgcctagaatcccagctactcggaaggccaaggcaggaggaccgcttgagtccagggattcaaggccaacctgggcaatagagcgagaccctgtctcttaaaaaacgatgatgatgaacacagaggacggggcactgtgctgggagccagggggcctgggaggagccgagaccagccttttacctcggggttttgaggccaacagggacgacagagacagtttctagttagagccttggctccatttttggatgatttagccccgagttcctgagtctattttatgccccttacgtactttgatagaactaaggaaatagtggttttgagtgaagggaaaggaaacccagaaacattttacgttgcttttacttctgtagtgtagattgccccggcccctctctgagccctgtagcatctgtgatagcttctgtcccttcatcggttcatgtcacagggattttctttcccaggaagcggacacggagagtcagccctaataaatgagcacatgccctggctgta

SEQ ID NO: 416299 - DNA, 2122 bp, Homo sapiens
atatacttgcgcgccgacgccgccgctcgcttgtgaaactggaaggctgccatggctagcccagccgcctcctcggtgcgaccaccgaggcccaagaaagagccgcagacgctcgtcatccccaagaatgcggcggaggagcagaagctcaagctggagcggctcatgaagaacccggacaaagcagttccaattccagagaaaatgagtgaatgggcacctcgacctcccccagaatttgtccgagatgtcatgggttcaagtgctggggccggcagtggagagttccacgtgtacagacatctgcgccggagagaatatcagcgacaggactacatggatgccatggctgagaagcaaaaattggatgcagagtttcagaaaagactggaaaagaataaaattgctgcagaggagcagaccgcaaagcgccggaagaagcgccagaagttaaaagagaagaaattactggcaaagaagatgaaacttgaacagaagaaacaagaaggacccggtcagcccaaggagcaggggtccagcagctctgcggaggcatctggaacagaggaggaggaggaagtgcccagtttcaccatggggcgatgacaatgtttgccacagcctctgcctggaacctggctcgtgctgtgaccagaagggaaaggcggctgtttggctctttctcccccgcaaggacccgctgacccgctggatggagagcaaaggagacccctcccgagccgctcacagtcctgtatttggcaggtttgggagcctgaggggccatctccctgacactcagaggcactgccttgcagacaccatccgtgctcctggtaaagggggacagagagcctcaccttgccacatatttgaacagtgatgagtttggggctggtttctgggaagggaacgtttatttagtaaagagcagaacacccttgcgttttgttgggacatgtggaccgtgagtcgcaaacactctggagaaggctgagatgccaccattcccacggggactgaagacacattacgtggacctggtcccaggctcagtgaggagatggcctcagctgtggggctggtccatgttgcccactcactccagtgggaagtggggaccacgccatagagggtctgctcccactgcagctcccggtgctctcgtgttctgggaaggcctgggtgtgtgcacaaggaggcccgggccagggacttcaccaggggctgggtcacaagggcacagggtgtgtggaaagcgctgtgggggaagagccggtcaccggagagtgagcaggcggagactccaagctgggctgagccagagcagaaggcgagggattcccagccggacgggggttctctcaccaacagctgtgatttcatcccgaagtggaagggggtctaaacagaacaggctgagagaggcgggactgggtcaagtgggtggagctcctccttgcatgactgcaactgtcggggctttccgccggctcacagcagttggggccagcggggagaagagaggcggaactgctgtgtcctcatgtggcgcagcctcaaactggcatccaggcactgggcccgtgcagagaaggcacctgcagagagcagggcagcccggcgcaggggcatgcgcctagaatcccagctactcggaaggccaaggcaggaggaccgcttgagtccagggattcaaggccaacctgggcaatagagcgagaccctgtctcttaaaaaacgatgatgatgaacacagaggacggggcactgtgctgggagccagggggcctgggaggagccgagaccagccttttacctcggggttttgaggccaacagggacgacagagacagtttctagttagagccttggctccatttttggatgatttagccccgagttcctgagtctattttatgccccttacgtactttgatagaactaaggaaatagtggttttgagtgaagggaaaggaaacccagaaacattttacgttgcttttacttctgtagtgtagattgccccggcccctctctgagccctgtagcatctgtgatagcttctgtcccttcatcggttcatttattagggctgactctccgtgtccgcttcctggaa

SEQ ID NO: 416300 - DNA, 2069 bp, Homo sapiens
atatacttgcgcgccgacgccgccgctcgcttgtgaaactggaaggctgccatggctagcccagccgcctcctcggtgcgaccaccgaggcccaagaaagagccgcagacgctcgtcatccccaagaatgcggcggaggagcagaagctcaagctggagcggctcatgaagaacccggacaaagcagttccaattccagagaaaatgagtgaatgggcacctcgacctcccccagaatttgtccgagatgtcatgggttcaagtgctggggccggcagtggagagttccacgtgtacagacatctgcgccggagagaatatcagcgacaggactacatggatgccatggctgagaagcaaaaattggatgcagagtttcagaaaagactggaaaagaataaaattgctgcagaggagcagaccgcaaagcgccggaagaagcgccagaagttaaaagagaagaaattactggcaaagaagatgaaacttgaacagaagaaacaagaaggacccggtcagcccaaggagcaggggtccagcagctctgcggaggcatctggaacagaggaggaggaggaagtgcccagtttcaccatggggcgatgacaatgtttgccacagcctctgcctggaacctggctcgtgctgtgaccagaagggaaaggcggctgtttggctctttctcccccgcaaggacccgctgacccgctggatggagagcaaaggagacccctcccgagccgctcacagtcctgtatttggcaggtttgggagcctgaggggccatctccctgacactcagaggcactgccttgcagacaccatccgtgctcctggtaaagggggacagagagcctcaccttgccacatatttgaacagtgatgagtttggggctggtttctgggaagggaacgtttatttagtaaagagcagaacacccttgcgttttgttgggacatgtggaccgtgagtcgcaaacactctggagaaggctgagatgccaccattcccacggggactgaagacacattacgtggacctggtcccaggctcagtgaggagatggcctcagctgtggggctggtccatgttgcccactcactccagtgggaagtggggaccacgccatagagggtctgctcccactgcagctcccggtgctctcgtgttctgggaaggcctgggtgtgtgcacaaggaggcccgggccagggacttcaccaggggctgggtcacaagggcacagggtgtgtggaaagcgctgtgggggaagagccggtcaccggagagtgagcaggcggagactccaagctgggctgagccagagcagaaggcgagggattcccagccggacgggggttctctcaccaacagctgtgatttcatcccgaagtggaagggggtctaaacagaacaggctgagagaggcgggactgggtcaagtgggtggagctcctccttgcatgactgcaactgtcggggctttccgccggctcacagcagttggggccagcggggagaagagaggcggaactgctgtgtcctcatgtggcgcagcctcaaactggcatccaggcactgggcccgtgcagagaaggcacctgcagagagcagggcagcccggcgcaggggcatgcgcctagaatcccagctactcggaaggccaaggcaggaggaccgcttgagtccagggattcaaggccaacctgggcaatagagcgagaccctgtctcttaaaaaacgatgatgatgaacacagaggacggggcactgtgctgggagccagggggcctgggaggagccgagaccagccttttacctcggggttttgaggccaacagggacgacagagacagtttctagttagagccttggctccatttttggatgatttagccccgagttcctgagtctattttatgccccttacgtactttgatagaactaaggaaatagtggttttgagtgaagggaaaggaaacccagaaacattttacgttgcttttacttctgtagtgtagattgccccgggccgatttgtttttcctctagactcggctcatgcccat

SEQ ID NO: 416301 - DNA, 1588 bp, Homo sapiens
  misc_feature (2)..(2): n is a, c, g, or t
  misc_feature (89)..(90): n is a, c, g, or t
  misc_feature (145)..(145): n is a, c, g, or t
  misc_feature (183)..(183): n is a, c, g, or t
gncctgggatgacagcgccagggcagctggggccagggcctccatgtcaccgcactgtagaggccggtcttggtgtcccattttttttnnccccacaaaaaaaacccccggagaggggaattttccccccccccccctttgggtnttttaatattttttttttggggggcccccgaagagggnttttttttgggggggaagcctgaggggccatctccctgacactcagaggcactgccttgcagacaccatccgtgctcctggtaaagggggacagagagcctcaccttgccacatatttgaacagtgatgagtttggggctggtttctgggaagggaacgtttatttagtaaagagcagaacacccttgcgttttgttgggacatgtggaccgtgagtcgcaaacactctggagaaggctgagatgccaccattcccacggggactgaagacacattacgtggacctggtcccaggctcagtgaggagatggcctcagctgtggggctggtccatgttgcccactcactccagtgggaagtggggaccacgccatagagggtctgctcccactgcagctcccggtgctctcgtgttctgggaaggcctgggtgtgtgcacaaggaggcccgggccagggacttcaccaggggctgggtcacaagggcacagggtgtgtggaaagcgctgtgggggaagagccggtcaccggagagtgagcaggcggagactccaagctgggctgagccagagcagaaggcgagggattcccagccggacgggggttctctcaccaacagctgtgatttcatcccgaagtggaagggggtctaaacagaacaggctgagagaggcgggactgggtcaagtgggtggagctcctccttgcatgactgcaactgtcggggctttccgccggctcacagcagttggggccagcggggagaagagaggcggaactgctgtgtcctcatgtggcgcagcctcaaactggcatccaggcactgggcccgtgcagagaaggcacctgcagagagcagggcagcccggcgcaggggcatgcgcctagaatcccagctactcggaaggccaaggcaggaggaccgcttgagtccagggattcaaggccaacctgggcaatagagcgagaccctgtctcttaaaaaacgatgatgatgaacacagaggacggggcactgtgctgggagccagggggcctgggaggagccgagaccagccttttacctcggggttttgaggccaacagggacgacagagacagtttctagttagagccttggctccatttttggatgatttagccccgagttcctgagtctattttatgccccttacgtactttgatagaactaaggaaatagtggttttgagtgaagggaaaggaaacccagaaacattttacgttgcttttacttctgtagtgtagattgccccggcccctctctgagccctgtagcatctgtgatagcttctgtcccttcatcggttcatgtcacagggattttctttcccaggaagcggacacggagagtcagccctaataaatgagcacatgccctggctgta

SEQ ID NO: 416302 - DNA, 493 bp, Homo sapiens
  misc_feature (27)..(27): n is a, c, g, or t
atgctgatggctgactctagaggatanacaattcggccctgggcaatagagcgagaccctgtctcttaaaaaacgatgatgatgaacacagaggacggggcactgtgctgggagccagggggcctgggaggagccgagaccagccttttacctcggggttttgaggccaacagggacgacagagacagtttctagttagagccttggctccatttttggatgatttagccccgagttcctgagtctattttatgccccttacgtactttgatagaactaaggaaatagtggttttgagtgaagggaaaggaaacccagaaacattttacgttgcttttacttctgtagtgtagattgccccggcccctctctgagccctgtagcatctgtgatagcttctgtcccttcatcggttcatgtcacagggattttctttcccaggaagcggacacggagagtcagccctaataaatgagcacatgccctggctgta

SEQ ID NO: 416303 - DNA, 1539 bp, Homo sapiens
atatacttgcgcgccgacgccgccgctcgcttgtgaaactggaaggctgccatggctagcccagccgcctcctcggtgcgaccaccgaggcccaagaaagagccgcagacgctcgtcatccccaagaatgcggcggaggagcagaagctcaagctggagcggctcatgaagaacccggacaaagcagttccaattccagagaaaatgagtgaatgggcacctcgacctcccccagaatttgtccgagatgtcatgggttcaagtgctggggccggcagtggagagttccacgtgtacagacatctgcgccggagagaatatcagcgacaggactacatggatgccatggctgagaagcaaaaattggatgcagagtttcagaaaagactggaaaagaataaaattgctgcagaggagcagaccgcaaagcgccggaagaagcgccagaagttaaaagagaagaaattactggcaaagaagatgaaacttgaacagaagaaacaagaaggacccggtcagcccaaggagcaggggtccagcagctctgcggaggcatctggaacagaggaggaggaggaagtgcccagtttcaccatggggcgatgacaatgtttgccacagcctctgcctggaacctggctcgtgctgtgaccagaagggaaaggcggctgtttggctctttctcccccgcaaggacccgctgacccgctggatggagagcaaaggagacccctcccgagccgctcacagtcctgtatttggcaggtttgggagcctgaggggccatctccctgacactcagaggcactgccttgcagacaccatccgtgctcctggtaaagggggacagagagcctcaccttgccacatatttgaacagtgatgagtttggggctggtttctgggaagggaacgtttatttagtaaagagcagaacacccttgcgttttgttgggacatgtggaccgtgagtcgcaaacactctggagaaggctgagatgccaccattcccacggggactgaagacacattacgtggacctggtcccaggctcagtgaggagatggcctcagctgtggggctggtccatgttgcccactcactccagtgggaagtggggaccacgccatagagggtctgctcccactgcagctcccggtgctctcgtgttctgggaaggcctgggtgtgtgcacaaggaggcccgggccagggacttcaccaggggctgggtcacaagggcacagggtgtgtggaaagcgctgtgggggaagagccggtcaccggagagtgagcaggcggagactccaagctgggctgagccagagcagaaggcgagggattcccagccggacgggggttctctcaccaacagctgtgatttcatcccgaagtggaagggggtctaaacagaacaggccggcatggaggaaggactccaagggaccgtctggcaccgccgggctgataggaacccatcttgtctgtctgtgaattattcatgtgctgcacttcctgaaaagaatgctcctgtttgact

SEQ ID NO: 416304 - DNA, 943 bp, Homo sapiens
atatacttgcgcgccgacgccgccgctcgcttgtgaaactggaaggctgccatggctagcccagccgcctcctcggtgcgaccaccgaggcccaagaaagagccgcagacgctcgtcatccccaagaatgcggcggaggagcagaagctcaagctggagcggctcatgaagaacccggacaaagcagttccaattccagagaaaatgagtgaatgggcacctcgacctcccccagaatttgtccgagatgtcatgggttcaagtgctggggccggcagtggagagttccacgtgtacagacatctgcgccggagagaatatcagcgacaggactacatggatgccatggctgagaagcaaaaattggatgcagagtttcagaaaagactggaaaagaataaaattgctgcagaggagcagaccgcaaagcgccggaagaagcgccagaagttaaaagagaagaaattactggcaaagaagatgaaacttgaacagaagaaacaagaaggacccggtcagcccaaggagcaggggtccagcagctctgcggaggcatctggaacagaggaggaggaggaagtgcccagtttcaccatggggcgatgacaatgtttgccacagcctctgcctggaacctggctcgtgctgtgaccagaagggaaaggcggctgtttggctctttctcccccgcaaggacccgctgacccgctggatggagagcaaaggagacccctcccgagccgctcacagtcctgtatttggcaggtttgggagcctgaggggccatctccctgacactcagaggcactgccttgcagacaccatccgtgctcctggtaaagggggacagagagcctcaccttgccacatatttgaacagtgatgagtttggggctggtttctgggaagggaacgtttatttagtaaagagcagaacaccctt

SEQ ID NO: 416305 - DNA, 1460 bp, Homo sapiens
atatacttgcgcgccgacgccgccgctcgcttgtgaaactggaaggctgccatggctagcccagccgcctcctcggtgcgaccaccgaggcccaagaaagagccgcagacgctcgtcatccccaagaatgcggcggaggagcagaagctcaagctggagcggctcatgaagaacccggacaaagcagttccaattccagagaaaatgagtgaatgggcacctcgacctcccccagaatttgtccgagatgtcatgggttcaagtgctggggccggcagtggagagttccacgtgtacagacatctgcgccggagagaatatcagcgacaggactacatggatgccatggctgagaagcaaaaattggatgcagagtttcagaaaagactggaaaagaataaaattgctgcagaggagcagaccgcaaagcgccggaagaagcgccagaagttaaaagagaagaaattactggcaaagaagatgaaacttgaacagaagaaacaagaaggacccggtcagcccaaggagcaggggtccagcagctctgcggaggcatctggaacagaggaggaggaggaagtgcccagtttcaccatggggcgatgacaatgtttgccacagcctctgcctggaacctggctcgtgctgtgaccagaagggaaaggcggctgtttggctctttctcccccgcaaggacccgctgacccgctggatggagagcaaaggagacccctcccgagccgctcacagtcctgtatttggcaggtttgggagcctgaggggccatctccctgacactcagaggcactgccttgcagacaccatccgtgctcctggtaaagggggacagagagcctcaccttgccacatatttgaacagtgatgagtttggggctggtttctgggaagggaacgtttatttagtaaagagcagaacacccttgcgttttgttgggacatgtggaccgtgagtcgcaaacactctggagaaggctgagatgccaccattcccacggggactgaagacacattacgctcagtgaggagatggcctcagctgtggggctggtccatgttgcccactcactccagtgggaagtggggaccacgccatagagggtctgctcccactcgtgttctgggaaggcctgggtgtgtgcacaaggaggcccgggccagggacttcaccaggggctgggtcacaagggcacagggtggggaagagccggtcaccggagagtgagcaggcggagactccaagctgggctgagccagagcagaaggcgagggattcccagccaccaacagctgtgatttcatcccgaagtggaagggggtctaaacagaacaggctgagagaggcgggactgggtcaagtggcgggctgataggaacccatcttgtctgtctgtgaattattcatgtgctgcacttcctgaaaagaatgctcctgtttgact

SEQ ID NO: 416306 - DNA, 2351 bp, Homo sapiens
tgcacatgcgcgccacctccgcactgccctggcttcctgcgcctcttcaggtcatcgcttgctctcgttcccaggctttggcctctagtggacgagaatcaccgagtctgcggggctggacgctgactgcccgggccagcacctaggcgggcgggagctgtgcggcccagggttcacgcgggccgggtagaggctcgagccgggacccccgagcgtgaaccccggagccggcggcgctggggccagaggggccgggcgggaggtggtggcggaggcgaaggggcgacgggacctgggcctggcccgtgtgtgtcctcggcggcctggcgccggccgtcgctgtacggtgagccccagggaggcggatctgggccccgagaaggacccccgcctggatttgccccgtaggcccggcccgggcccctcgggagcagaacagctttggtgaggtggacaggaggtgacctcgcgagcagacgcgcgcgccagcgacagcagcccgccccggcctctcgggagccgtggggcagaggctgcggagccccaggagggccggagccctcatgacttcagtgacctgcttctgcccctctaggtctatcagccacagtctctgcaagtttccaagagcagcagaaaatgaacacattgcaggggccagtgtcattcaaagatgtggctgtggatttcacccaggaggagtggcagcaactggaccctgatgagaagatagcatacggggatgtgatgttggagaactacagccatctagtttctgtggggtatgattatcaccaagccaaacatcatcatggagtggaggtgaaggaagtggagcagggagaggagccgtggataatggaaggtgaatttccatgtcaacatagtccaggtaagttagtagattatcacatgttaaaaaacactcatccccgacctttgggagtgactaaagagttgtttatatgtactcggtaccctcagtaacacctcccaacccccaaatatcactttccttcccacacacataccacatacatgaactcttttgttgattttacatttgatttacattggtagggattttttcattctaacctgtactggggacccagtcacttcctctttctccagcattatcggtcacttatttactccctcgccattagagaattgttgtgagttttttgtttgtttgtttgtttgtttgttttttggagacagagtcttgttctatcacccaggctggtgtgcactggtatgttctcgctcactgcaaccactatctctcaggttcaagcgattctccttcctcagcctcctgagtagctgggattacaggcacatgtcaccacgcctggctaatttttgtatttttaatagagactgggtttcaccatgttggccatgctggtcttgaacttctggcctcaagtgatctgcccacctcagccttccaaagtgctgagattacagtcctgagccactgctttcggccttacagaattgttttgttttggggcattcagaagtctgacataaaaattaacttgagacttttatgttcattctttttatcttccattttctttccttccttgctttaaaaataccttggacttattttctgccctcgattttatttacttctttaggcattcagataccaaaacctcgtcctctacctatgcttgcgaattgagtcacagcttgtggtttaccttatttccccaagtccatgctcagttgatgtgatgatatagcgctccctcagctttcccctctttccccagtgctcatttatgacccgtctgtgtgttcatttccccttccccataactggcatcatgctctgtccatagtagacattcaggaagtgtgaatttcataagggaatgttggttccttttcttgccttttcaggcagtgtccccctagaacccgttttctacttttttggttttctttgtatcccttaaaagagtttttctaatctcaacttctaagaccttttttcttgtgtatttttgcagtttgcctccagattgatatgtctgacacttttaacctagttgaatattttacttgacaacatagcagtaccagtgagatagttcacttccttctttctcagaatgtctgatgataaactgtgcacattccaaaatcatgaattctgtctaccttcctcacctcccagtatttgattgtgttagtctcctctccattgtttgtgttctttgtcttctgtgaaatgccttgcagatcatcagcacattgtttcttttgacattagtgttcagtattctcccatacctggattacagtggatccatcttccattcaaatga

SEQ ID NO: 416307 - DNA, 2071 bp, Homo sapiens
cgatgtcaccatttctacctgccacgcatcggcgaaggttgggactcgactggtgtttgatcactatgggaaaatcatccagaaaaccccctacccccaccccagagggatgacagtcagcgtgaagcagttattttctacactacctgtgcgccataaggaatttcaaaggaatattaagaagacgtgcctgcttccccttcgccttctgccgtgattgtcagtttcctgaggcctccccagccacgcttcctgtacagcctgcagaactgccggagccctcatgacttcagtgacctgcttctgcccctctaggtctatcagccacagtctctgcaagtttccaagagcagcagaaaatgaacacattgcaggggccagtgtcattcaaagatgtggctgtggatttcacccaggaggagtggcagcaactggaccctgatgagaagatagcatacggggatgtgatgttggagaactacagccatctagtttctgtggggtatgattatcaccaagccaaacatcatcatggagtggaggtgaaggaagtggagcagggagaggagccgtggataatggaaggtgaatttccatgtcaacatagtccaggtaagttagtagattatcacatgttaaaaaacactcatccccgacctttgggagtgactaaagagttgtttatatgtactcggtaccctcagtaacacctcccaacccccaaatatcactttccttcccacacacataccacatacatgaactcttttgttgattttacatttgatttacattggtagggattttttcattctaacctgtactggggacccagtcacttcctctttctccagcattatcggtcacttatttactccctcgccattagagaattgttgtgagttttttgtttgtttgtttgtttgtttgttttttggagacagagtcttgttctatcacccaggctggtgtgcactggtatgttctcgctcactgcaaccactatctctcaggttcaagcgattctccttcctcagcctcctgagtagctgggattacaggcacatgtcaccacgcctggctaatttttgtatttttaatagagactgggtttcaccatgttggccatgctggtcttgaacttctggcctcaagtgatctgcccacctcagccttccaaagtgctgagattacagtcctgagccactgctttcggccttacagaattgttttgttttggggcattcagaagtctgacataaaaattaacttgagacttttatgttcattctttttatcttccattttctttccttccttgctttaaaaataccttggacttattttctgccctcgattttatttacttctttaggcattcagataccaaaacctcgtcctctacctatgcttgcgaattgagtcacagcttgtggtttaccttatttccccaagtccatgctcagttgatgtgatgatatagcgctccctcagctttcccctctttccccagtgctcatttatgacccgtctgtgtgttcatttccccttccccataactggcatcatgctctgtccatagtagacattcaggaagtgtgaatttcataagggaatgttggttccttttcttgccttttcaggcagtgtccccctagaacccgttttctacttttttggttttctttgtatcccttaaaagagtttttctaatctcaacttctaagaccttttttcttgtgtatttttgcagtttgcctccagattgatatgtctgacacttttaacctagttgaatattttacttgacaacatagcagtaccagtgagatagttcacttccttctttctcagaatgtctgatgataaactgtgcacattccaaaatcatgaattctgtctaccttcctcacctcccagtatttgattgtgttagtctcctctccattgtttgtgttctttgtcttctgtgaaatgccttgcagatcatcagcacattgtttcttttgacattagtgttcagtattctcccatacctggattacagtggatccatcttccattcaaatga

SEQ ID NO: 416308 - DNA, 556 bp, Homo sapiens
  misc_feature (553)..(553): n is a, c, g, or t
aaagagcacctagtatgtgcacagcattgttctagatactgtggggatatgaagtttaaacatagatcatgccctcattgggcttacatgctgttgaaaagataggatataaatccatgaaaatttttacaatgctatttattaacaatacatgacaagagtactagaaatgttacttgtgactattttgtctattctagccaagctggatgcctggctgtttctcagttatactaaatgagttctgctctcagggtcttcatacttgcccttccctctgcctgcaacactcttcctccagttttttttttttttttttggctctctccatcactttaggtctccattaaaactgtcagcttcagggaagttgccttccctgaccacaaccacactaattcaaataccaatccttccccgcctccgtttggtaactctctagtctcttatctcctttatttttcttcatttcgtttatttacttgacattatattttatatttattttgttactttcttattgcctctacctgcacgacaacacataaaaaanaaa

SEQ ID NO: 416309 - DNA, 473 bp, Homo sapiens
ttccctttgtagtccagttccaggatttctgtagagtggaaccagattgtgtatgttttgctcttttgtggaacatcatcagctggggtacagttctgacgtgcactttctttattcttttattgactacactatttctgaagtcacttggcacctcttctgatttcatacatttgtaatgacattagatattttctatattgtctgcattctatcctggaattcctaatctcctatttatttatatttttgtgaattggaattaaccctttatgctgtatattctgttgatttcaacaaattcatatcacatatttaccattataatattatacataatactttcatcacccttttaaatctattttttacccattttcatcatctccttaaatttctcgcaaatacagaatcactttgtgtgtttggacttctccagaatatcaaataaataacatattatgtagcttttt

SEQ ID NO: 416310 - DNA, 384 bp, Homo sapiens
gttacccaacacatagtagcactcaaatatttgttgaatgaattataaaaatgactacttgtactgttaattttgtgtattctagtgaattaaatctcttcggcatcatttactcccttaggtatttgactttgtgtcaaatgttttggcaaggataaaattataacagactttcttgaacaaccaaaatataatctattaaggattttccttcacttttgataaaataagaaaaaaggaaattaaaaccttgcatcctaatgtaaaatagaattatatggtgtttaatatcagtgtccctttagctattatattaaactactatagttaataaattttatcattattttgtatgttggtttttaaaaatttcataaagctata

SEQ ID NO: 416311 - DNA, 525 bp, Homo sapiens
ttctcagcactgtgctccttccttagcacccggctgctcatattactccacgactccacaccctccaccgcccgtaacatggggcaaaacgatcccagccccttgctccacacagggccattatgaacatcacgtgaaataagagataagcaaacctccaaaacgattcatacatttttggaaattttttatcctaaaggtatttttttttctttctttctccactcagagaaagacaagaaatcatttacttttgataaattatttcacggccatttcccccatgacttcatattcttaaaattctgattcactaaatatcaatttaaaaattcctaattccttgacatacaagtaaagtaaagtagaaatcaaaatgtaaaatttgtaagaaacctcttcatatagtcacattcctcaatttggtgttcctattttctataatcaaaggaagaaacagagaagagccaaccctatctggaaaattattatagtcaaatgaacaacagcccagcctaccacaaa

SEQ ID NO: 416312 - DNA, 508 bp, Homo sapiens
  misc_feature (15)..(15): n is a, c, g, or t
  misc_feature (49)..(49): n is a, c, g, or t
  misc_feature (79)..(79): n is a, c, g, or t
  misc_feature (108)..(108): n is a, c, g, or t
  misc_feature (115)..(115): n is a, c, g, or t
  misc_feature (126)..(126): n is a, c, g, or t
aaaaggggggggaanaaaaaattaaccgggggtaccatggagaaaattnggggtaacagaacaggccaaattggtaaanaaacccacatccgggggtaaaacgggaanaccccanccacccttaanccattccatcccccttttgtgttaacaacatttaagttattaagtttatttaatttatttatttgagacggagtcttggctctgttgcccaggctggagtgccagtgacgtgatcttggctcacggcaacctccgtctcccagattcaagcaattctcctgccccagctaatatatggagtggaaagcctagatttatctactgggttcttttcctgtcagcagttcaacatgtgtagtagctttcagtctctgctgtttgtgccaaatatataagaaataaaatcagataacttttttgtaattggatcatacacagttgggctcttctgtttaagttttccttctgtaaaagttatttttgagaataccttaagtttaag

SEQ ID NO: 416313 - DNA, 1363 bp, Homo sapiens
tagttttaaagataatttattggtcacatacaacaaaatagaattgtgaagtccattatagggctctgagcctgatttaaggtcacagaaaaaagaatttgagtctgtttctcagatctagaattatcaaatataaggaacttctcggcaaaacagggtgccactttcagctgacaaacttgtgggtgagaataaagaaaagtgagtctttaggtagataaagttgtcactcataatggtgtgtaacagtagaaaccttactttaccatctccacggatatgaggatatatgatcttcatggtgtgaacgtctaacttggctgagacaagctatcagtaaaagaaccaagatatagtgaagaatgaggatttcagagccaggagaaatcagtattgttttatttggaaataaatcatctatatttatatgagtaaacattggtattttcatgtaacaatactggtatgcaataagtggtgtaatatgagttgttatggactgaatgtttatgtccctcccaaaactaattatgttaaaatcctcaccatcaatgtgatgttacttggaaatgaggcatttgggaggcaattaggattagatgaggtcatgagggtggagccctcgtgatgggattagtgcctttataagaagagacatcaggctgagcccggtggctcatgcctgtaatcccagcactttgggaggccaaggcgagtggatcatgaggtcaggagattgagacaatcctggctaacacggtgaaaccccgtctccactgaaaaaaaatacaaaaaattagccaggcacagtggcatgtgcctgtagtcccagctactcgggaggctgaaggagaagaatcgcttgaacccaggaggcggaggttgcagtgagccaggatcacgccactgtactccaccctgggcgacagagcgagactacgtctcaaaaagacatcagaaagcctgcttgctctctgcaccatgtgaggatgcaggaagaagccagctgtctacagaacaggaagagaaccctacgagaacctaaccatgctggcgacctgttctcagacttccagacttcagaactgtgagaagtaaattgttgtttaagccacccagtctatgatgttttgttatggcagccccagctaatatatggagtggaaagcctagatttatctactgggttcttttcctgtcagcagttcaacatgtgtagtagctttcagtctctgctgtttgtgccaaatatataagaaataaaatcagataacttttttgtaattggatcatacacagttgggctcttctgtttaagttttccttctgtaaaagttatttttgagaataccttaagtttaag

SEQ ID NO: 416314 - DNA, 1819 bp, Homo sapiens
ccgaccttaccccaggcggccttgacgttggtcttgtcggcaggagacagcaccatggtgggttctctctgagtctgggaattcccgagcccgagccgcagccgccgcctggggcgcttgggtcggcctcgaggacaccggagaggggcgccacgccgccgtggccgcagaaatgaccatggttgacacagagatgccattctggcccaccaactttgggatcagctccgtggatctctccgtaatggaagaccactcccactcctttgatatcaagcccttcactactgttgacttctccagcatttctactccacattacgaagacattccattcacaagaacagatccagtggttgcagattacaagtatgacctgaaacttcaagagtaccaaagtgcaatcaaagtggagcctgcatctccaccttattattctgagaagactcagctctacaataagcctcatgaagagccttccaactccctcatggcaattgaatgtcgtgtctgtggagataaagcttctggatttcactatggagttcatgcttgtgaaggatgcaagggtttcttccggagaacaatcagattgaagcttatctatgacagatgtgatcttaactgtcggatccacaaaaaaagtagaaataaatgtcagtactgtcggtttcagaaatgccttgcagtggggatgtctcataatgccatcaggtttgggcggatgccacaggccgagaaggagaagctgttggcggagatctccagtgatatcgaccagctgaatccagagtccgctgacctccgggccctggcaaaacatttgtatgactcatacataaagtccttcccgctgaccaaagcaaaggcgagggcgatcttgacaggaaagacaacagacaaatcaccattcgttatctatgacatgaattccttaatgatgggagaagataaaatcaagttcaaacacatcacccccctgcaggagcagagcaaagaggtggccatccgcatctttcagggctgccagtttcgctccgtggaggctgtgcaggagatcacagagtatgccaaaagcattcctggttttgtaaatcttgacttgaacgaccaagtaactctcctcaaatatggagtccacgagatcatttacacaatgctggcctccttgatgaataaagatggggttctcatatccgagggccaaggcttcatgacaagggagtttctaaagagcctgcgaaagccttttggtgactttatggagcccaagtttgagtttgctgtgaagttcaatgcactggaattagatgacagcgacttggcaatatttattgctgtcattattctcagtggagaccgcccaggtttgctgaatgtgaagcccattgaagacattcaagacaacctgctacaagccctggagctccagctgaagctgaaccaccctgagtcctcacagctgtttgccaagctgctccagaaaatgacagacctcagacagattgtcacggaacacgtgcagctactgcaggtgatcaagaagacggagacagacatgagtcttcacccgctcctgcaggagatctacaaggacttgtactagcagagagtcctgagccactgccaacatttcccttcttccagttgcactattctgagggaaaatctgacacctaagaaatttactgtgaaaaagcattttaaaaagaaaaggttttagaatatgatctattttatgcatattgtttataaagacacatttacaatttacttttaatattaaaaattaccatattatgaaattgctgatagtatt

SEQ ID NO: 416315 - DNA, 1927 bp, Homo sapiens
ggtcccttggtggaaggtgggtgtgtagtcgtggtactttacgcctcggtgtttagggaggagcctaaggtaaggagtcagaaacggggagtaaccgagctgcggcttttatataaggtcagtggtaggtaaggaaggggccttaacctctgctggtgaccagaagcctgcatttctgcattctgcttaattccctttccttagatttgaaagaagccaacactaaaccacaaatatacaacaaggccattttctcaaacgagagtcagcctttaacgaaatgaccatggttgacacagagatgccattctggcccaccaactttgggatcagctccgtggatctctccgtaatggaagaccactcccactcctttgatatcaagcccttcactactgttgacttctccagcatttctactccacattacgaagacattccattcacaagaacagatccagtggttgcagattacaagtatgacctgaaacttcaagagtaccaaagtgcaatcaaagtggagcctgcatctccaccttattattctgagaagactcagctctacaataagcctcatgaagagccttccaactccctcatggcaattgaatgtcgtgtctgtggagataaagcttctggatttcactatggagttcatgcttgtgaaggatgcaagggtttcttccggagaacaatcagattgaagcttatctatgacagatgtgatcttaactgtcggatccacaaaaaaagtagaaataaatgtcagtactgtcggtttcagaaatgccttgcagtggggatgtctcataatgccatcaggtttgggcggatgccacaggccgagaaggagaagctgttggcggagatctccagtgatatcgaccagctgaatccagagtccgctgacctccgggccctggcaaaacatttgtatgactcatacataaagtccttcccgctgaccaaagcaaaggcgagggcgatcttgacaggaaagacaacagacaaatcaccattcgttatctatgacatgaattccttaatgatgggagaagataaaatcaagttcaaacacatcacccccctgcaggagcagagcaaagaggtggccatccgcatctttcagggctgccagtttcgctccgtggaggctgtgcaggagatcacagagtatgccaaaagcattcctggttttgtaaatcttgacttgaacgaccaagtaactctcctcaaatatggagtccacgagatcatttacacaatgctggcctccttgatgaataaagatggggttctcatatccgagggccaaggcttcatgacaagggagtttctaaagagcctgcgaaagccttttggtgactttatggagcccaagtttgagtttgctgtgaagttcaatgcactggaattagatgacagcgacttggcaatatttattgctgtcattattctcagtggagaccgcccaggtttgctgaatgtgaagcccattgaagacattcaagacaacctgctacaagccctggagctccagctgaagctgaaccaccctgagtcctcacagctgtttgccaagctgctccagaaaatgacagacctcagacagattgtcacggaacacgtgcagctactgcaggtgatcaagaagacggagacagacatgagtcttcacccgctcctgcaggagatctacaaggacttgtactagcagagagtcctgagccactgccaacatttcccttcttccagttgcactattctgagggaaaatctgacacctaagaaatttactgtgaaaaagcattttaaaaagaaaaggttttagaatatgatctattttatgcatattgtttataaagacacatttacaatttacttttaatattaaaaattaccatattatgaaattgctgatagtatt

SEQ ID NO: 416316 - DNA, 1890 bp, Homo sapiens
gccagaaccaccgcacgatgttgctgtcggccacacagtgcttcagcagcgtgttcgacttccagtcgttcaagtctttttcttttaacggattgatcttttgctagatagagacaaaatatcagtgtgaattacagcaaacccctattccatgctgttatgggtgaaactctgggagattctcctattgacccagaaagcgattccttcactgatacactgtctgcaaacatatcacaagaaatgaccatggttgacacagagatgccattctggcccaccaactttgggatcagctccgtggatctctccgtaatggaagaccactcccactcctttgatatcaagcccttcactactgttgacttctccagcatttctactccacattacgaagacattccattcacaagaacagatccagtggttgcagattacaagtatgacctgaaacttcaagagtaccaaagtgcaatcaaagtggagcctgcatctccaccttattattctgagaagactcagctctacaataagcctcatgaagagccttccaactccctcatggcaattgaatgtcgtgtctgtggagataaagcttctggatttcactatggagttcatgcttgtgaaggatgcaagggtttcttccggagaacaatcagattgaagcttatctatgacagatgtgatcttaactgtcggatccacaaaaaaagtagaaataaatgtcagtactgtcggtttcagaaatgccttgcagtggggatgtctcataatgccatcaggtttgggcggatgccacaggccgagaaggagaagctgttggcggagatctccagtgatatcgaccagctgaatccagagtccgctgacctccgggccctggcaaaacatttgtatgactcatacataaagtccttcccgctgaccaaagcaaaggcgagggcgatcttgacaggaaagacaacagacaaatcaccattcgttatctatgacatgaattccttaatgatgggagaagataaaatcaagttcaaacacatcacccccctgcaggagcagagcaaagaggtggccatccgcatctttcagggctgccagtttcgctccgtggaggctgtgcaggagatcacagagtatgccaaaagcattcctggttttgtaaatcttgacttgaacgaccaagtaactctcctcaaatatggagtccacgagatcatttacacaatgctggcctccttgatgaataaagatggggttctcatatccgagggccaaggcttcatgacaagggagtttctaaagagcctgcgaaagccttttggtgactttatggagcccaagtttgagtttgctgtgaagttcaatgcactggaattagatgacagcgacttggcaatatttattgctgtcattattctcagtggagaccgcccaggtttgctgaatgtgaagcccattgaagacattcaagacaacctgctacaagccctggagctccagctgaagctgaaccaccctgagtcctcacagctgtttgccaagctgctccagaaaatgacagacctcagacagattgtcacggaacacgtgcagctactgcaggtgatcaagaagacggagacagacatgagtcttcacccgctcctgcaggagatctacaaggacttgtactagcagagagtcctgagccactgccaacatttcccttcttccagttgcactattctgagggaaaatctgacacctaagaaatttactgtgaaaaagcattttaaaaagaaaaggttttagaatatgatctattttatgcatattgtttataaagacacatttacaatttacttttaatattaaaaattaccatattatgaaattgctgatagtatt

SEQ ID NO: 416317 - DNA, 1858 bp, Homo sapiens
gtcttgactcatgggtgtattcacaaattctgttacttcaagtctttttcttttaacggattgatcttttgctagatagagacaaaatatcagtgtgaattacagcaaacccctattccatgctgttatgggtgaaactctgggagattctcctattgacccagaaagcgattccttcactgatacactgtctgcaaacatatcacaagaaatgaccatggttgacacagagatgccattctggcccaccaactttgggatcagctccgtggatctctccgtaatggaagaccactcccactcctttgatatcaagcccttcactactgttgacttctccagcatttctactccacattacgaagacattccattcacaagaacagatccagtggttgcagattacaagtatgacctgaaacttcaagagtaccaaagtgcaatcaaagtggagcctgcatctccaccttattattctgagaagactcagctctacaataagcctcatgaagagccttccaactccctcatggcaattgaatgtcgtgtctgtggagataaagcttctggatttcactatggagttcatgcttgtgaaggatgcaagggtttcttccggagaacaatcagattgaagcttatctatgacagatgtgatcttaactgtcggatccacaaaaaaagtagaaataaatgtcagtactgtcggtttcagaaatgccttgcagtggggatgtctcataatgccatcaggtttgggcggatgccacaggccgagaaggagaagctgttggcggagatctccagtgatatcgaccagctgaatccagagtccgctgacctccgggccctggcaaaacatttgtatgactcatacataaagtccttcccgctgaccaaagcaaaggcgagggcgatcttgacaggaaagacaacagacaaatcaccattcgttatctatgacatgaattccttaatgatgggagaagataaaatcaagttcaaacacatcacccccctgcaggagcagagcaaagaggtggccatccgcatctttcagggctgccagtttcgctccgtggaggctgtgcaggagatcacagagtatgccaaaagcattcctggttttgtaaatcttgacttgaacgaccaagtaactctcctcaaatatggagtccacgagatcatttacacaatgctggcctccttgatgaataaagatggggttctcatatccgagggccaaggcttcatgacaagggagtttctaaagagcctgcgaaagccttttggtgactttatggagcccaagtttgagtttgctgtgaagttcaatgcactggaattagatgacagcgacttggcaatatttattgctgtcattattctcagtggagaccgcccaggtttgctgaatgtgaagcccattgaagacattcaagacaacctgctacaagccctggagctccagctgaagctgaaccaccctgagtcctcacagctgtttgccaagctgctccagaaaatgacagacctcagacagattgtcacggaacacgtgcagctactgcaggtgatcaagaagacggagacagacatgagtcttcacccgctcctgcaggagatctacaaggacttgtactagcagagagtcctgagccactgccaacatttcccttcttccagttgcactattctgagggaaaatctgacacctaagaaatttactgtgaaaaagcattttaaaaagaaaaggttttagaatatgatctattttatgcatattgtttataaagacacatttacaatttacttttaatattaaaaattaccatattatgaaattgctgatagtatt

SEQ ID NO: 416318 - DNA, 1804 bp, Homo sapiens
cccgcgccgggcccggctcggcccgacccggctccgccgcgggcaggcggggcccagcgcactcggagcccgagcccgagccgcagccgccgcctggggcgcttgggtcggcctcgaggacaccggagaggggcgccacgccgccgtggccgcagaaatgaccatggttgacacagagatgccattctggcccaccaactttgggatcagctccgtggatctctccgtaatggaagaccactcccactcctttgatatcaagcccttcactactgttgacttctccagcatttctactccacattacgaagacattccattcacaagaacagatccagtggttgcagattacaagtatgacctgaaacttcaagagtaccaaagtgcaatcaaagtggagcctgcatctccaccttattattctgagaagactcagctctacaataagcctcatgaagagccttccaactccctcatggcaattgaatgtcgtgtctgtggagataaagcttctggatttcactatggagttcatgcttgtgaaggatgcaagggtttcttccggagaacaatcagattgaagcttatctatgacagatgtgatcttaactgtcggatccacaaaaaaagtagaaataaatgtcagtactgtcggtttcagaaatgccttgcagtggggatgtctcataatgccatcaggtttgggcggatgccacaggccgagaaggagaagctgttggcggagatctccagtgatatcgaccagctgaatccagagtccgctgacctccgggccctggcaaaacatttgtatgactcatacataaagtccttcccgctgaccaaagcaaaggcgagggcgatcttgacaggaaagacaacagacaaatcaccattcgttatctatgacatgaattccttaatgatgggagaagataaaatcaagttcaaacacatcacccccctgcaggagcagagcaaagaggtggccatccgcatctttcagggctgccagtttcgctccgtggaggctgtgcaggagatcacagagtatgccaaaagcattcctggttttgtaaatcttgacttgaacgaccaagtaactctcctcaaatatggagtccacgagatcatttacacaatgctggcctccttgatgaataaagatggggttctcatatccgagggccaaggcttcatgacaagggagtttctaaagagcctgcgaaagccttttggtgactttatggagcccaagtttgagtttgctgtgaagttcaatgcactggaattagatgacagcgacttggcaatatttattgctgtcattattctcagtggagaccgcccaggtttgctgaatgtgaagcccattgaagacattcaagacaacctgctacaagccctggagctccagctgaagctgaaccaccctgagtcctcacagctgtttgccaagctgctccagaaaatgacagacctcagacagattgtcacggaacacgtgcagctactgcaggtgatcaagaagacggagacagacatgagtcttcacccgctcctgcaggagatctacaaggacttgtactagcagagagtcctgagccactgccaacatttcccttcttccagttgcactattctgagggaaaatctgacacctaagaaatttactgtgaaaaagcattttaaaaagaaaaggttttagaatatgatctattttatgcatattgtttataaagacacatttacaatttacttttaatattaaaaattaccatattatgaaattgctgatagtatt

SEQ ID NO: 416319 - DNA, 1878 bp, Homo sapiens
cccgcgccgggcccggctcggcccgacccggctccgccgcgggcaggcggggcccagcgcactcggagcccgagcccgagccgcagccgccgcctggggcgcttgggtcggcctcgaggacaccggagaggggcgccacgccgccgtggccgcagatttgaaagaagccaacactaaaccacaaatatacaacaaggccattttctcaaacgagagtcagcctttaacgaaatgaccatggttgacacagagatgccattctggcccaccaactttgggatcagctccgtggatctctccgtaatggaagaccactcccactcctttgatatcaagcccttcactactgttgacttctccagcatttctactccacattacgaagacattccattcacaagaacagatccagtggttgcagattacaagtatgacctgaaacttcaagagtaccaaagtgcaatcaaagtggagcctgcatctccaccttattattctgagaagactcagctctacaataagcctcatgaagagccttccaactccctcatggcaattgaatgtcgtgtctgtggagataaagcttctggatttcactatggagttcatgcttgtgaaggatgcaagggtttcttccggagaacaatcagattgaagcttatctatgacagatgtgatcttaactgtcggatccacaaaaaaagtagaaataaatgtcagtactgtcggtttcagaaatgccttgcagtggggatgtctcataatgccatcaggtttgggcggatgccacaggccgagaaggagaagctgttggcggagatctccagtgatatcgaccagctgaatccagagtccgctgacctccgggccctggcaaaacatttgtatgactcatacataaagtccttcccgctgaccaaagcaaaggcgagggcgatcttgacaggaaagacaacagacaaatcaccattcgttatctatgacatgaattccttaatgatgggagaagataaaatcaagttcaaacacatcacccccctgcaggagcagagcaaagaggtggccatccgcatctttcagggctgccagtttcgctccgtggaggctgtgcaggagatcacagagtatgccaaaagcattcctggttttgtaaatcttgacttgaacgaccaagtaactctcctcaaatatggagtccacgagatcatttacacaatgctggcctccttgatgaataaagatggggttctcatatccgagggccaaggcttcatgacaagggagtttctaaagagcctgcgaaagccttttggtgactttatggagcccaagtttgagtttgctgtgaagttcaatgcactggaattagatgacagcgacttggcaatatttattgctgtcattattctcagtggagaccgcccaggtttgctgaatgtgaagcccattgaagacattcaagacaacctgctacaagccctggagctccagctgaagctgaaccaccctgagtcctcacagctgtttgccaagctgctccagaaaatgacagacctcagacagattgtcacggaacacgtgcagctactgcaggtgatcaagaagacggagacagacatgagtcttcacccgctcctgcaggagatctacaaggacttgtactagcagagagtcctgagccactgccaacatttcccttcttccagttgcactattctgagggaaaatctgacacctaagaaatttactgtgaaaaagcattttaaaaagaaaaggttttagaatatgatctattttatgcatattgtttataaagacacatttacaatttacttttaatattaaaaattaccatattatgaaattgctgatagtatt

SEQ ID NO: 416320 - DNA, 1476 bp, Homo sapiens
ggtcccttggtggaaggtgggtgtgtagtcgtggtactttacgcctcggtgtttagggaggagcctaaggtaaggagtcagaaacggggagtaaccgagctgcggcttttatataaggtcagtggtaggtaaggaaggggccttaacctctgctggtgaccagaagcctgcatttctgcattctgcttaattccctttccttagatttgaaagaagccaacactaaaccacaaatatacaacaaggccattttctcaaacgagagtcagcctttaacgaaatgaccatggttgacacagagatgccattctggcccaccaactttgggatcagctccgtggatctctccgtaatggaagaccactcccactcctttgatatcaagcccttcactactgttgacttctccagcatttctactccacattacgaagacattccattcacaagaacagatccagtggttgcagattacaagtatgacctgaaacttcaagagtaccaaagtgcaatcaaagtggagcctgcatctccaccttattattctgagaagactcagctctacaataagcctcatgaagagccttccaactccctcatggcaattgaatgtcgtgtctgtggagataaagcttctggatttcactatggagttcatgcttgtgaaggatgcaagggtttcttccggagaacaatcagattgaagcttatctatgacagatgtgatcttaactgtcggatccacaaaaaaagtagaaataaatgtcagtactgtcggtttcagaaatgccttgcagtggggatgtctcataatgccatcaggtttgggcggatgccacaggccgagaaggagaagctgttggcggagatctccagtgatatcgaccagctgaatccagagtccgctgacctccgggccctggcaaaacatttgtatgactcatacataaagtccttcccgctgaccaaagcaaaggcgagggcgatcttgacaggaaagacaacagacaaatcaaccgcccaggtttgctgaatgtgaagcccattgaagacattcaagacaacctgctacaagccctggagctccagctgaagctgaaccaccctgagtcctcacagctgtttgccaagctgctccagaaaatgacagacctcagacagattgtcacggaacacgtgcagctactgcaggtgatcaagaagacggagacagacatgagtcttcacccgctcctgcaggagatctacaaggacttgtactagcagagagtcctgagccactgccaacatttcccttcttccagttgcactattctgagggaaaatctgacacctaagaaatttactgtgaaaaagcattttaaaaagaaaaggttttagaatatgatctattttatgcatattgtttataaagacacatttacaatttacttttaatattaaaaattaccatattatgaaattgctgatagtatt

SEQ ID NO: 416321 - DNA, 1364 bp, Homo sapiens
ggtcccttggtggaaggtgggtgtgtagtcgtggtactttacgcctcggtgtttagggaggagcctaaggtaaggagtcagaaacggggagtaaccgagctgcggcttttatataaggtcagtggtaggtaaggaaggggccttaacctctgctggtgaccagaagcctgcatttctgcattctgcttaattccctttccttagatttgaaagaagccaacactaaaccacaaatatacaacaaggccattttctcaaacgagagtcagcctttaacgaaatgaccatggttgacacagagatgccattctggcccaccaactttgggatcagctccgtggatctctccgtaatggaagaccactcccactcctttgatatcaagcccttcactactgttgacttctccagcatttctactccacattacgaagacattccattcacaagaacagatccagtggttgcagattacaagtatgacctgaaacttcaagagtaccaaagtgcaatcaaagtggagcctgcatctccaccttattattctgagaagactcagctctacaataagcctcatgaagagccttccaactccctcatggcaattgaatgtcgtgtctgtggagataaagcttctggatttcactatggagttcatgcttgtgaaggatgcaagggtttcttccggagaacaatcagattgaagcttatctatgacagatgtgatcttaactgtcggatccacaaaaaaagtagaaataaatgtcagtactgtcggtttcagaaatgccttgcagtggggatgtctcataatgccatcaggtttgggcggatgccacaggccgagaaggagaagctgttggcggagatctccagtgatatcgaccagctgaatccagagtccgctgacctccgggccctggcaaaacatttgtatgactcatacataaagtccttcccgctgaccaaagcaaaggcgagggcgatcttgacaggaaagacaacagacaaatcagttagttctcttctgctgtcttcattgggggaggcgggaagttgttttgggtttttgtttctttgagtaaatggtttactgcgctacaaatgcacacacagaatattgttcaactgttggctgttaacatattgcaggctgagtctgaaacgcaggaagtgttttcagatagcacaagtcaacattattttgaaaagggagaaaagtccataaagtttttgagaatagtgtaacaatgtattggtcatcctaactttaatgaatgaacttaagccccctgagcctatcaccctcttttaggatccatctcctttctcggcatcaaaataactggccacagcaatattca

SEQ ID NO: 416322 - DNA, 338 bp, Homo sapiens
catatgcaacccactgcagtaccacatcatgatgtccaagaaactctgcattcagatgaccacaggggccttcatagctggaaacctgcattccatgattcatgtagggcttgtatttaggttagttttctgtggatcgaatcacatcaaccacttttactgtgatattcttcccttgtatagactctcttgtgttgatccttatatcaatgaactggttctattcatcttctcaggttcagttcaagtctttaccataggtagtgtcttaatatcttatctctatattcttcttactattttcaaaatgaaatccaaagagggaagggccaaagctt

SEQ ID NO: 416323 - DNA, 2995 bp, Homo sapiens
  misc_feature (2915)..(2915): n is a, c, g, or t
agcagtacggcgggaggcactagagggagctgcggccgctccggcccggccccgagcaccgcctccccagccagcgccgccgcgatggcggaggacagcgagtctgcggccagccagcagagcctggaactggacgaccaggacacgtgcgggatagacggggacaatgaggaggagacggagcacgccaaaggaagtcctggagggtatttgggagccaaaaagaaaaagaagaaacagaagagaaaaaaggagaaaccaaattccggaggcaccaagtcagactcggcatctgattcccaggagattaaaattcagcagccttcgaaaaatcccagtgttccaatgcagaagttgcaggatatccagagagcaatggagctgctatccgcatgccagggcccagccaggaacattgatgaggctgcaaagcacagataccagttttgggacacacaaccggtaccaaaactagatgaagtcataacatctcatggtgcaattgaaccagataaagacaacgtacgccaagaaccgtattctttgccacagggttttatgtgggacactttagacttgagtgatgccgaagtgctcaaggagttatacacgttgttaaatgagaattacgtagaagatgatgacaatatgttccgatttgactattcacccgagttcctgttgtgggctctgcgtccaccaggctggctcctgcagtggcactgtggggtcagagtgtcttcaaataaaaaactggtcgggttcataagtgccatcccagcaaacattcggatttatgacagtgtgaagaagatggtagaaatcaactttctttgtgttcataagaagttgagatcgaaacgggtagccccagtgctaatccgagagatcactagaagagtgaacctggaagggatcttccaggctgtgtacaccgcgggagtggttcttcctaagcccatagccacatgcagatactggcatcgatcactaaaccccagaaaattggtagaagtgaaattttctcacttgagtagaaatatgactttacagagaacaatgaagctatacagacttccagatgttacaaagacttcaggtttgagaccaatggaaccaaaagatatcaaatcagttcgagaattaatcaacacttacctgaagcagtttcatctggctccagtgatggatgaagaggaagtagcccactggttcctcccccgggagcacattattgacacgtttgtagtggagagccccaacggtaaactgactgatttcctgagcttctatacgctcccctccacggtgatgcaccaccctgctcacaagagcctcaaagccgcctactcattctacaacatccacacagagacgcccctgctggacctcatgagcgacgcgctcatcctggctaaatcgaaaggatttgatgtattcaatgcactggatttgatggaaaataagacattcttggaaaaactcaagtttggtataggagatggcaatttgcagtattacctgtacaattggaggtgtccaggtacagattctgaaaaggttggactagtactacaatagatggatatttttatttctagaactctgacatcatcatttgttaatatttaatgatttctggaactgccattccaaagaagaataaaagcacaactcaagtgaaattgaagtagtcgataatcagaaaagatgacaaaagtccacatgtgacatttgtacgtttctagctagaatgttaaacttcatcctttttttactgttgacctatttgtgggagggatgaaaggctacaaagagcacattcttgtaattttcaaatttttgcctgtctcttgaagaggtattttttcacccttagaaaagggactgtttttctatggactaagtagaagttacagagtcatgtaagaaaatctttgctattgtgtggagagaaattgctgcatttctgtttcttaagtgatggtacatttgtccatgtaacagaacaaaagatccatttggaaattttttttactggtatcaccttacatggtatcactgggaacatttatggaatcaacacttctgtagctcagtgacaggtggtggttgtttaagtgcagagcaatattaaaatgtactggtgactagtacatgtatttctccataagcagagttgccgaatcaataaacatgcaagtttgtactttgatctttaccaggtcagtggattgcttcaaaagcagagttttgtgcaagcactcactgtgctctctgaaagagcctgaggccgggcgtggtggctcacgcctgtaatcccagcactttgggaggccaaggtgggcagatcatgaggtcaggagatcgagaccattctggccaacatagtgaaaccccatctctactaaaaatacaaaaattagccgggcgtggtggcgtgtgcctgtagtcccagctgcttgggaggctgaggcaggagaatcgcttgaacctgagaggtgaggttgcagtgagccgagatcgagccactgcactccagcctgggtgacagagcgtgagactccgtctcaaaaaaaaaaaaaaaagaaagagcctgtacccgcgactaactagacttttctgctgttgtgcaaagttcagtttcttctcagcaacatcaaggatatatgaagaaaaggaaataaaaaactgtaaagtcaaaagagatgcctggtggaacttattcgtgctatcagggcattgatagtttgaatgtttttattacttatgcaaaattgcacatactcctctatgctgattttatcatgaaaactgtcatgtgtcatgctaatggaaaatgtcttatttgtaaataagtattcataattttgttactgatggtgtttttaatctagaatttgaaaaactttcanggcttacagatgtgtgtttatattgccaataatctgcgggaaaaataagatgctaaccgaggccacgtagcctggcctca

SEQ ID NO: 416324 - DNA, 867 bp, Homo sapiens
caacgatggtcctcagtcacgatggtcctcagctcaacgatggtcctcagctccaacgatggtcctcagctctcctcagtttttttaatcttttggccacatttcatccaattaccatcataccttttatacgttagatttccaaggaggtaagtgaatcacgtaatgggggtgaactgtacccagtcaaaataaccttatctgactttttctatatttttgatattttttctctaaatattaagtctttctcccaagctcatgtctattccttcctaaaagtcaaattgacatgaagtgaaaaatgatgtgttgcttctgaagacaatggattgcttggcatttgggatctttcctttaaaactgataatgcttccccaattcagttccatctacctgactgactagaacatttactgtggtacattttccaggtttgataggaaaatgctaagcgttgtatgacacagatattcttgctcacaggcactctaccagcctttgaaaaagtcaatttaggctggacgcggctgctcacgtctgtcatctcagcactttgggaggacaaggcaggtggatcacgaggtcagttcgagaccagcctgaccaacatggtgaaaccccatctctactaaaaatacaaaaaaatgagctgggtgtggtggtgggcacctgcaatcccagctactcaggcggctgagacaggagaatcgttgaatctgggtggtggagggtgcagtgagccgagattgcgccgctgcactcctgccttggcgacagaacgaaactctgtctcaaaaaaaaaaaaaaaaaggccaggcacggtggctcgcagctgtaatcctagcactttgggaggctgacgtg

SEQ ID NO: 416325 - DNA, 539 bp, Homo sapiens
tactactaaattcacggccgcgtcgacctttaaaactgataatgcttccccaattcagttccatctacctgactgactagaacatttactgtggtacattttccaggtttgataggaaaatgctaagcgttgtatgacacagatattcttgctcacaggcactctaccagcctttgaaaaagtcaatttaggctggacgcggctgctcacgtctgtcatctcagcactttgggaggacaaggcaggtggatcacgaggtcagttcgagaccagcctgaccaacatggtgaaaccccatctctactaaaaatacaaaaaaatgagctgggtgtggtggtgggcacctgcaatcccagctactcaggcggctgagacaggagaatcgttgaatctgggtggtggagggtgcagtgagccgagattgcgccgctgcactcctgccttggcgacagaacgaaactctgtctcaaaaaaaaaaaaaaaaaggccaggcacggtggctcgcagctgtaatcctagcactttgggaggctgacgtg

SEQ ID NO: 416326 - DNA, 329 bp, Homo sapiens
gggccccgtgttggcagatggtggccaagaagagggttgattgtactgcgtgggtgtctggtggcacagatggcagccatccctgtctgtggagccaacccccaggcaccctgtatgctgggcctctgggaaacacaaagccctcttgatgcaagaaactcacagtgaaaagggtagaaccagccaggcacggtggctcacgcctgtagtcccagcactttgggaggccgaggtgggaggatccattgagcccaggagttcaaggctgcagtgagttatgatcacaccactgcacttcatcctggacaacagtgagagaccctggctga

SEQ ID NO: 416327 - DNA, 3604 bp, Homo sapiens
  misc_feature (2411)..(2411): n is a, c, g, or t
agcagtacggcgggaggcactagagggagctgcggccgctccggcccggccccgagcaccgcctccccagccagcgccgccgcgatggcggaggacagcgagtctgcggccagccagcagagcctggaactggacgaccaggacacgtgcgggatagacggggacaatgaggaggagacggagcacgccaaaggaagtcctggagggtatttgggagccaaaaagaaaaagaagaaacagaagagaaaaaaggagaaaccaaattccggaggcaccaagtcagactcggcatctgattcccaggagattaaaattcagcagccttcgaaaaatcccagtgttccaatgcagaagttgcaggatatccagagagcaatggagctgctatccgcatgccagggcccagccaggaacattgatgaggctgcaaagcacagataccagttttgggacacacaaccggtaccaaaactagatgaagtcataacatctcatggtgcaattgaaccagataaagacaacgtacgccaagaaccgtattctttgccacagggttttatgtgggacactttagacttgagtgatgccgaagtgctcaaggagttatacacgttgttaaatgagaattacgtagaagatgatgacaatatgttccgatttgactattcacccgagttcctgttgtgggctctgcgtccaccaggctggctcctgcagtggcactgtggggtcagagtgtcttcaaataaaaaactggtcgggttcataagtgccatcccagcaaacattcggatttatgacagtgtgaagaagatggtagaaatcaactttctttgtgttcataagaagttgagatcgaaacgggtagccccagtgctaatccgagagatcactagaagagtgaacctggaagggatcttccaggctgtgtacaccgcgggagtggttcttcctaagcccatagccacatgcagatactggcatcgatcactaaaccccagaaaattggtagaagtgaaattttctcacttgagtagaaatatgactttacagagaacaatgaagctatacagacttccagatgttacaaagacttcaggtttgagaccaatggaaccaaaagatatcaaatcagttcgagaattaatcaacacttacctgaagcagtttcatctggctccagtgatggatgaagaggaagtagcccactggttcctcccccgggagcacattattgacacgtttgtagtggagagccccaacggtaaactgactgatttcctgagcttctatacgctcccctccacggtgatgcaccaccctgctcacaagagcctcaaagccgcctactcattctacaacatccacacagagacgcccctgctggacctcatgagcgacgcgctcatcctggctaaatcgaaaggatttgatgtattcaatgcactggatttgatggaaaataagacattcttggaaaaactcaagtttggtataggagatggcaatttgcagtattacctgtacaattggaggtgtccaggtacagattctgaaaagaaagtttgttgaccttggtcactacgaaggagttggaactctcctttctataggttgccgtgattctaaagaccaacccacagctgtgacatccctgagactaccaccagagggcgactgggccccacagtagtacataatataggacctctcttggagataatggaagacttggaatttcagatggttccaccctaattgcattagcgttctttcttaacaggagaaaggcttcaagaaacaaaacagtcctcattcactggaacagggtttgagataccagcattaagtaaatgagattttgacttaacctggagtcaaggctctaatttaggactttacttcccactcattttcatgccacaaagtctatacaaagtaggttttcaaataattgcagaatcagccaggcacggtggctcacacctgtaatccctgcactttgggaggccaaggtgagcagatcacttgaggtcaggagtcttgagaccagcctggccaacatggtgaagccctatctctactaaaattacaaaaactagccggacatgggggtgtgcacctgtaatcccagctattcaggaggctgaggcaggagaatcgcttgaacccaggaggcggggttgcagtgagccgggatcacaccactgcactccagcctgggcaacagagtgagactctatctcgaaagtaaaataaataactgcagcattgccagttggaaactttgtcatgagcttacctcacggtgacagttacactgctcctttaaagagtcatttacataatttgttatcaaattattaaccacttttaaatagaataataactacatttgcctccataattgnagcagattactaattaacattttcgagaattaaactgcttgcttatgaagtagctattaaaactaaattgaaatgcaatggatagtttcttgtagatttaaaactgcattgtactgtactttgtctataatgaaaatgttctattcaataaggtatctttttttcttctttttggccaagatggcactaagtaaaatttaaatcgagagatggcataatccatgagtcagccagactttcagctggaaaaatctttagtaaataccttccttctaaattacagaaagtaacttttccatacacactgtaaacagcagacactctaacagagcatcggttatgctccatctcctaacctgaaggactcttgtcacacacccacctctgagaacccaagctcctcagtttttttaatcttttggccacatttcatccaattaccatcataccttttatacgttagatttccaaggaggtaagtgaatcacgtaatgggggtgaactgtacccagtcaaaataaccttatctgactttttctatatttttgatattttttctctaaatattaagtctttctcccaagctcatgtctattccttcctaaaagtcaaattgacatgaagtgaaaaatgatgtgttgcttctgaagacaatggattgcttggcatttgggatctttcctttaaaactgataatgcttccccaattcagttccatctacctgactgactagaacatttactgtggtacattttccaggtttgataggaaaatgctaagcgttgtatgacacagatattcttgctcacaggcactctaccagcctttgaaaaagtcaatttaggctggacgcggctgctcacgtctgtcatctcagcactttgggaggacaaggcaggtggatcacgaggtcagttcgagaccagcctgaccaacatggtgaaaccccatctctactaaaaatacaaaaaaatgagctgggtgtggtggtgggcacctgcaatcccagctactcaggcggctgagacaggagaatcgttgaatctgggtggtggagggtgcagtgagccgagattgcgccgctgcactcctgccttggcgacagaacgaaactctgtctcaaaaaaaaaaaaaaaaaggccaggcacggtggctcgcagctgtaatcctagcactttgggaggctgacgtg

SEQ ID NO: 416328 - DNA, 3038 bp, Homo sapiens
  misc_feature (2958)..(2958): n is a, c, g, or t
agcagtacggcgggaggcactagagggagctgcggccgctccggcccggccccgagcaccgcctccccagccagcgccgccgcgatggcggaggacagcgagtctgcggccagccagcagagcctggaactggacgaccaggacacgtgcgggatagacggggacaatgaggaggagacggagcacgccaaaggaagtcctggagggtatttgggagccaaaaagaaaaagaagaaacagaagagaaaaaaggagaaaccaaattccggaggcaccaagtcagactcggcatctgattcccaggagattaaaattcagcagccttcgaaacacaacaccatctggcagcagatttcagcgggagcagccatggaatcccagtgttccaatgcagaagttgcaggatatccagagagcaatggagctgctatccgcatgccagggcccagccaggaacattgatgaggctgcaaagcacagataccagttttgggacacacaaccggtaccaaaactagatgaagtcataacatctcatggtgcaattgaaccagataaagacaacgtacgccaagaaccgtattctttgccacagggttttatgtgggacactttagacttgagtgatgccgaagtgctcaaggagttatacacgttgttaaatgagaattacgtagaagatgatgacaatatgttccgatttgactattcacccgagttcctgttgtgggctctgcgtccaccaggctggctcctgcagtggcactgtggggtcagagtgtcttcaaataaaaaactggtcgggttcataagtgccatcccagcaaacattcggatttatgacagtgtgaagaagatggtagaaatcaactttctttgtgttcataagaagttgagatcgaaacgggtagccccagtgctaatccgagagatcactagaagagtgaacctggaagggatcttccaggctgtgtacaccgcgggagtggttcttcctaagcccatagccacatgcagatactggcatcgatcactaaaccccagaaaattggtagaagtgaaattttctcacttgagtagaaatatgactttacagagaacaatgaagctatacagacttccagatgttacaaagacttcaggtttgagaccaatggaaccaaaagatatcaaatcagttcgagaattaatcaacacttacctgaagcagtttcatctggctccagtgatggatgaagaggaagtagcccactggttcctcccccgggagcacattattgacacgtttgtagtggagagccccaacggtaaactgactgatttcctgagcttctatacgctcccctccacggtgatgcaccaccctgctcacaagagcctcaaagccgcctactcattctacaacatccacacagagacgcccctgctggacctcatgagcgacgcgctcatcctggctaaatcgaaaggatttgatgtattcaatgcactggatttgatggaaaataagacattcttggaaaaactcaagtttggtataggagatggcaatttgcagtattacctgtacaattggaggtgtccaggtacagattctgaaaaggttggactagtactacaatagatggatatttttatttctagaactctgacatcatcatttgttaatatttaatgatttctggaactgccattccaaagaagaataaaagcacaactcaagtgaaattgaagtagtcgataatcagaaaagatgacaaaagtccacatgtgacatttgtacgtttctagctagaatgttaaacttcatcctttttttactgttgacctatttgtgggagggatgaaaggctacaaagagcacattcttgtaattttcaaatttttgcctgtctcttgaagaggtattttttcacccttagaaaagggactgtttttctatggactaagtagaagttacagagtcatgtaagaaaatctttgctattgtgtggagagaaattgctgcatttctgtttcttaagtgatggtacatttgtccatgtaacagaacaaaagatccatttggaaattttttttactggtatcaccttacatggtatcactgggaacatttatggaatcaacacttctgtagctcagtgacaggtggtggttgtttaagtgcagagcaatattaaaatgtactggtgactagtacatgtatttctccataagcagagttgccgaatcaataaacatgcaagtttgtactttgatctttaccaggtcagtggattgcttcaaaagcagagttttgtgcaagcactcactgtgctctctgaaagagcctgaggccgggcgtggtggctcacgcctgtaatcccagcactttgggaggccaaggtgggcagatcatgaggtcaggagatcgagaccattctggccaacatagtgaaaccccatctctactaaaaatacaaaaattagccgggcgtggtggcgtgtgcctgtagtcccagctgcttgggaggctgaggcaggagaatcgcttgaacctgagaggtgaggttgcagtgagccgagatcgagccactgcactccagcctgggtgacagagcgtgagactccgtctcaaaaaaaaaaaaaaaagaaagagcctgtacccgcgactaactagacttttctgctgttgtgcaaagttcagtttcttctcagcaacatcaaggatatatgaagaaaaggaaataaaaaactgtaaagtcaaaagagatgcctggtggaacttattcgtgctatcagggcattgatagtttgaatgtttttattacttatgcaaaattgcacatactcctctatgctgattttatcatgaaaactgtcatgtgtcatgctaatggaaaatgtcttatttgtaaataagtattcataattttgttactgatggtgtttttaatctagaatttgaaaaactttcanggcttacagatgtgtgtttatattgccaataatctgcgggaaaaataagatgctaaccgaggccacgtagcctggcctca

SEQ ID NO: 416329 - DNA, 3133 bp, Homo sapiens
  misc_feature (3053)..(3053): n is a, c, g, or t
tccctcccctccccttcccttcccttctctgctgtgtttccattctagaagttctttccttcatcccctcgttgctcctgcagagcatttactctgacagtgccccccacccaaggctcgtggctgcctggctgttggatgacagtaatgcatgcactgcacgtctcccccagaggagtaatgccggggaccatttgtagatggatgggaactgaagcaaagcgtgcttcaatttagattccccaaactgccagagccccaataaaactagacaactgttgttacctttaacagagggtttgcttctattttcatgtgtaacacacaagcccatggccttgactgggcttggaggaggattgttagtgtttaggtattgtagtctctgaggcagatgcacgtgcgtctgctcaagtttaacatcagcagccgctctctcatattctgtgtctgtctttgctgtcgtagaatcccagtgttccaatgcagaagttgcaggatatccagagagcaatggagctgctatccgcatgccagggcccagccaggaacattgatgaggctgcaaagcacagataccagttttgggacacacaaccggtaccaaaactagatgaagtcataacatctcatggtgcaattgaaccagataaagacaacgtacgccaagaaccgtattctttgccacagggttttatgtgggacactttagacttgagtgatgccgaagtgctcaaggagttatacacgttgttaaatgagaattacgtagaagatgatgacaatatgttccgatttgactattcacccgagttcctgttgtgggctctgcgtccaccaggctggctcctgcagtggcactgtggggtcagagtgtcttcaaataaaaaactggtcgggttcataagtgccatcccagcaaacattcggatttatgacagtgtgaagaagatggtagaaatcaactttctttgtgttcataagaagttgagatcgaaacgggtagccccagtgctaatccgagagatcactagaagagtgaacctggaagggatcttccaggctgtgtacaccgcgggagtggttcttcctaagcccatagccacatgcagatactggcatcgatcactaaaccccagaaaattggtagaagtgaaattttctcacttgagtagaaatatgactttacagagaacaatgaagctatacagacttccagatgttacaaagacttcaggtttgagaccaatggaaccaaaagatatcaaatcagttcgagaattaatcaacacttacctgaagcagtttcatctggctccagtgatggatgaagaggaagtagcccactggttcctcccccgggagcacattattgacacgtttgtagtggagagccccaacggtaaactgactgatttcctgagcttctatacgctcccctccacggtgatgcaccaccctgctcacaagagcctcaaagccgcctactcattctacaacatccacacagagacgcccctgctggacctcatgagcgacgcgctcatcctggctaaatcgaaaggatttgatgtattcaatgcactggatttgatggaaaataagacattcttggaaaaactcaagtttggtataggagatggcaatttgcagtattacctgtacaattggaggtgtccaggtacagattctgaaaaggttggactagtactacaatagatggatatttttatttctagaactctgacatcatcatttgttaatatttaatgatttctggaactgccattccaaagaagaataaaagcacaactcaagtgaaattgaagtagtcgataatcagaaaagatgacaaaagtccacatgtgacatttgtacgtttctagctagaatgttaaacttcatcctttttttactgttgacctatttgtgggagggatgaaaggctacaaagagcacattcttgtaattttcaaatttttgcctgtctcttgaagaggtattttttcacccttagaaaagggactgtttttctatggactaagtagaagttacagagtcatgtaagaaaatctttgctattgtgtggagagaaattgctgcatttctgtttcttaagtgatggtacatttgtccatgtaacagaacaaaagatccatttggaaattttttttactggtatcaccttacatggtatcactgggaacatttatggaatcaacacttctgtagctcagtgacaggtggtggttgtttaagtgcagagcaatattaaaatgtactggtgactagtacatgtatttctccataagcagagttgccgaatcaataaacatgcaagtttgtactttgatctttaccaggtcagtggattgcttcaaaagcagagttttgtgcaagcactcactgtgctctctgaaagagcctgaggccgggcgtggtggctcacgcctgtaatcccagcactttgggaggccaaggtgggcagatcatgaggtcaggagatcgagaccattctggccaacatagtgaaaccccatctctactaaaaatacaaaaattagccgggcgtggtggcgtgtgcctgtagtcccagctgcttgggaggctgaggcaggagaatcgcttgaacctgagaggtgaggttgcagtgagccgagatcgagccactgcactccagcctgggtgacagagcgtgagactccgtctcaaaaaaaaaaaaaaaagaaagagcctgtacccgcgactaactagacttttctgctgttgtgcaaagttcagtttcttctcagcaacatcaaggatatatgaagaaaaggaaataaaaaactgtaaagtcaaaagagatgcctggtggaacttattcgtgctatcagggcattgatagtttgaatgtttttattacttatgcaaaattgcacatactcctctatgctgattttatcatgaaaactgtcatgtgtcatgctaatggaaaatgtcttatttgtaaataagtattcataattttgttactgatggtgtttttaatctagaatttgaaaaactttcanggcttacagatgtgtgtttatattgccaataatctgcgggaaaaataagatgctaaccgaggccacgtagcctggcctca

SEQ ID NO: 416330 - DNA, 2658 bp, Homo sapiens
agcagtacggcgggaggcactagagggagctgcggccgctccggcccggccccgagcaccgcctccccagccagcgccgccgcgatggcggaggacagcgagtctgcggccagccagcagagcctggaactggacgaccaggacacgtgcgggatagacggggacaatgaggaggagacggagcacgccaaaggaagtcctggagggtatttgggagccaaaaagaaaaagaagaaacagaagagaaaaaaggagaaaccaaattccggaggcaccaagtcagactcggcatctgattcccaggagattaaaattcagcagccttcgaaaaatcccagtgttccaatgcagaagttgcaggatatccagagagcaatggagctgctatccgcatgccagggcccagccaggaacattgatgaggctgcaaagcacagataccagttttgggacacacaaccggtaccaaaactagatgaagtcataacatctcatggtgcaattgaaccagataaagacaacgtacgccaagaaccgtattctttgccacagggttttatgtgggacactttagacttgagtgatgccgaagtgctcaaggagttatacacgttgttaaatgagaattacgtagaagatgatgacaatatgttccgatttgactattcacccgagttcctgttgtgggctctgcgtccaccaggctggctcctgcagtggcactgtggggtcagagtgtcttcaaataaaaaactggtcgggttcataagtgccatcccagcaaacattcggatttatgacagtgtgaagaagatggtagaaatcaactttctttgtgttcataagaagttgagatcgaaacgggtagccccagtgctaatccgagagatcactagaagagtgaacctggaagggatcttccaggctgtgtacaccgcgggagtggttcttcctaagcccatagccacatgcagatactggcatcgatcactaaaccccagaaaattggtagaagtgaaattttctcacttgagtagaaatatgactttacagagaacaatgaagctatacagacttccagatgttacaaagacttcaggtttgagaccaatggaaccaaaagatatcaaatcagttcgagaattaatcaacacttacctgaagcagtttcatctggctccagtgatggatgaagaggaagtagcccactggttcctcccccgggagcacattattgacacgtttgtagtggagagccccaacggtaaactgactgatttcctgagcttctatacgctcccctccacggtgatgcaccaccctgctcacaagagcctcaaagccgcctactcattctacaacatccacacagagacgcccctgctggacctcatgagcgacgcgctcatcctggctaaatcgaaaggatttgatgtattcaatgcactggatttgatggaaaataagacattcttggaaaaactcaagtttggtataggagatggcaatttgcagtattacctgtacaattggaggtgtccaggtacagattctgaaaagggctctggtaacttcgttaacgccaatggcaagctgcttcctgacgtgtgcaggcgtccaccctgacacttgctgcttagcatctgttttcttctccttcagattctcactaatatcaacagcaatgctgcatttctctctgctttcttttttcagaaaaggtgttttgttctttttcttcttatcttcaatcttctgaagtccaatagctttaagcctgtcctcaagcgtctgtaggatgaagtgcatatcctcgctctccagagcgctccagcggatgatgtatgggttgttcaacgacgtcttcacaaccagaggtctcgtcttacggagagatccccgccccggtgcttgaggagctgcagccattttgaaaatccttccaagaagcaaaatgacaacagaaaaaattcatgttagcgacaactgcatgacttaagaatatcttgactgtactctctgattcttatttatttatgtatttattttttgagacagaatttcactcttgttgcccaggctggagtgcagtggcacaatctcagctcactgcaacctccacctcctgggttcaagcgattctcctgcctcagcctcccgagtagctgggattacaggcgcccgccaccaagcccagctaatgtttctatttttttttagtagagacagggtttcaccatgttgcccaggctggtctcaaactcctgacctcaggtgatccacccacctcggcctcccaaagtgctgggattacaggcatgagccactgcgcccggcctgtactctgattctggataagctagagcaagcctgattatataagtccaattaggtgagcatacgcttgtcttccttttaaagattaagtaattttatttttccccatttttcttacccgattttgaatgctctacgaaggctctttaaaatactcaggactatgggtgagtagtgtttaattttccccatttttttatatgactttgtctttattcctatacaagcaatatgtgaaagttttaattattgcaatcatagtacaattccatttgtctatttcatttattaaaaatattctgtttctacttgttcataatt

SEQ ID NO: 416331 - DNA, 2080 bp, Homo sapiens
  misc_feature (2000)..(2000): n is a, c, g, or t
ttgcagattcggattcattagatctggggcagggccaggctctgcagctctaactagctcccgcgtgctgctcattctgctggtctgcagaccacactttgagtgcaaagtcgtttcactcctcttctacctgaacttctggatttgttttgtttcccctccaacaaggttacaaagacttcaggtttgagaccaatggaaccaaaagatatcaaatcagttcgagaattaatcaacacttacctgaagcagtttcatctggctccagtgatggatgaagaggaagtagcccactggttcctcccccgggagcacattattgacacgtttgtagtggagagccccaacggtaaactgactgatttcctgagcttctatacgctcccctccacggtgatgcaccaccctgctcacaagagcctcaaagccgcctactcattctacaacatccacacagagacgcccctgctggacctcatgagcgacgcgctcatcctggctaaatcgaaaggatttgatgtattcaatgcactggatttgatggaaaataagacattcttggaaaaactcaagtttggtataggagatggcaatttgcagtattacctgtacaattggaggtgtccaggtacagattctgaaaaggttggactagtactacaatagatggatatttttatttctagaactctgacatcatcatttgttaatatttaatgatttctggaactgccattccaaagaagaataaaagcacaactcaagtgaaattgaagtagtcgataatcagaaaagatgacaaaagtccacatgtgacatttgtacgtttctagctagaatgttaaacttcatcctttttttactgttgacctatttgtgggagggatgaaaggctacaaagagcacattcttgtaattttcaaatttttgcctgtctcttgaagaggtattttttcacccttagaaaagggactgtttttctatggactaagtagaagttacagagtcatgtaagaaaatctttgctattgtgtggagagaaattgctgcatttctgtttcttaagtgatggtacatttgtccatgtaacagaacaaaagatccatttggaaattttttttactggtatcaccttacatggtatcactgggaacatttatggaatcaacacttctgtagctcagtgacaggtggtggttgtttaagtgcagagcaatattaaaatgtactggtgactagtacatgtatttctccataagcagagttgccgaatcaataaacatgcaagtttgtactttgatctttaccaggtcagtggattgcttcaaaagcagagttttgtgcaagcactcactgtgctctctgaaagagcctgaggccgggcgtggtggctcacgcctgtaatcccagcactttgggaggccaaggtgggcagatcatgaggtcaggagatcgagaccattctggccaacatagtgaaaccccatctctactaaaaatacaaaaattagccgggcgtggtggcgtgtgcctgtagtcccagctgcttgggaggctgaggcaggagaatcgcttgaacctgagaggtgaggttgcagtgagccgagatcgagccactgcactccagcctgggtgacagagcgtgagactccgtctcaaaaaaaaaaaaaaaagaaagagcctgtacccgcgactaactagacttttctgctgttgtgcaaagttcagtttcttctcagcaacatcaaggatatatgaagaaaaggaaataaaaaactgtaaagtcaaaagagatgcctggtggaacttattcgtgctatcagggcattgatagtttgaatgtttttattacttatgcaaaattgcacatactcctctatgctgattttatcatgaaaactgtcatgtgtcatgctaatggaaaatgtcttatttgtaaataagtattcataattttgttactgatggtgtttttaatctagaatttgaaaaactttcanggcttacagatgtgtgtttatattgccaataatctgcgggaaaaataagatgctaaccgaggccacgtagcctggcctca

SEQ ID NO: 416332 - DNA, 3030 bp, Homo sapiens
agcagtacggcgggaggcactagagggagctgcggccgctccggcccggccccgagcaccgcctccccagccagcgccgccgcgatggcggaggacagcgagtctgcggccagccagcagagcctggaactggacgaccaggacacgtgcgggatagacggggacaatgaggaggagacggagcacgccaaaggaagtcctggagggtatttgggagccaaaaagaaaaagaagaaacagaagagaaaaaaggagaaaccaaattccggaggcaccaagtcagactcggcatctgattcccaggagattaaaattcagcagccttcgaaaaatcccagtgttccaatgcagaagttgcaggatatccagagagcaatggagctgctatccgcatgccagggcccagccaggaacattgatgaggctgcaaagcacagataccagttttgggacacacaaccggtaccaaaactagatgaagtcataacatctcatggtgcaattgaaccagataaagacaacgtacgccaagaaccgtattctttgccacagggttttatgtgggacactttagacttgagtgatgccgaagtgctcaaggagttatacacgttgttaaatgagaattacgtagaagatgatgacaatatgttccgatttgactattcacccgagttcctgttgtgggctctgcgtccaccaggctggctcctgcagtggcactgtggggtcagagtgtcttcaaataaaaaactggtcgggttcataagtgccatcccagcaaacattcggatttatgacagtgtgaagaagatggtagaaatcaactttctttgtgttcataagaagttgagatcgaaacgggtagccccagtgctaatccgagagatcactagaagagtgaacctggaagggatcttccaggctgtgtacaccgcgggagtggttcttcctaagcccatagccacatgcagatactggcatcgatcactaaaccccagaaaattggtagaagtgaaattttctcacttgagtagaaatatgactttacagagaacaatgaagctatacagacttccagatgttacaaagacttcaggtttgagaccaatggaaccaaaagatatcaaatcagttcgagaattaatcaacacttacctgaagcagtttcatctggctccagtgatggatgaagaggaagtagcccactggttcctcccccgggagcacattattgacacgtttgtagtggagagccccaacggtaaactgactgatttcctgagcttctatacgctcccctccacggtgatgcaccaccctgctcacaagagcctcaaagccgcctactcattctacaacatccacacagagacgcccctgctggacctcatgagcgacgcgctcatcctggctaaatcgaaaggatttgatgtattcaatgcactggatttgatggaaaataagacattcttggaaaaactcaagtttggtataggagatggcaatttgcagtattacctgtacaattggaggtgtccaggtacagattctgaaaagggctctggtaacttcgttaacgccaatggcaagctgcttcctgacgtgtgcaggcgtccaccctgacacttgctgcttagcatctgttttcttctccttcagattctcactaatatcaacagcaatgctgcatttctctctgctttcttttttcagaaaaggtgttttgttctttttcttcttatcttcaatcttctgaagtccaatagctttaagcctgtcctcaagcgtctgtaggatgaagtgcatatcctcgctctccagagcgctccagcggatgatgtatgggttgttcaacgacgtcttcacaaccagaggtctcgtcttacggagagatccccgccccggtgcttgaggagctgcagccattttgaaaatccttccaagaagcaaaatgacaacagaaaaaattcatgttagcgacaactgcatgacttaagaatatcttgactgtactctctgattcttatttatttatgtatttattttttgagacagaatttcactcttgttgcccaggctggagtgcagtggcacaatctcagctcactgcaacctccacctcctgggttcaagcgattctcctgcctcagcctcccgagtagctgggattacaggcgcccgccaccaagcccagctaatgtttctatttttttttagtagagacagggtttcaccatgttgcccaggctggtctcaaactcctgacctcaggtgatccacccacctcggcctcccaaagtgctgggattacaggcatgagccactgcgcccggcctgtactctgattctggataagctagagcaagcctgattatataagtccaattaggtgagcatacgcttgtcttccttttaaagattaagtaattttatttttccccatttttcttacccgattttgaatgctctacgaaggctctttaaaatactcaggactatgggtgagtagtgtttaattttccccatttttttatatgactttgtctttattcctatacaagcaatatgtgaaagttttaattattgcaatcatagtacaattccatttgtctatttcatttattaaaaatattctgtttctacttgttcataattaaccttctagtgactgtatggtattaatcttctaacttgttactgttttccaaaatgctatctagttgggcttccatgcattcactcaacaaatattctaggcctggcacactggctcatgccttcagtctcagaatttcgggaggctgtggtggacagatcacttcagcccatgagttcgagaccactctgagcaaatggagaaaccctctacaaaaaatacataaattagctaagtgtgaggcgtacctgtagtcccagctacttgggaggctgaggtgggaagatcacttgagcccaggaggtcaaggatgcagtgagcgtgattgtgccaccacactccagcccagtaacacatctgaccctgtctgc

SEQ ID NO: 416333 - DNA, 2025 bp, Homo sapiens
agcagtacggcgggaggcactagagggagctgcggccgctccggcccggccccgagcaccgcctccccagccagcgccgccgcgatggcggaggacagcgagtctgcggccagccagcagagcctggaactggacgaccaggacacgtgcgggatagacggggacaatgaggaggagacggagcacgccaaaggaagtcctggagggtatttgggagccaaaaagaaaaagaagaaacagaagagaaaaaaggagaaaccaaattccggaggcaccaagtcagactcggcatctgattcccaggagattaaaattcagcagccttcgaaaaatcccagtgttccaatgcagaagttgcaggatatccagagagcaatggagctgctatccgcatgccagggcccagccaggaacattgatgaggctgcaaagcacagataccagttttgggacacacaaccggtaccaaaactagatgaagtcataacatctcatggtgcaattgaaccagataaagacaacgtacgccaagaaccgtattctttgccacagggttttatgtgggacactttagacttgagtgatgccgaagtgctcaaggagttatacacgttgttaaatgagaattacgtagaagatgatgacaatatgttccgatttgactattcacccgagttcctgttgtgggctctgcgtccaccaggctggctcctgcagtggcactgtggggtcagagtgtcttcaaataaaaaactggtcgggttcataagtgccatcccagcaaacattcggatttatgacagtgtgaagaagatggtagaaatcaactttctttgtgttcataagaagttgagatcgaaacgggtagccccagtgctaatccgagagatcactagaagagtgaacctggaagggatcttccaggctgtgtacaccgcgggagtggttcttcctaagcccatagccacatgcagatactggcatcgatcactaaaccccagaaaattggtagaagtgaaattttctcacttgagtagaaatatgactttacagagaacaatgaagctatacagacttccagatgttacaaagacttcaggtttgagaccaatggaaccaaaagatatcaaatcagttcgagaattaatcaacacttacctgaagcagtttcatctggctccagtgatggatgaagaggaagtagcccactggttcctcccccgggagcacattattgacacgtttgtagtggagagccccaacggtaaactgactgatttcctgagcttctatacgctcccctccacggtgatgcaccaccctgctcacaagagcctcaaagccgcctactcattctacaacatccacacagagacgcccctgctggacctcatgagcgacgcgctcatcctggctaaatcgaaaggatttgatgtattcaatgcactggatttgatggaaaataagacattcttggaaaaactcaagtttggtataggagatggcaatttgcagtattacctgtacaattggaggtgtccaggtacagattctgaaaagggctctggtaacttcgttaacgccaatggcaagctgcttcctgacgtgtgcaggcgtccaccctgacacttgctgcttagcatctgttttcttctccttcagattctcactaatatcaacagcaatgctgcatttctctctgctttcttttttcagaaaaggtgttttgttctttttcttcttatcttcaatcttctgaagtccaatagctttaagcctgtcctcaagcgtctgtaggatgaagtgcatatcctcgctctccagagcgctccagcggatgatgtatgggttgttcaacgacgtcttcacaaccagaggtctcgtcttacggagagatccccgccccggtgcttgaggagctgcagccattttgaaaatcctggaactcacgatggcgaatccgtggtcacctgaaggcaacagcaccggcgcccagtgcgcctgcgccgcgcgtgcgcagagccc

SEQ ID NO: 416334 - DNA, 1626 bp, Homo sapiens
ttactcaaacagaaagagctatgaataataataataataacgataccactaaagtaaaatatttgacactcacaagattaaaagctgaatacagtaatcttctcataatcatcaccgggatatgcagcactgtaatcaacgaattacacctgggaaaatgcgccgcgacgttaatgctgtaagtacccgggaaaagacgaaaagaactaaggaaatcataacctgatgggatcaagatgcgcgagtcttctccttcagattctcactaatatcaacagcaatgctgcatttctctctgctttcttttttcagaaaaggtgttttgttctttttcttcttatcttcaatcttctgaagtccaatagctttaagcctgtcctcaagcgtctgtaggatgaagtgcatatcctcgctctccagagcgctccagcggatgatgtatgggttgttcaacgacgtcttcacaaccagaggtctcgtcttacggagagatccccgccccggtgcttgaggagctgcagccattttgaaaatccttccaagaagcaaaatgacaacagaaaaaattcatgttagcgacaactgcatgacttaagaatatcttgactgtactctctgattcttatttatttatgtatttattttttgagacagaatttcactcttgttgcccaggctggagtgcagtggcacaatctcagctcactgcaacctccacctcctgggttcaagcgattctcctgcctcagcctcccgagtagctgggattacaggcgcccgccaccaagcccagctaatgtttctatttttttttagtagagacagggtttcaccatgttgcccaggctggtctcaaactcctgacctcaggtgatccacccacctcggcctcccaaagtgctgggattacaggcatgagccactgcgcccggcctgtactctgattctggataagctagagcaagcctgattatataagtccaattaggtgagcatacgcttgtcttccttttaaagattaagtaattttatttttccccatttttcttacccgattttgaatgctctacgaaggctctttaaaatactcaggactatgggtgagtagtgtttaattttccccatttttttatatgactttgtctttattcctatacaagcaatatgtgaaagttttaattattgcaatcatagtacaattccatttgtctatttcatttattaaaaatattctgtttctacttgttcataattaaccttctagtgactgtatggtattaatcttctaacttgttactgttttccaaaatgctatctagttgggcttccatgcattcactcaacaaatattctaggcctggcacactggctcatgccttcagtctcagaatttcgggaggctgtggtggacagatcacttcagcccatgagttcgagaccactctgagcaaatggagaaaccctctacaaaaaatacataaattagctaagtgtgaggcgtacctgtagtcccagctacttgggaggctgaggtgggaagatcacttgagcccaggaggtcaaggatgcagtgagcgtgattgtgccaccacactccagcccagtaacacatctgaccctgtctgc

SEQ ID NO: 416335 - DNA, 996 bp, Homo sapiens
  misc_feature (916)..(916): n is a, c, g, or t
tccctcccctccccttcccttcccttctctgctgtgtttccattctagaagttctttccttcatcccctcgttgctcctgcagagcatttactctgacagtgccccccacccaaggctcgtggctgcctggctgttggatgacagtaatgcatgcactgcacgtctcccccagaggagtaatgccggggaccatttgtagatggatgggaactgaagcaaagcgtgcttcaatttagattccccaaactgccagagccccaataaaactagacaactgttgttacctttaacagagggtttgcttctattttcatgtgtaacacacaagcccatggccttgactgggcttggaggaggattgttagtgtttaggtattgtagtctctgaggcagatgcacgtgcgtctgctcaagtttaacatcagcagccgctctctcatattctgtgtctgtctttgctgtcgtagaatcccagtgttccaatgcagaagttgcaggatatccagagagcaatggagctgctatccgcatgccagggcccacctgggtgacagagcgtgagactccgtctcaaaaaaaaaaaaaaaagaaagagcctgtacccgcgactaactagacttttctgctgttgtgcaaagttcagtttcttctcagcaacatcaaggatatatgaagaaaaggaaataaaaaactgtaaagtcaaaagagatgcctggtggaacttattcgtgctatcagggcattgatagtttgaatgtttttattacttatgcaaaattgcacatactcctctatgctgattttatcatgaaaactgtcatgtgtcatgctaatggaaaatgtcttatttgtaaataagtattcataattttgttactgatggtgtttttaatctagaatttgaaaaactttcanggcttacagatgtgtgtttatattgccaataatctgcgggaaaaataagatgctaaccgaggccacgtagcctggcctca

SEQ ID NO: 416336 - DNA, 482 bp, Homo sapiens
tgaaattacactttaatatttgattacttttcgttcagaagatattcacattgtaatttttctgggtgtctgtctaattacctgaatagcacaacaccatctggcagcagatttcagcgggagcagccatgggtaagtctctcgttgactttgaattaaaccagtttgcagcggtcgttcttcattctaatgccaagggtgggaaatagttcctgacattctcctagtttaaaccaaaccagaagttgtccagctgggccccgtgttggcagatggtggccaagaagagggttgattgtactgcgtgggtgtctggtggcacagatggcagccatccctgtctgtggagccaacccccaggcaccctgtatgctgggcctctgggaaacacaaagccctcttgatgcaagaaactcacagtgaaaagggtagaaccagccaggcacggtggctcacgcctgtagtcccagcactttgggagg

SEQ ID NO: 416337 - DNA, 373 bp, Homo sapiens
gaaataaagcctcacaagaaataaggtgcttatggtgttaagttacaatggaaaataatcaatggcatttgtatgcatgctgcatgtgtgatgtagatcagttcataggagatggggcaacaaataaatatcaccatggggatgtgatcatcaaaacccaggctgtggaaaactgtcagtcaagtttcttcaacatattgcaagaaaaatatgatggcttgaaaatctatagatgaagcaatttaacaaacctaccaatctcatttaatcttgattacttttaaaaaaagattaaaaagatgacagagaaagggtttaaaaatttgtaagacacggctggacgcagtggctcacacctgtaatccagcacttt

SEQ ID NO: 416338 - DNA, 368 bp, Homo sapiens
ctgcagaccttcatatgtgacagcatgaggtgagctggagagggtctggaccacatgagcacgagcacttctcatcaggagccacaagatctcgattcctgggctggcttccttacaaaacagccatctggcagctcacaaatcacttaccctctttgtggccatgagcccccctagcagtaaaaccaagtgaaacatatagacaaaatcaaaatcctaccctaatacaatatgattatcattattgcccttgatattactcacaaatcaatccactgtgaattgggttctgatgcacatccacatgtggtgtttttgtacaccactttacaaaacgcttcccatttccacttcaacaatgagcaaaa

SEQ ID NO: 416339 - DNA, 705 bp, Homo sapiens
catgcctctcccccttgggcaggcaaccctccctcctgatccctgaggcagagctgcccctgcctgcagttccaagtgagaatcagctgacagcaggatggctcacctgccactcagatcaaaacctgtggcttctgacatccaagatgtctgtggactttgaaaatgggcagggctggtctaaccactgcctcagccaagccagcctggcctacctatcttcagaggggctgagcttcaggcagcagtctctattggagggcattcctctgctagcttccttccttttctctcttcacatgtcttcttcctttctgtccctctcttccaactcatacgcttcttcagatccctcagaccagccttcagcttggatcattgcccaagaaaatgctgaaactatggcatgtcaggctgggtgcagtggctcacatctgtaatcccagcactttgggaggccaagctgggcagatcatttgaggccaggagtttgagatcagcctggccaacatggcaaaaccctgtctctactaaaaatacaaaaaaaaaaaaaattaggcaggtgtggtggctcacgcctgtaatcccagctactcaggaggctgaggcacaaggattatctgaacctgggaagcagaggtcgcagtgagctgagatcgcaccactgcacaccagcctgggcaacagagcaagactctgtctcta

SEQ ID NO: 416340 - DNA, 328 bp, Homo sapiens
taatttttgtttttatacaactatatttcagcctgcttttaaaatagtcaagtaattcttaatatccccttctgtgtctaaagtcactttggagaagcagcaattctgtcatttaaagtaggacctccctattagaatcagaaatgtaatacattgtaatactattttctactctcactgctatcactgaccattatgcattatttttccaaattgaaagcagcttaagtcaagcaaaaggcagtggcaaaagttgcgggcattgtgcaagcagcatgtattaaacaatccaggaaacttggcaacccccagagacacagatgttgcc

SEQ ID NO: 416341 - DNA, 366 bp, Homo sapiens
cacaaagtatctgaaacacaccccttccatttaattcaagtattacaataaattaaactaaaatttctgggatttttgtagttactagtaaaaattttggtttcttttgacttaattttattcttccaaacatgtattctattgtttgtagtttattagaagtataaaagtataaaaaatagtctttagttgtcagattttatagctgtaattgttttctttatgcatctcaaaggaggaaattctgtacctaatgctaaatgacgagttaatgggtgcagcacaccagcatgatgcatgtatacatatgtaactaacctgcacattgtgcacatgtaccctaaaacttaaagtataaaaaaaaaa

SEQ ID NO: 416342 - DNA, 559 bp, Homo sapiens
  misc_feature (196)..(196): n is a, c, g, or t
gagccagtcacagaaagacaagactgtaggatgccacttagacgagggacgtagagtggtcaaaggcatagagacaaagtggaatccatggttgccagggcatggtggggaagagatggagtgttattgtttaatgggtgcagagtttcagttttgcaatataaaaagagccctggctgggctcagtggctcacanctgtaatccccacactctgtagtcccagctactcgggaggctgaggctggaggatcgcttgagtccaggagttctgggctgtagtgcgctatgccgatcgggtgtccgcactaagttcggcatcaatatggtgacctcccgggagcgggggaccaccaggttgcctaaggaggggtgaaccggcccaggtcggaaacggagcaggtcaaaactcccgtgctgatcagtagtaggctcaggagtggagaccacatttcttagggtagcagacagagttcttgatagtcctttctgccccacctaaactttttccatcccagctaggaatgactccaaggatcttgcttatttggggggctccct

SEQ ID NO: 416343 - DNA, 490 bp, Homo sapiens
  misc_feature (122)..(122): n is a, c, g, or t
tgaggttaaagcagacatttaatcggcaaaaaaaatttaaatagaattaaatattcaggctgggcgtagtggctcgcgcctgtaatcccagcactttgggaggccgaggcgggtggatcacntgaggtcaggagttcgagaccagcctggccaacatggtgaaaccccgtctctactaaaaatacaaaaattagccggtgtggtggcaagcgatcctgtagtcccagctactcgggaggctgaggctggaggatcgcttgagtccaggagttctgggctgtagtgcgctatgccgatcgggtgtccgcactaagttcggcatcaatatggtgacctcccgggagcgggggaccaccaggttgcctaaggaggggtgaaccggcccaggtcggaaacggagcaggtcaaaactcccgtgctgatcagtagtgggatcgcgcccacaacccacgcgcccacaacccagcgcccacgacccccgcgcccacaa

SEQ ID NO: 416344 - DNA, 386 bp, Homo sapiens
  misc_feature (19)..(19): n is a, c, g, or t
  misc_feature (22)..(22): n is a, c, g, or t
  misc_feature (24)..(30): n is a, c, g, or t
  misc_feature (70)..(70): n is a, c, g, or t
ttctggtgtgttcctcccnggngnnnnnnnccaccaggttgcctaaggaggggtgaaccggcccaggtcngaaacggagcaggtcaaaactcccgtgctgatcagtagtggctgtagtcccagctactcgggaggctgaggctggaggatcgcttgagtccaggagttctgggctgtagtgcgctatgccgatcgggtgtccgcactaagttcggcatcaatatggtgacctcccgggagcgggggaccaccaggttgcctaaggaggggtgaaccggcccaggtcggaaacggagcaggtcaaaactcccgtgctgatcagtagtgggatcgcgcccacaacccacgcgcccacaacccagcgcccacgacccccgcgcccacaa

SEQ ID NO: 416345 - DNA, 639 bp, Homo sapiens
  misc_feature (267)..(267): n is a, c, g, or t
cactcacacctgccaccacacaatggggaagttggcccatgccagcatcaatatctagttggtaacattgttctctcattgtacaagaccttaccactgagggaaacacgtggggggaatctctttatatcacttcttaccataattgtatcacttcttaccatagccacaaatctgcaattatctcaaaagtaaaaactgtggttgggtgtggtggctcacgcctgtaatcccagcactttgggaggccgaggcgggtggatcacntgaggtcaggagttcgagaccagcctggccaacatggtgaaaccccgtctctactaaaaatacaaaaattacaaatagccagtgtcgtggtgcacacctgtagtcccagctactcgggaggctgaggctggaggatcgcttgagtccaggagttctgggctgtagtgcgctatgccgatcgggtgtccgcactaagttcggcatcaatatggtgacctcccgggagcgggggaccaccaggttgcctaaggaggggtgaaccggcccaggtcggaaacggagcaggtcaaaactcccgtgctgatcagtagtgggatcgcgcccacaacccacgcgcccacaacccagcgcccacgacccccgcgcccacaa

SEQ ID NO: 416346 - DNA, 654 bp, Homo sapiens
gctctcaactgggtccagcaaatggaacaaatgattgtgtttttggtgttactcaggggaggggaggctgatgccaagacagtaacctcagtctttgtagagggaaccccatatgctaaagagatatcgcttgagaatgcttcatgctcttgagcccaattctatgtgctccctgatggaaggacaggtaggtattgggtgaggtgagcaaccaacacttactgggtgcaccttcaaataggacaccttctgaagtccccctagcccaggcagcacagggcaggccttctttggtgccaccaagtgcaattgtgtttccttcttattttaccatctgctatgcatttctttccatatccatgcctataattccatgagtctgtagtcccagctactcgggaggctgaggctggaggatcgcttgagtccaggagttctgggctgtagtgcgctatgccgatcgggtgtccgcactaagttcggcatcaatatggtgacctcccgggagcgggggaccaccaggttgcctaaggaggggtgaaccggcccaggtcggaaacggagcaggtcaaaactcccgtgctgatcagtagtgggatcgcgcccacaacccacgcgcccacaacccagcgcccacgacccccgcgcccacaa

SEQ ID NO: 416347 - DNA, 508 bp, Homo sapiens
acatgtccccaaggcacagggtcctacggtcctggccactctgggaatggagccgtggccgcagggcaggtgtgaagctcaggctgacgtggccccgtgtcctctgacccttatggtcacattgcctctctgggcctgtttctttgtaaactggagtgcagtggcatgatcatagctcactgcagccttgatttccaaggttcaagcaaaactcccgtgctgatcagtagtggctgtagtcccagctactcgggaggctgaggctggaggatcgcttgagtccaggagttctgggctgtagtgcgctatgccgatcgggtgtccgcactaagttcggcatcaatatggtgacctcccgggagcgggggaccaccaggttgcctaaggaggggtgaaccggcccaggtcggaaacggagcaggtcaaaactcccgtgctgatcagtagtgggatcgcgcccacaacccacgcgcccacaacccagcgcccacgacccccgcgcccacaa

SEQ ID NO: 416348 - DNA, 531 bp, Homo sapiens
  misc_feature (240)..(240): n is a, c, g, or t
tattttaaaaggcacggtaagtaaccagctatttttcttttaaatgaccagtccatattccacatttatgctatatgcctggcccccagagctttcaatccttgctttattccataactaagcttccttgagttctatacctaactactcttacttacataatacttcttattattaaatggtgtctcagttcatggcaaatcagaaagaaaaataaaggttgggtgcggtggctcacanctgtaatccccacactctgtagtcccagctactcgggaggctgaggctggaggatcgcttgagtccaggagttctgggctgtagtgcgctatgccgatcgggtgtccgcactaagttcggcatcaatatggtgacctcccgggagcgggggaccaccaggttgcctaaggaggggtgaaccggcccaggtcggaaacggagcaggtcaaaactcccgtgctgatcagtagtgggatcgcgcccacaacccacgcgcccacaacccagcgcccacgacccccgcgcccacaa

SEQ ID NO: 416349 - DNA, 444 bp, Homo sapiens
ctctgctcagtgcgcggtctctcacacgtgttatcccagcactgggggagcgacgacagcaggtggatcaacaagatgcaggaggcagcgaccagcccgacccacgatcaatcgccaatctatctttactatacatacatacactgcgctgggtgttgtgcacggcacactgtagtcccagctactcgggaggctgaggctggaggatcgcttgagtccaggagttctgggctgtagtgcgctatgccgatcgggtgtccgcactaagttcggcatcaatatggtgacctcccgggagcgggggaccaccaggttgcctaaggaggggtgaaccggcccaggtcggaaacggagcaggtcaaaactcccgtgctgatcagtagtgggatcgcgcccacaacccacgcgcccacaacccagcgcccacgacccccgcgcccacaa

SEQ ID NO: 416350 - DNA, 452 bp, Homo sapiens
  misc_feature (106)..(106): n is a, c, g, or t
tatcgctgctccggtggtatcctcctctttaaatgggggtataggctgggtgggtgttcacgcctgtaatcccagcactttgggaggccgaggcgggtggatcacntgaggtcaggagttcgagaccagcctggccaacatggtgaaaccccgtctctactaaaaatacaaaaattactgtagtcccagctactcgggaggctgaggctggaggatcgcttgagtccaggagttctgggctgtagtgcgctatgccgatcgggtgtccgcactaagttcggcatcaatatggtgacctcccgggagcgggggaccaccaggttgcctaaggaggggtgaaccggcccaggtcggaaacggagcaggtcaaaactcccgtgctgatcagtagtgggatcgcgcccacaacccacgcgcccacaacccagcgcccacgacccccgcgcccacaa

SEQ ID NO: 416351 - DNA, 327 bp, Homo sapiens
aagaaacagggtcctgctctgtcacctagtaggctggagtgcagtggtgtgactgtagtcccagctactcgggaggctgaggctggaggatcgcttgagtccaggagttctgggctgtagtgcgctatgccgatcgggtgtccgcactaagttcggcatcaatatggtgacctcccgggagcgggggaccaccaggttgcctaaggaggggtgaaccggcccaggtcggaaacggagcaggtcaaaactcccgtgctgatcagtagtgggatcgcgcccacaacccacgcgcccacaacccagcgcccacgacccccgcgcccacaa

SEQ ID NO: 416352 - DNA, 359 bp, Homo sapiens
cctaagtggaactgctccggccattttaaaatttttctttacagaggcagggtctcactgtgttgcctaggcttgtctcaaactctgtagtcccagctactcgggaggctgaggctggaggatcgcttgagtccaggagttctgggctgtagtgcgctatgccgatcgggtgtccgcactaagttcggcatcaatatggtgacctcccgggagcgggggaccaccaggttgcctaaggaggggtgaaccggcccaggtcggaaacggagcaggtcaaaactcccgtgctgatcagtagtgggatcgcgcccacaacccacgcgcccacaacccagcgcccacgacccccgcgcccacaa

SEQ ID NO: 416353 - DNA, 396 bp, Homo sapiens
ccggctctgacttaggaggaactgagaactagagatctagatctgggacgctgaaatgtggatgctattctgaagtcatagaaatgaaggtataaagtgagaacagggtaaacccagcactctgtagtcccagctactcgggaggctgaggctggaggatcgcttgagtccaggagttctgggctgtagtgcgctatgccgatcgggtgtccgcactaagttcggcatcaatatggtgacctcccgggagcgggggaccaccaggttgcctaaggaggggtgaaccggcccaggtcggaaacggagcaggtcaaaactcccgtgctgatcagtagtgggatcgcgcccacaacccacgcgcccacaacccagcgcccacgacccccgcgcccacaa

SEQ ID NO: 416354 - DNA, 648 bp, Homo sapiens
  misc_feature (106)..(106): n is a, c, g, or t
  misc_feature (494)..(494): n is a, c, g, or t
  misc_feature (523)..(523): n is a, c, g, or t
  misc_feature (527)..(527): n is a, c, g, or t
  misc_feature (531)..(532): n is a, c, g, or t
  misc_feature (535)..(535): n is a, c, g, or t
  misc_feature (540)..(540): n is a, c, g, or t
  misc_feature (546)..(547): n is a, c, g, or t
tatcgctgctccggtggtatcctcctctttaaatgggggtataggctgggtgggtgttcacgcctgtaatcccagcactttgggaggccgaggcgggtggatcacntgaggtcaggagttcgagaccagcctggccaacatggtgaaaccccgtctctactaaaaatacaaaaattactgtagtcccagctactcgggaggctgaggctggaggatcgcttgagtccaggagttctgggctgtagtgcgctatgccgatcgggtgtccgcactaagttcggcatcaatatggtgacctcccgggagcgggggaccaccaggttgcctaaggaggggtgaaccggcccaggtcggaaacggagcaggtcaaaactcccgtgctgatcagtagtgggatcgcgcctgtgaatagccactgcactccagcctgagcaacatagcaaagaccccgtctctactaaaacactaaaatagttagccagtcatggtggcgngtgcctgtaatcccagctactcagaggcngagncagnngantcgcntgaacnngggagcggaggttcagtgagccgagattgcgccatgcactccagctttgagcttggactgttgctccaactgcagcgtcagctcctccacagctcagggat

SEQ ID NO: 416355 - DNA, 594 bp, Homo sapiens
  misc_feature (106)..(106): n is a, c, g, or t
tatcgctgctccggtggtatcctcctctttaaatgggggtataggctgggtgggtgttcacgcctgtaatcccagcactttgggaggccgaggcgggtggatcacntgaggtcaggagttcgagaccagcctggccaacatggtgaaaccccgtctctactaaaaatacaaaaattactgtagtcccagctactcgggaggctgaggctggaggatcgcttgagtccaggagttctgggctgtagtgcgctatgccgatcgggtgtccgcactaagttcggcatcaatatggtgacctcccgggagcgggggaccaccaggttgcctaaggaggggtgaaccggcccaggtcggaaacggagcaggtcaaaactcccgtgctgatcagtagtgggatcgcgcctgtgaatagccactgcactccagcctgagcaacatagcgagactcccatctctccaaaaaaatttaaaaaccagccaggtagactgggcgcagtggctcacgcctgtaatcccagaactttgggaggccgaggcaggcagatcacgaggtcaagagttagagaccagcctgaccaacatggtgaaaccccg

SEQ ID NO: 416356 - DNA, 672 bp, Homo sapiens
  misc_feature (4)..(4): n is a, c, g, or t
  misc_feature (130)..(130): n is a, c, g, or t
  misc_feature (518)..(518): n is a, c, g, or t
  misc_feature (547)..(547): n is a, c, g, or t
  misc_feature (551)..(551): n is a, c, g, or t
  misc_feature (555)..(556): n is a, c, g, or t
  misc_feature (559)..(559): n is a, c, g, or t
  misc_feature (564)..(564): n is a, c, g, or t
  misc_feature (570)..(571): n is a, c, g, or t
aggnttaggcaagaggatcagtaagagactaggagtggtcagtggggtaaaggaaaaagaaagtgggctgggcacggtgtctctcgcctgtaatcccagcactttgggaggccgaggcgggtggatcacntgaggtcaggagttcgagaccagcctggccaacatggtgaaaccccgtctctactaaaaatacaaaaattactgtagtcccagctactcgggaggctgaggctggaggatcgcttgagtccaggagttctgggctgtagtgcgctatgccgatcgggtgtccgcactaagttcggcatcaatatggtgacctcccgggagcgggggaccaccaggttgcctaaggaggggtgaaccggcccaggtcggaaacggagcaggtcaaaactcccgtgctgatcagtagtgggatcgcgcctgtgaatagccactgcactccagcctgagcaacatagcaaagaccccgtctctactaaaacactaaaatagttagccagtcatggtggcgngtgcctgtaatcccagctactcagaggcngagncagnngantcgcntgaacnngggagcggaggttcagtgagccgagattgcgccatgcactccagctttgagcttggactgttgctccaactgcagcgtcagctcctccacagctcagggat

SEQ ID NO: 416357 - DNA, 477 bp, Homo sapiens
  misc_feature (122)..(122): n is a, c, g, or t
  misc_feature (474)..(474): n is a, c, g, or t
tgaggttaaagcagacatttaatcggcaaaaaaaatttaaatagaattaaatattcaggctgggcgtagtggctcgcgcctgtaatcccagcactttgggaggccgaggcgggtggatcacntgaggtcaggagttcgagaccagcctggccaacatggtgaaaccccgtctctactaaaaatacaaaaattagccggtgtggtggcaagcgatcctgtagtcccagctactcgggaggctgaggctggaggatcgcttgagtccaggagttctgggctgtagtgcgctatgccgatcgggtgtccgcactaagttcggcatcaatatggtgacctcccgggagcgggggaccaccaggttgcctaaggaggggtgaaccggcccaggtcggaaacggagcaggtcaaaactcccgtgctgatcagtagtgggatcgcgcctgtgcgcaagcaattggggatccactagagtcngcc

SEQ ID NO: 416358 - DNA, 714 bp, Homo sapiens
  misc_feature (106)..(106): n is a, c, g, or t
tatcgctgctccggtggtatcctcctctttaaatgggggtataggctgggtgggtgttcacgcctgtaatcccagcactttgggaggccgaggcgggtggatcacntgaggtcaggagttcgagaccagcctggccaacatggtgaaaccccgtctctactaaaaatacaaaaattactgtagtcccagctactcgggaggctgaggctggaggatcgcttgagtccaggagttctgggctgtagtgcgctatgccgatcgggtgtccgcactaagttcggcatcaatatggtgacctcccgggagcgggggaccaccaggttgcctaaggaggggtgaaccggcccaggtcggaaacggagcaggtcaaaactcccgtgctgatcagtagtgggatcgcgcctgtgaatagccactgcactccagcctgagcaacatagcacaaaactccatctcaaaaaataaaaatcccaatcccaagtcgaaatcacctcttgttttaaacaagaatgaatcattactgtgtatgttagggtattaaaactgtttcaccagtacagtgaaagttgtttcaacattttaaacaaacagtggttatagactctttctttaaccattgtatattttcttccattcttgtcattggtcaataggggagggtagattagctgctccagaattcaataaagtgtaatatttctaacggtgaaaaaa

SEQ ID NO: 416359 - DNA, 1000 bp, Homo sapiens
  misc_feature (122)..(122): n is a, c, g, or t
  misc_feature (467)..(468): n is a, c, g, or t
  misc_feature (560)..(560): n is a, c, g, or t
  misc_feature (708)..(708): n is a, c, g, or t
  misc_feature (767)..(768): n is a, c, g, or t
  misc_feature (921)..(922): n is a, c, g, or t
  misc_feature (930)..(930): n is a, c, g, or t
  misc_feature (935)..(936): n is a, c, g, or t
  misc_feature (953)..(953): n is a, c, g, or t
  misc_feature (970)..(970): n is a, c, g, or t
  misc_feature (978)..(978): n is a, c, g, or t
tgaggttaaagcagacatttaatcggcaaaaaaaatttaaatagaattaaatattcaggctgggcgtagtggctcgcgcctgtaatcccagcactttgggaggccgaggcgggtggatcacntgaggtcaggagttcgagaccagcctggccaacatggtgaaaccccgtctctactaaaaatacaaaaattagccggtgtggtggcaagcgatcctgtagtcccagctactcgggaggctgaggctggaggatcgcttgagtccaggagttctgggctgtagtgcgctatgccgatcgggtgtccgcactaagttcggcatcaatatggtgacctcccgggagcgggggaccaccaggttgcctaaggaggggtgaaccggcccaggtcggaaacggagcaggtcaaaactcccgtgctgatcagtagtgggatcgcgcctgtgcagtggcacaatcttggctcanngcaacctctgcctcccgggctcaagcaatcctcccacttcagtctaagtggctgggactacaggcacgtgccaccaggcccagctaattttngtgttttgttagagatgaggtttgccatattgcccaggctcgtcttgaacaccggggctcaaggaatctgcccatcttcgcctcccaaagttctgagatagcaggtgtgagtcatcatgcccagcctccttgaagtttactaacaatngggataactgagggaagagaagtgacaattccactcagtctattagaggtctggatatnnggtagccacacaataactctaacttgacttctaaccattctatcttatgatttggaggctgtcttctgccagatttcgtggcttgagatgatatcttcgaacccttctttcactacctttctacccttaatgtgccaagcttgaacaggattnnattctgancactnntcgcctctgtgcgtccnagtactggtcactcgcncatcagtnttcagtgaaaccaattgggcac

SEQ ID NO: 416360 - DNA, 576 bp, Homo sapiens
  misc_feature (106)..(106): n is a, c, g, or t
  misc_feature (528)..(528): n is a, c, g, or t
tatcgctgctccggtggtatcctcctctttaaatgggggtataggctgggtgggtgttcacgcctgtaatcccagcactttgggaggccgaggcgggtggatcacntgaggtcaggagttcgagaccagcctggccaacatggtgaaaccccgtctctactaaaaatacaaaaattactgtagtcccagctactcgggaggctgaggctggaggatcgcttgagtccaggagttctgggctgtagtgcgctatgccgatcgggtgtccgcactaagttcggcatcaatatggtgacctcccgggagcgggggaccaccaggttgcctaaggaggggtgaaccggcccaggtcggaaacggagcaggtcaaaactcccgtgctgatcagtagtgggatcgcgcctgtgaatagccactgcactccagcctgagcaacatagcgagaccccgtctctataaagaaattttaaaaattagctgggcatagtggcacgtgctgtagttccatctactaggtaggctaaggtngggaggatcacatgagcccagggagttttgaaggctgcagttgagctg

SEQ ID NO: 416361 - DNA, 773 bp, Homo sapiens
  misc_feature (619)..(619): n is a, c, g, or t
  misc_feature (648)..(648): n is a, c, g, or t
  misc_feature (652)..(652): n is a, c, g, or t
  misc_feature (656)..(657): n is a, c, g, or t
  misc_feature (660)..(660): n is a, c, g, or t
  misc_feature (665)..(665): n is a, c, g, or t
  misc_feature (671)..(672): n is a, c, g, or t
gcatttcgcatctggatcattgagtctcaaggctccggtaagaagtctcccatagtgttgaagattccctggcatttctgctcttattggagaatcccttcctgctaactcaggttcgatgtgccttgggaaaaagggaggtggtaaggtatttgtataaaattctcatgtcatcttgttctaatccactcctgtaatcccagcactttgggaggccgagatgggaggattactagagctcaggagtttgagaccatgggccacatagcgaaaccttgtctctataataattagctgggtgtctgtagtcccagctactcgggaggctgaggctggaggatcgcttgagtccaggagttctgggctgtagtgcgctatgccgatcgggtgtccgcactaagttcggcatcaatatggtgacctcccgggagcgggggaccaccaggttgcctaaggaggggtgaaccggcccaggtcggaaacggagcaggtcaaaactcccgtgctgatcagtagtgggatcgcgcctgtgaatagccactgcactccagcctgagcaacatagcaaagaccccgtctctactaaaacactaaaatagttagccagtcatggtggcgngtgcctgtaatcccagctactcagaggcngagncagnngantcgcntgaacnngggagcggaggttcagtgagccgagattgcgccatgcactccagctttgagcttggactgttgctccaactgcagcgtcagctcctccacagctcagggat

SEQ ID NO: 416362 - DNA, 600 bp, Homo sapiens
  misc_feature (122)..(122): n is a, c, g, or t
  misc_feature (449)..(449): n is a, c, g, or t
  misc_feature (453)..(453): n is a, c, g, or t
  misc_feature (465)..(465): n is a, c, g, or t
  misc_feature (469)..(469): n is a, c, g, or t
  misc_feature (472)..(473): n is a, c, g, or t
  misc_feature (475)..(475): n is a, c, g, or t
  misc_feature (491)..(491): n is a, c, g, or t
  misc_feature (496)..(496): n is a, c, g, or t
  misc_feature (498)..(498): n is a, c, g, or t
  misc_feature (505)..(505): n is a, c, g, or t
  misc_feature (510)..(510): n is a, c, g, or t
  misc_feature (583)..(583): n is a, c, g, or t
tgaggttaaagcagacatttaatcggcaaaaaaaatttaaatagaattaaatattcaggctgggcgtagtggctcgcgcctgtaatcccagcactttgggaggccgaggcgggtggatcacntgaggtcaggagttcgagaccagcctggccaacatggtgaaaccccgtctctactaaaaatacaaaaattagccggtgtggtggcaagcgatcctgtagtcccagctactcgggaggctgaggctggaggatcgcttgagtccaggagttctgggctgtagtgcgctatgccgatcgggtgtccgcactaagttcggcatcaatatggtgacctcccgggagcgggggaccaccaggttgcctaaggaggggtgaaccggcccaggtcggaaacggagcaggtcaaaactcccgtgctgatcagtagtgggatcgcgcctgtgagcnaatntttgtatttttngtanagnngnggtttcaccatgttgnccagncnggtctcnaactnctgacccagcagtcctcccacctccgcctcccaaagtgtttaggattacaggcgtgagccattgcactccgtnaaggatcctctagatcg

SEQ ID NO: 416363 - DNA, 615 bp, Homo sapiens
  misc_feature (122)..(122): n is a, c, g, or t
tgaggttaaagcagacatttaatcggcaaaaaaaatttaaatagaattaaatattcaggctgggcgtagtggctcgcgcctgtaatcccagcactttgggaggccgaggcgggtggatcacntgaggtcaggagttcgagaccagcctggccaacatggtgaaaccccgtctctactaaaaatacaaaaattagccggtgtggtggcaagcgatcctgtagtcccagctactcgggaggctgaggctggaggatcgcttgagtccaggagttctgggctgtagtgcgctatgccgatcgggtgtccgcactaagttcggcatcaatatggtgacctcccgggagcgggggaccaccaggttgcctaaggaggggtgaaccggcccaggtcggaaacggagcaggtcaaaactcccgtgctgatcagtagtggctattcacagatgcgaacatagtacactgcagcctccaactcctagcctcaagtgatcctcctgtctcaacctcccaagtaggattacaagcatgcgccgacgatgcccagaatccagaactttgtctatcactctccccaacaacctagatgtgaaaacagaataaacttcacccagaaaaa

SEQ ID NO: 416364 - DNA, 580 bp, Homo sapiens
  misc_feature (122)..(122): n is a, c, g, or t
tgaggttaaagcagacatttaatcggcaaaaaaaatttaaatagaattaaatattcaggctgggcgtagtggctcgcgcctgtaatcccagcactttgggaggccgaggcgggtggatcacntgaggtcaggagttcgagaccagcctggccaacatggtgaaaccccgtctctactaaaaatacaaaaattagccggtgtggtggcaagcgatcctgtagtcccagctactcgggaggctgaggctggaggatcgcttgagtccaggagttctgggctgtagtgcgctatgccgatcgggtgtccgcactaagttcggcatcaatatggtgacctcccgggagcgggggaccaccaggttgcctaaggaggggtgaaccggcccaggtcggaaacggagcaggtcaaaactcccgtgctgatcagtagctcgctatgttgcccaggctggagtgcagtggctattcacaggcgcgatcccactactgatcagcacgggagttttgacctgctccgtttccgacctgggccggttcacccgtcgacgcgtccgcgaatttaagtagtagtaggcggccgc

SEQ ID NO: 416365 - DNA, 1266 bp, Homo sapiens
  misc_feature (122)..(122): n is a, c, g, or t
  misc_feature (433)..(433): n is a, c, g, or t
tgaggttaaagcagacatttaatcggcaaaaaaaatttaaatagaattaaatattcaggctgggcgtagtggctcgcgcctgtaatcccagcactttgggaggccgaggcgggtggatcacntgaggtcaggagttcgagaccagcctggccaacatggtgaaaccccgtctctactaaaaatacaaaaattagccggtgtggtggcaagcgatcctgtagtcccagctactcgggaggctgaggctggaggatcgcttgagtccaggagttctgggctgtagtgcgctatgccgatcgggtgtccgcactaagttcggcatcaatatggtgacctcccgggagcgggggaccaccaggttgcctaaggaggggtgaaccggcccaggtcggaaacggagcaggtcaaaactcccgtgctgatcagtagtggnatcgcgcagtggtgtgatcacagctcactgcagccttgatctcccaggctcaattgatcccctcgccacagtctcctgaacagctgggactacaggtgcacaccaccacgctcggctaatatatatattttttaactttttagtagacatgaggtctcactatgttacccagacttgtctcaaactcctgagcttaagctcttctcctaccttgcaagtttatacgtttctcttctaaaatatattttatctccttgattgaacaacttcacgaaagcacactttgtgtatttttgccagcatctggaagatgtaaacctatcgcacagcagactgttcaactaaatgttgacgtgcttgagacaaaacttgcttaatttcttcaaggcaaggttcggcacaaacttacctctttacttcgtacttataacacacgaagctcaaaacccctttactaactagatctagcaagcacagtctatgcactgcagcagtagactcacttagtagctgcttgatatttccagcgagcttactgtacaaactttctaactcggctttaaactagacccaaacctaacttccccacatttcacacttcacgacatgacgaatccactaggcatctactcttaaccttttcactgtcaccacacaacttctaactcatggctccattagaacacattttgccctgactgcgctcctcaccccttacacctacgtataacgacaaccaccacagaccccacaatccctgaattttgcctggatgcccacacctgctcgcctcccagcctcttcaacctgctcatcttacatcgtcctcccga

SEQ ID NO: 416366 - DNA, 481 bp, Homo sapiens
  misc_feature (122)..(122): n is a, c, g, or t
  misc_feature (439)..(439): n is a, c, g, or t
  misc_feature (443)..(443): n is a, c, g, or t
  misc_feature (460)..(460): n is a, c, g, or t
  misc_feature (469)..(469): n is a, c, g, or t
  misc_feature (474)..(475): n is a, c, g, or t
  misc_feature (477)..(477): n is a, c, g, or t
tgaggttaaagcagacatttaatcggcaaaaaaaatttaaatagaattaaatattcaggctgggcgtagtggctcgcgcctgtaatcccagcactttgggaggccgaggcgggtggatcacntgaggtcaggagttcgagaccagcctggccaacatggtgaaaccccgtctctactaaaaatacaaaaattagccggtgtggtggcaagcgatcctgtagtcccagctactcgggaggctgaggctggaggatcgcttgagtccaggagttctgggctgtagtgcgctatgccgatcgggtgtccgcactaagttcggcatcaatatggtgacctcccgggagcgggggaccaccaggttgcctaaggaggggtgaaccggcccaggtcggaaacggagcaggtcaaaactcccgtgctgatcagtagtgggatcgcnccantcactccagcctgggcnacaagagcnaaacnncntctc

SEQ ID NO: 416367 - DNA, 742 bp, Homo sapiens
  misc_feature (122)..(122): n is a, c, g, or t
  misc_feature (451)..(452): n is a, c, g, or t
tgaggttaaagcagacatttaatcggcaaaaaaaatttaaatagaattaaatattcaggctgggcgtagtggctcgcgcctgtaatcccagcactttgggaggccgaggcgggtggatcacntgaggtcaggagttcgagaccagcctggccaacatggtgaaaccccgtctctactaaaaatacaaaaattagccggtgtggtggcaagcgatcctgtagtcccagctactcgggaggctgaggctggaggatcgcttgagtccaggagttctgggctgtagtgcgctatgccgatcgggtgtccgcactaagttcggcatcaatatggtgacctcccgggagcgggggaccaccaggttgcctaaggaggggtgaaccggcccaggtcggaaacggagcaggtcaaaactcccgtgctgatcagtagcagtggcacaatcttggctcanngcaacctctgcctcccgggctcaagcaatcctcccacttcagcctctcccagcactgggattataggtgtgagccactgtgcctggctattatttttcttttcaagacccataggaattgttattgttgctttaagccattgatgtttactagatttacccaaatgttacctctttctatatccttcattccttcttccttgtcagatcaccctgtgataccaattccttacaccttttaaatgtttctttaatgagaatcttccgtagtaaactcagtttgtccgaaaa

SEQ ID NO: 416368 - DNA, 472 bp, Homo sapiens
  misc_feature (122)..(122): n is a, c, g, or t
tgaggttaaagcagacatttaatcggcaaaaaaaatttaaatagaattaaatattcaggctgggcgtagtggctcgcgcctgtaatcccagcactttgggaggccgaggcgggtggatcacntgaggtcaggagttcgagaccagcctggccaacatggtgaaaccccgtctctactaaaaatacaaaaattagccggtgtggtggcaagcgatcctgtagtcccagctactcgggaggctgaggctggaggatcgcttgagtccaggagttctgggctgtagtgcgctatgccgatcgggtgtccgcactaagttcggcatcaatatggtgacctcccgggagcgggggaccaccaggttgcctaaggaggggtgaaccggcccaggtcggaaacggagcaggtcaaaactcccgtgctgatcagtagtgatcaggagatgtgtgtaatgacctactggtgtcccctaatt

SEQ ID NO: 416369 - DNA, 825 bp, Homo sapiens
  misc_feature (122)..(122): n is a, c, g, or t
tgaggttaaagcagacatttaatcggcaaaaaaaatttaaatagaattaaatattcaggctgggcgtagtggctcgcgcctgtaatcccagcactttgggaggccgaggcgggtggatcacntgaggtcaggagttcgagaccagcctggccaacatggtgaaaccccgtctctactaaaaatacaaaaattagccggtgtggtggcaagcgatcctgtagtcccagctactcgggaggctgaggctggaggatcgcttgagtccaggagttctgggctgtagtgcgctatgccgatcgggtgtccgcactaagttcggcatcaatatggtgacctcccgggagcgggggaccaccaggttgcctaaggaggggtgaaccggcccaggtcggaaacggagcaggtcaaaactcccgtgctgatcagtagtggtgcaatcttggctcactgcaacttccgtctcccggaaggatgggccggtctcggagccggagctcgtcccgctccaagcacaccaagagcagcaagcacaacaagaagcgcagccggtcccggtcgcgatcccgggacaaggagcgcgtgcggaagcgttccaaatctcgggaaagtaaacggaaccggcggcgggagtcgcggtcccgttcgcgctccaccaacacggccgtgtcccggcgcgagcgggaccgggagcgcgcctcgtccccgcccgaccgcatcgacatcttcgggcgcacggtgagcaagcgcagcagcctggacgagaagcagaagcgagaggaggaggagaagaaagcggagttcgagcggcagcgaaaaattcgacag

SEQ ID NO: 416370 - DNA, 559 bp, Homo sapiens
  misc_feature (122)..(122): n is a, c, g, or t
  misc_feature (433)..(433): n is a, c, g, or t
tgaggttaaagcagacatttaatcggcaaaaaaaatttaaatagaattaaatattcaggctgggcgtagtggctcgcgcctgtaatcccagcactttgggaggccgaggcgggtggatcacntgaggtcaggagttcgagaccagcctggccaacatggtgaaaccccgtctctactaaaaatacaaaaattagccggtgtggtggcaagcgatcctgtagtcccagctactcgggaggctgaggctggaggatcgcttgagtccaggagttctgggctgtagtgcgctatgccgatcgggtgtccgcactaagttcggcatcaatatggtgacctcccgggagcgggggaccaccaggttgcctaaggaggggtgaaccggcccaggtcggaaacggagcaggtcaaaactcccgtgctgatcagtagtggncgcgcagtgcctgtctgtgtgccgacttctgtctctctctcacgtctctctctctctctctcgcatgggatcgcgcccacaacccacgcgcccacaacccagcgcccacgacccccgcgcccacaa

SEQ ID NO: 416371 - DNA, 584 bp, Homo sapiens
  misc_feature (122)..(122): n is a, c, g, or t
  misc_feature (433)..(433): n is a, c, g, or t
  misc_feature (437)..(437): n is a, c, g, or t
  misc_feature (449)..(449): n is a, c, g, or t
  misc_feature (453)..(453): n is a, c, g, or t
  misc_feature (456)..(457): n is a, c, g, or t
  misc_feature (459)..(459): n is a, c, g, or t
  misc_feature (475)..(475): n is a, c, g, or t
  misc_feature (480)..(480): n is a, c, g, or t
  misc_feature (482)..(482): n is a, c, g, or t
  misc_feature (489)..(489): n is a, c, g, or t
  misc_feature (494)..(494): n is a, c, g, or t
  misc_feature (567)..(567): n is a, c, g, or t
tgaggttaaagcagacatttaatcggcaaaaaaaatttaaatagaattaaatattcaggctgggcgtagtggctcgcgcctgtaatcccagcactttgggaggccgaggcgggtggatcacntgaggtcaggagttcgagaccagcctggccaacatggtgaaaccccgtctctactaaaaatacaaaaattagccggtgtggtggcaagcgatcctgtagtcccagctactcgggaggctgaggctggaggatcgcttgagtccaggagttctgggctgtagtgcgctatgccgatcgggtgtccgcactaagttcggcatcaatatggtgacctcccgggagcgggggaccaccaggttgcctaaggaggggtgaaccggcccaggtcggaaacggagcaggtcaaaactcccgtgctgatcagtagagcnaatntttgtatttttngtanagnngnggtttcaccatgttgnccagncnggtctcnaactnctgacccagcagtcctcccacctccgcctcccaaagtgtttaggattacaggcgtgagccattgcactccgtnaaggatcctctagatcg

SEQ ID NO: 416372 - DNA, 774 bp, Homo sapiens
  misc_feature (648)..(648): n is a, c, g, or t
tattcgtcaagaagagagttacattccccaatctaggtgtttgaaagaagaatatccctagtaaatgacattgaagcttaaacctaaactatgtatagcactcagctagaaaaaacaggccagaaagaatatttcaggtggagagaaacacatgttttcaggcccaaagctggagaaccaggtgagtttaaagaactgaaagaggtttagtgattaccatgttgaaccaaagggggcatgtggaatgaataagaagaatggttttgtagattgaattctctgcagccaactccatcaagaggtagaggtcaggcatggtggttcactttggaaggccgaggtgggcaggagttcatgatcagcctgggcaaaaaagtgagaacccatctctacccaaaaaaatgttttaattagctgactgtggtggtatctgtagtcccagctactcgggaggctgaggctggaggatcgcttgagtccaggagttctgggctgtagtgcgctatgccgatcgggtgtccgcactaagttcggcatcaatatggtgacctcccgggagcgggggaccaccaggttgcctaaggaggggtgaaccggcccaggtcggaaacggagcaggtcaaaactcccgtgctgatcagtagtggncgcgcagtgcctgtctgtgtgccgacttctgtctctctctcacgtctctctctctctctctcgcatgggatcgcgcccacaacccacgcgcccacaacccagcgcccacgacccccgcgcccacaa

SEQ ID NO: 416373 - DNA, 958 bp, Homo sapiens
  misc_feature (728)..(728): n is a, c, g, or t
cgagtggctgccccacaaaatgcctgcttctctgcggaatcctactgttcttcacatgctctctaataccatcttttcatatccactttctcttccatgttgaaaaattaaattgacaggctggattctgcaaagatctttggacatttaagtatcttcgaccggcgcgaaaagaggcggcctgaccttggaagtgggacggggtcctgcagcgggtccttccggcgggtgacattcagccggcggttcggggcgacggactctccattccagaaccatggcccaatttgtccgtaaccttgtggagaagaccccggcgctggtgaacgctgctgtgacttactcgaagcctcgattggccacattttggtactacgccaaggttgagctggttcctcccacccctgctgagatccctagagctattcagagcctgaaaaaaatagtcaatagtgctcagactggtagcttcaaacagctcacagttaaggaagctgtgctgaatggtttggtggccactgaggtgttgatgtggttttatgtcggagagattataggcaagcggggcatcattggctatgatgtttgaagaccaatctttaacatctgattatatttgatttattatttgagtgttgttggaccatgtgtgatcagactgctatctgaataaaataagatttgtcaaaactcaaaaaaaaaaaaaaaaaaaaaaaaaaaaatttttngggggctgtgggccccggaaaaagttttaaaacacttgggggggggggggggcccagtgggtaccgtgaccgtgggccacaaggggtcccaagggaaccggggccggaccacggcgtgggttctccccaataaaaaagcccggggcaaccggaggcgtttggaaaatccgagggggtccgagggcaagggcccacaagagggccaggagcgaaaatcgggcggggggggc

SEQ ID NO: 416374 - DNA, 381 bp, Homo sapiens
ctactactactaaattaacggccgctcgacctggttcctcccacccctgctgagatccctagagctattcagagcctgaaaaaaatagtcaatagtgctcagactggtagcttcaaacagctcacagttaaggaagctgtgctgaatggtttggtggccactgaggtgttgatgtggttttatgtcggagagattataggcaagcggggcatcattggctatgatgtttgaagaccaatctttaacatctgattatatttgatttattatttgagtgttgttggaccatgtgtgatcagactgctatctgaataaaataagatttgtcaaaactcaaaaaaaagtcgacgcggccgcaatttagtagtagtaggcggccgc

SEQ ID NO: 416375 - DNA, 1338 bp, Homo sapiens
cgagtggctgccccacaaaatgcctgcttctctgcggaatcctactgttcttcacatgctctctaataccatcttttcatatccactttctcttccatgttgaaaaattaaattgacaggctggattctgcaaagatctttggacatttaagtatcttcgaccggcgcgaaaagaggcggcctgaccttggaagtgggacggggtcctgcagcgggtccttccggcgggtgacattcagccggcggttcggggcgacggactctccattccagaaccatggcccaatttgtccgtaaccttgtggagaagaccccggcgctggtgaacgctgctgtgacttactcgaagcctcgattggccacattttggtactacgccaaggttgagctggttcctcccacccctgctgagatccctagagctattcagagcctgaaaaaaatagtcaatagtgctcagactggtagcttcaaacagctcacagttaaggaagctgtgctgaatggtttggtggccactgaggtgttgatgtggttttatgtcggagagattataggcaagcggggcatcattggctatgatgtttgaagaccaatctttaacatctgattatatttgatttattatttgagtgttgttggaccatgtgtgatcagactgctatctgaataaaataagatttgtcaaaactcagtgttttctccatcagatactccatgaaaggtcacaatttctcttgatattaagctgggttgtctttaaacaaccctaaatacacgtctgtttagcccgcaattggaaaggatatatgtggcaatattaacctggtacatgaatatatggggataacattttaatttgaaggtttggaatatatatatttaagctttatttccagaacagtgagggttaggtcttgggaaaactataacttgccaaagtagaagaaatagtagtaccatatgccaaagtgatagagatgaatcatgtcagtagttagaataacatttcaactgttttctttgctaaaatcacagaaagaccctattgacaacatctatgtctgtaaaaatgttagagtacttgtcatcttgaatatagcctccccaagagagaacagggtggtattctaagtatgtttctttgtaacatctttagcagtaggacagagccatacatgtgaaatctgatttttatgtgtgttattcgtttgtctggttttactacctttgcaaaaacaaaataccccaaagatatttaaacaaggttataatttagcatcttccctggatctaaatagtatattatatcctgaaataaatgaaatgattgctata

SEQ ID NO: 416376 - DNA, 1146 bp, Homo sapiens
cgagctcggtacccctccttccctgccttccggcgggtgacattcagccggcggttcggggcgacggactctccattccagaaccatggcccaatttgtccgtaaccttgtggagaagaccccggcgctggtgaacgctgctgtgacttactcgaagcctcgattggccacattttggtactacgccaaggttgagctggttcctcccacccctgctgagatccctagagctattcagagcctgaaaaaaatagtcaatagtgctcagactggtagcttcaaacagctcacagttaaggaagctgtgctgaatggtttggtggccactgaggtgttgatgtggttttatgtcggagagattataggcaagcggggcatcattggctatgatgtttgaagaccaatctttaacatctgattatatttgatttattatttgagtgttgttggaccatgtgtgatcagactgctatctgaataaaataagatttgtcaaaactcagtgttttctccatcagatactccatgaaaggtcacaatttctcttgatattaagctgggttgtctttaaacaaccctaaatacacgtctgtttagcccgcaattggaaaggatatatgtggcaatattaacctggtacatgaatatatggggataacattttaatttgaaggtttggaatatatatatttaagctttatttccagaacagtgagggttaggtcttgggaaaactataacttgccaaagtagaagaaatagtagtaccatatgccaaagtgatagagatgaatcatgtcagtagttagaataacatttcaactgttttctttgctaaaatcacagaaagaccctattgacaacatctatgtctgtaaaaatgttagagtacttgtcatcttgaatatagcctccccaagagagaacagggtggtattctaagtatgtttctttgtaacatctttagcagtaggacagagccatacatgtgaaatctgatttttatgtgtgttattcgtttgtctggttttactacctttgcaaaaacaaaataccccaaagatatttaaacaaggttataatttagcatcttccctggatctaaatagtatattatatcctgaaataaatgaaatgattgctata

SEQ ID NO: 416377 - DNA, 1148 bp, Homo sapiens
ctgaggatccccgactacctacttccgccttccggcgggtgacattcagccggcggttcggggcgacggactctccattccagaaccatggcccaatttgtccgtaaccttgtggagaagaccccggcgctggtgaacgctgctgtgacttactcgaagcctcgattggccacattttggtactacgccaaggttgagctggttcctcccacccctgctgagatccctagagctattcagagcctgaaaaaaatagtcaatagtgctcagactggtagcttcaaacagctcacagttaaggaagctgtgctgaatggtttggtggccactgaggtgttgatgtggttttatgtcggagagattataggcaagcggggcatcattggctatgatgtttgaagaccaatctttaacatctgattatatttgatttattatttgagtgttgttggaccatgtgtgatcagactgctatctgaataaaataagatttgtcaaaactcagtgttttctccatcagatactccatgaaaggtcacaatttctcttgatattaagctgggttgtctttaaacaaccctaaatacacgtctgtttagcccgcaattggaaaggatatatgtggcaatattaacctggtacatgaatatatggggataacattttaatttgaaggtttggaatatatatatttaagctttatttccagaacagtgagggttaggtcttgggaaaactataacttgccaaagtagaagaaatagtagtaccatatgccaaagtgatagagatgaatcatgtcagtagttagaataacatttcaactgttttctttgctaaaatcacagaaagaccctattgacaacatctatgtctgtaaaaatgttagagtacttgtcatcttgaatatagcctccccaagagagaacagggtggtattctaagtatgtttctttgtaacatctttagcagtaggacagagccatacatgtgaaatctgatttttatgtgtgttattcgtttgtctggttttactacctttgcaaaaacaaaataccccaaagatatttaaacaaggttataatttagcatcttccctggatctaaatagtatattatatcctgaaataaatgaaatgattgctata

SEQ ID NO: 416378 - DNA, 1532 bp, Homo sapiens
cgagtggctgccccacaaaatgcctgcttctctgcggaatcctactgttcttcacatgctctctaataccatcttttcatatccactttctcttccatgttgaaaaattaaattgacaggctggattctgcaaagatctttggacatttaagtatcttcgaccggcgcgaaaagaggcggcctgaccttggaagtgggacggggtcctgcagcgggtccttccggcgggtgacattcagccggcggttcggggcgacggactctccattccagaaccatggcccaatttgtccgtaaccttgtggagaagaccccggcgctggtgaacgctgctgtgacttactcgaagcctcgattggccacattttggtactacgccaaggttgagctggttcctcccacccctgctgagatccctagagctattcagagcctgaaaaaaatagtcaatagtgctcagactggtagcttcaaacagctcacagttaaggaagctgtgctgaatggtttggtggccactgaggtgttgatgtggttttatgtcggagagattataggcaagcggggcatcattggctatgatgtttgaagaccaatctttaacatctgattatatttgatttattatttgagtgttgttggaccatgtgtgatcagactgctatctgaataaaataagatttgtcaaaactcagtgttttctccatcagatactccatgaaaggtcacaatttctcttgatattaagctgggttgtctttaaacaaccctaaatacacgtctgtttagcccgcaattggaaaggatatatgtggcaatattaacctggtacatgaatatatggggataacattttaatttgaaggtttggaatatatatatttaagctttatttccagaacagtgagggttaggtcttgggaaaactataacttgccaaagtagaagaaatagtagtaccatatgccaaagtgatagagatgaatcatgtcagtagttagaataacatttcaactgttttctttgctaaaatcacagaaagaccctattgacaacatctatgtctgtaaaaatgttagagtacttgtcatcttgaatatagcctccccaagagagaacagggtggtattctaagtatgtttctttgtaacatctttagcagtaggacagagccatacatgtgaaatctgatttttatgtgtgttattcgtttgtctggttttactacctttgcaaaaacaaaataccccaaagatatttaaacaaggttataatttagcatcttccctggatctaaatagtatattatatcctgaaataaatgaaatgattgctataaaaaaaaaaaaaaaaaaaaaaaaaaaaaaaaaaaaaaaaaaaaagaaaaaaaaaaaaaaaaaaagagaagagagagagagagagaaaaaaaaaaagagaagaggagagagagaggaggagagggtggaagagggggagtggaagagaggaggaaagaagggggagggggggaggggggggggtggggggaaagt

SEQ ID NO: 416379 - DNA, 718 bp, Homo sapiens
cgagtggctgccccacaaaatgcctgcttctctgcggaatcctactgttcttcacatgctctctaataccatcttttcatatccactttctcttccatgttgaaaaattaaattgacaggctggattctgcaaagatctttggacatttaagtatcttcgaccggcgcgaaaagaggcggcctgaccttggaagtgggacggggtcctgcagcgggtccttccggcgggtgacattcagccggcggttcggggcgacggactctccattccagaaccatggcccaatttgtccgtaaccttgtggagaagaccccggcgctggtgaacgctgctgtgacttactcgaagcctcgattggccacattttggtactacgccaaggttgagctggttcctcccacccctgctgagatccctagagctattcagagcctgaaaaaaatagtcaatagtgctcagactggtagcttcaaacagctcacagttaaggaagctgtgctgaatggtttggtggccactgaggtgttgatgtggttttatgtcggagagattataggcaagcggggcatcattggctatgatgtttgaagaccaatctttaacatctgattatatttgatttattatttgagtgttgttggaccatgtgtgatcagactgctatctgaataaaataagatttgtcaaaactccacccccacgtcgtcttatccttgt

SEQ ID NO: 416380 - DNA, 862 bp, Homo sapiens
  misc_feature (778)..(778): n is a, c, g, or t
cgagtggctgccccacaaaatgcctgcttctctgcggaatcctactgttcttcacatgctctctaataccatcttttcatatccactttctcttccatgttgaaaaattaaattgacaggctggattctgcaaagatctttggacatttaagtatcttcgaccggcgcgaaaagaggcggcctgaccttggaagtgggacggggtcctgcagcgggtccttccggcgggtgacattcagccggcggttcggggcgacggactctccattccagaaccatggcccaatttgtccgtaaccttgtggagaagaccccggcgctggtgaacgctgctgtgacttactcgaagcctcgattggccacattttggtactacgccaaggttgagctggttcctcccacccctgctgagatccctagagctattcagagcctgaaaaaaatagtcaatagtgctcagactggtagcttcaaacagctcacagttaaggaagctgtgctgaatggtttggtggccactgaggtgttgatgtggttttatgtcggagagattataggcaagcggggcatcattggctatgatgtttgaagaccaatctttaacatctgattatatttgatttattatttgagtgttgttggaccatgtgtgatcagactgctatctgaataaaataagatttgtcaaaactcctaccctgtcgggggcgctttccctgttggccgggggggacaacttgtttaaataccaaggaagaggttttagaaggagaggcgntggattgaccccattttggataattttgtggttaccgctcccataggtgtaaaaggctggtttgtgtttttgttttacccctac

SEQ ID NO: 416381 - DNA, 729 bp, Homo sapiens
cgagtggctgccccacaaaatgcctgcttctctgcggaatcctactgttcttcacatgctctctaataccatcttttcatatccactttctcttccatgttgaaaaattaaattgacaggctggattctgcaaagatctttggacatttaagtatcttcgaccggcgcgaaaagaggcggcctgaccttggaagtgggacggggtcctgcagcgggtccttccggcgggtgacattcagccggcggttcggggcgacggactctccattccagaaccatggcccaatttgtccgtaaccttgtggagaagaccccggcgctggtgaacgctgctgtgacttactcgaagcctcgattggccacattttggtactacgccaaggttgagctggttcctcccacccctgctgagatccctagagctattcagagcctgaaaaaaatagtcaatagtgctcagactggtagcttcaaacagctcacagttaaggaagctgtgctgaatggtttggtggccactgaggtgttgatgtggttttatgtcggagagattataggcaagcggggcatcattggctatgatgtttgaagaccaatctttaacatctgattatatttgatttattatttgagtgttgttggaccatgtgtgatcagactgctatctgaataaaataagatttgtcaaaactcaaaaaaataaaacaaattggcctagattggtcttca

SEQ ID NO: 416382 - DNA, 1135 bp, Homo sapiens
tttttaggcccatttgaattttttggtgacattcagccggcggttcggggcgacggactctccattccagaaccatggcccaatttgtccgtaaccttgtggagaagaccccggcgctggtgaacgctgctgtgacttactcgaagcctcgattggccacattttggtactacgccaaggttgagctggttcctcccacccctgctgagatccctagagctattcagagcctgaaaaaaatagtcaatagtgctcagactggtagcttcaaacagctcacagttaaggaagctgtgctgaatggtttggtggccactgaggtgttgatgtggttttatgtcggagagattataggcaagcggggcatcattggctatgatgtttgaagaccaatctttaacatctgattatatttgatttattatttgagtgttgttggaccatgtgtgatcagactgctatctgaataaaataagatttgtcaaaactcagtgttttctccatcagatactccatgaaaggtcacaatttctcttgatattaagctgggttgtctttaaacaaccctaaatacacgtctgtttagcccgcaattggaaaggatatatgtggcaatattaacctggtacatgaatatatggggataacattttaatttgaaggtttggaatatatatatttaagctttatttccagaacagtgagggttaggtcttgggaaaactataacttgccaaagtagaagaaatagtagtaccatatgccaaagtgatagagatgaatcatgtcagtagttagaataacatttcaactgttttctttgctaaaatcacagaaagaccctattgacaacatctatgtctgtaaaaatgttagagtacttgtcatcttgaatatagcctccccaagagagaacagggtggtattctaagtatgtttctttgtaacatctttagcagtaggacagagccatacatgtgaaatctgatttttatgtgtgttattcgtttgtctggttttactacctttgcaaaaacaaaataccccaaagatatttaaacaaggttataatttagcatcttccctggatctaaatagtatattatatcctgaaataaatgaaatgattgctata

SEQ ID NO: 416383 - DNA, 1147 bp, Homo sapiens
  misc_feature (18)..(18): n is a, c, g, or t
taaggtatgtctaggtcngtggccgggtgttaatttcgtgccgatgggccggcggttcggggcgacggactctccattccagaaccatggcccaatttgtccgtaaccttgtggagaagaccccggcgctggtgaacgctgctgtgacttactcgaagcctcgattggccacattttggtactacgccaaggttgagctggttcctcccacccctgctgagatccctagagctattcagagcctgaaaaaaatagtcaatagtgctcagactggtagcttcaaacagctcacagttaaggaagctgtgctgaatggtttggtggccactgaggtgttgatgtggttttatgtcggagagattataggcaagcggggcatcattggctatgatgtttgaagaccaatctttaacatctgattatatttgatttattatttgagtgttgttggaccatgtgtgatcagactgctatctgaataaaataagatttgtcaaaactcagtgttttctccatcagatactccatgaaaggtcacaatttctcttgatattaagctgggttgtctttaaacaaccctaaatacacgtctgtttagcccgcaattggaaaggatatatgtggcaatattaacctggtacatgaatatatggggataacattttaatttgaaggtttggaatatatatatttaagctttatttccagaacagtgagggttaggtcttgggaaaactataacttgccaaagtagaagaaatagtagtaccatatgccaaagtgatagagatgaatcatgtcagtagttagaataacatttcaactgttttctttgctaaaatcacagaaagaccctattgacaacatctatgtctgtaaaaatgttagagtacttgtcatcttgaatatagcctccccaagagagaacagggtggtattctaagtatgtttctttgtaacatctttagcagtaggacagagccatacatgtgaaatctgatttttatgtgtgttattcgtttgtctggttttactacctttgcaaaaacaaaataccccaaagatatttaaacaaggttataatttagcatcttccctggatctaaatagtatattatatcctgaaataaatgaaatgattgctata

SEQ ID NO: 416384 - DNA, 1147 bp, Homo sapiens
tctagaactagtggatccggctcgagtgttctcggagcactgtccgagccggcggttcggggcgacggactctccattccagaaccatggcccaatttgtccgtaaccttgtggagaagaccccggcgctggtgaacgctgctgtgacttactcgaagcctcgattggccacattttggtactacgccaaggttgagctggttcctcccacccctgctgagatccctagagctattcagagcctgaaaaaaatagtcaatagtgctcagactggtagcttcaaacagctcacagttaaggaagctgtgctgaatggtttggtggccactgaggtgttgatgtggttttatgtcggagagattataggcaagcggggcatcattggctatgatgtttgaagaccaatctttaacatctgattatatttgatttattatttgagtgttgttggaccatgtgtgatcagactgctatctgaataaaataagatttgtcaaaactcagtgttttctccatcagatactccatgaaaggtcacaatttctcttgatattaagctgggttgtctttaaacaaccctaaatacacgtctgtttagcccgcaattggaaaggatatatgtggcaatattaacctggtacatgaatatatggggataacattttaatttgaaggtttggaatatatatatttaagctttatttccagaacagtgagggttaggtcttgggaaaactataacttgccaaagtagaagaaatagtagtaccatatgccaaagtgatagagatgaatcatgtcagtagttagaataacatttcaactgttttctttgctaaaatcacagaaagaccctattgacaacatctatgtctgtaaaaatgttagagtacttgtcatcttgaatatagcctccccaagagagaacagggtggtattctaagtatgtttctttgtaacatctttagcagtaggacagagccatacatgtgaaatctgatttttatgtgtgttattcgtttgtctggttttactacctttgcaaaaacaaaataccccaaagatatttaaacaaggttataatttagcatcttccctggatctaaatagtatattatatcctgaaataaatgaaatgattgctata

SEQ ID NO: 416385 - DNA, 1423 bp, Homo sapiens
cggagatgttaagagtggtctcaaacatcatagccaatgatgccccgtggcctatgatctctccgacggtaaaaccacatcaacacctcaggggccagcaaaccattcagcacagcttccttaactgtgagctgttcgaagctaccagtctgagcactatggactatttttttcaggctctgaatagcttccggcgggtgacattcagccggcggttcggggcgacggactctccattccagaaccatggcccaatttgtccgtaaccttgtggagaagaccccggcgctggtgaacggtggcgcatattaaggaattgcaaactaatttttgtgatctaaaaagaaaagtaacaccaaggcattggcagttctgtttggaactatctcttagagctttgtgtctgcttaaaggctgctgtgacttactcgaagcctcgattggccacattttggtactacgccaaggttgagctggttcctcccacccctgctgagatccctagagctattcagagcctgaaaaaaatagtcaatagtgctcagactggtagcttcaaacagctcacagttaaggaagctgtgctgaatggtttggtggccactgaggtgttgatgtggttttatgtcggagagattataggcaagcggggcatcattggctatgatgtttgaagaccaatctttaacatctgattatatttgatttattatttgagtgttgttggaccatgtgtgatcagactgctatctgaataaaataagatttgtcaaaactcagtgttttctccatcagatactccatgaaaggtcacaatttctcttgatattaagctgggttgtctttaaacaaccctaaatacacgtctgtttagcccgcaattggaaaggatatatgtggcaatattaacctggtacatgaatatatggggataacattttaatttgaaggtttggaatatatatatttaagctttatttccagaacagtgagggttaggtcttgggaaaactataacttgccaaagtagaagaaatagtagtaccatatgccaaagtgatagagatgaatcatgtcagtagttagaataacatttcaactgttttctttgctaaaatcacagaaagaccctattgacaacatctatgtctgtaaaaatgttagagtacttgtcatcttgaatatagcctccccaagagagaacagggtggtattctaagtatgtttctttgtaacatctttagcagtaggacagagccatacatgtgaaatctgatttttatgtgtgttattcgtttgtctggttttactacctttgcaaaaacaaaataccccaaagatatttaaacaaggttataatttagcatcttccctggatctaaatagtatattatatcctgaaataaatgaaatgattgctata

SEQ ID NO: 416386 - DNA, 1369 bp, Homo sapiens
cggagatgttaagagtggtctcaaacatcatagccaatgatgccccgtggcctatgatctctccgacggtaaaaccacatcaacacctcaggggccagcaaaccattcagcacagcttccttaactgtgagctgttcgaagctaccagtctgagcactatggactatttttttcaggctctgaatagcttccggcgggtgacattcagccggcggttcggggcgacggactctccattccagaaccatggcccaatttgtccgtaaccttgtggagaagaccccggcgctggtgaacggtggcgcatattaaggaattgcaaactaatttttgtgatctaaaaagaaaagtaacaccaagctgctgtgacttactcgaagcctcgattggccacattttggtactacgccaaggttgagctggttcctcccacccctgctgagatccctagagctattcagagcctgaaaaaaatagtcaatagtgctcagactggtagcttcaaacagctcacagttaaggaagctgtgctgaatggtttggtggccactgaggtgttgatgtggttttatgtcggagagattataggcaagcggggcatcattggctatgatgtttgaagaccaatctttaacatctgattatatttgatttattatttgagtgttgttggaccatgtgtgatcagactgctatctgaataaaataagatttgtcaaaactcagtgttttctccatcagatactccatgaaaggtcacaatttctcttgatattaagctgggttgtctttaaacaaccctaaatacacgtctgtttagcccgcaattggaaaggatatatgtggcaatattaacctggtacatgaatatatggggataacattttaatttgaaggtttggaatatatatatttaagctttatttccagaacagtgagggttaggtcttgggaaaactataacttgccaaagtagaagaaatagtagtaccatatgccaaagtgatagagatgaatcatgtcagtagttagaataacatttcaactgttttctttgctaaaatcacagaaagaccctattgacaacatctatgtctgtaaaaatgttagagtacttgtcatcttgaatatagcctccccaagagagaacagggtggtattctaagtatgtttctttgtaacatctttagcagtaggacagagccatacatgtgaaatctgatttttatgtgtgttattcgtttgtctggttttactacctttgcaaaaacaaaataccccaaagatatttaaacaaggttataatttagcatcttccctggatctaaatagtatattatatcctgaaataaatgaaatgattgctata

SEQ ID NO: 416387 - DNA, 1110 bp, Homo sapiens
cacacatacagatccattccaacttgaaaaaaaaaaaaaaacttgaggcattggcagttctgtttggaactatctcttagagctttgtgtctgcttaaaggctgctgtgacttactcgaagcctcgattggccacattttggtactacgccaaggttgagctggttcctcccacccctgctgagatccctagagctattcagagcctgaaaaaaatagtcaatagtgctcagactggtagcttcaaacagctcacagttaaggaagctgtgctgaatggtttggtggccactgaggtgttgatgtggttttatgtcggagagattataggcaagcggggcatcattggctatgatgtttgaagaccaatctttaacatctgattatatttgatttattatttgagtgttgttggaccatgtgtgatcagactgctatctgaataaaataagatttgtcaaaactcagtgttttctccatcagatactccatgaaaggtcacaatttctcttgatattaagctgggttgtctttaaacaaccctaaatacacgtctgtttagcccgcaattggaaaggatatatgtggcaatattaacctggtacatgaatatatggggataacattttaatttgaaggtttggaatatatatatttaagctttatttccagaacagtgagggttaggtcttgggaaaactataacttgccaaagtagaagaaatagtagtaccatatgccaaagtgatagagatgaatcatgtcagtagttagaataacatttcaactgttttctttgctaaaatcacagaaagaccctattgacaacatctatgtctgtaaaaatgttagagtacttgtcatcttgaatatagcctccccaagagagaacagggtggtattctaagtatgtttctttgtaacatctttagcagtaggacagagccatacatgtgaaatctgatttttatgtgtgttattcgtttgtctggttttactacctttgcaaaaacaaaataccccaaagatatttaaacaaggttataatttagcatcttccctggatctaaatagtatattatatcctgaaataaatgaaatgattgctata

SEQ ID NO: 416388 - DNA, 693 bp, Homo sapiens
cgagtggctgccccacaaaatgcctgcttctctgcggaatcctactgttcttcacatgctctctaataccatcttttcatatccactttctcttccatgttgaaaaattaaattgacaggctggattctgcaaagatctttggacatttaagtatcttcgaccggcgcgaaaagaggcggcctgaccttggaagtgggacggggtcctgcagcgggtccttccggcgggtgacattcagccggcggttcggggcgacggactctccattccagaaccatggcccaatttgtccgtaaccttgtggagaagaccccggcgctggtgaacgctgctgtgacttactcgaagcctcgattggccacattttggtactacgccaaggttgagctggttcctcccacccctgctgagatccctagagctattcagagcctgaaaaaaatagtcaatagtgctcagactggtagcttcaaacagctcacagttaaggaagctgtgctgaatggtttggtggccactgaggtgttgatgtggttttatgtcggagagattataggcaagcggggcatcattggctatgatgtttgaagaccaatctttaacatctgattatatttgatttattatttgagtgttgttggaccatgtgtgatcagactgctatctgaatcagctccactctttcatcctct

SEQ ID NO: 416389 - DNA, 1286 bp, Homo sapiens
cgagtggctgccccacaaaatgcctgcttctctgcggaatcctactgttcttcacatgctctctaataccatcttttcatatccactttctcttccatgttgaaaaattaaattgacaggctggattctgcaaagatctttggacatttaagtatcttcgaccggcgcgaaaagaggcggcctgaccttggaagtgggacggggtcctgcagcgggtccttccggcgggtgacattcagccggcggttcggggcgacggactctccattccagaaccatggcccaatttgtccgtaaccttgtggagaagaccccggcgctggtgaacgctgctgtgacttactcgaagcctcgattggccacattttggtactacgccaaggttgagctggttcctcccacccctgctgagatccctagagctattcagagcctgaggaagctgtgctgaatggtttggtggccactgaggtgttgatgtggttttatgtcggagagattataggcaagcggggcatcattggctatgatgtttgaagaccaatctttaacatctgattatatttgatttattatttgagtgttgttggaccatgtgtgatcagactgctatctgaataaaataagatttgtcaaaactcagtgttttctccatcagatactccatgaaaggtcacaatttctcttgatattaagctgggttgtctttaaacaaccctaaatacacgtctgtttagcccgcaattggaaaggatatatgtggcaatattaacctggtacatgaatatatggggataacattttaatttgaaggtttggaatatatatatttaagctttatttccagaacagtgagggttaggtcttgggaaaactataacttgccaaagtagaagaaatagtagtaccatatgccaaagtgatagagatgaatcatgtcagtagttagaataacatttcaactgttttctttgctaaaatcacagaaagaccctattgacaacatctatgtctgtaaaaatgttagagtacttgtcatcttgaatatagcctccccaagagagaacagggtggtattctaagtatgtttctttgtaacatctttagcagtaggacagagccatacatgtgaaatctgatttttatgtgtgttattcgtttgtctggttttactacctttgcaaaaacaaaataccccaaagatatttaaacaaggttataatttagcatcttccctggatctaaatagtatattatatcctgaaataaatgaaatgattgctata

SEQ ID NO: 416390 - DNA, 714 bp, Homo sapiens
  misc_feature (657)..(658): n is a, c, g, or t
  misc_feature (686)..(686): n is a, c, g, or t
cgagtggctgccccacaaaatgcctgcttctctgcggaatcctactgttcttcacatgctctctaataccatcttttcatatccactttctcttccatgttgaaaaattaaattgacaggctggattctgcaaagatctttggacatttaagtatcttcgaccggcgcgaaaagaggcggcctgaccttggaagtgggacggggtcctgcagcgggtccttccggcgggtgacattcagccggcggttcggggcgacggactctccattccagaaccatggcccaatttgtccgtaaccttgtggagaagaccccggcgctggtgaacgctgctgtgacttactcgaagcctcgattggccacattttggtactacgccaaggttgagctggttcctcccacccctgctgagatccctagagctattcagagcctgaaaaaaatagtcaatagtgctcagactggtagcttcaaacagctcacagttaaggaagctgtgctgaatggtttggtggccactgaggtgttgatgtggttttatgtcggagagattataggcaagcggggcatcattggctatgatgtttgaagaccaatctttaacatctgattatatttgatttattatttgagtgttgttgtttttttggaccccanngtggtggatccagacctgctaatcctgntattaaaaattaaagggtttttgtcaaa

SEQ ID NO: 416391 - DNA, 1218 bp, Homo sapiens
cgagtggctgccccacaaaatgcctgcttctctgcggaatcctactgttcttcacatgctctctaataccatcttttcatatccactttctcttccatgttgaaaaattaaattgacaggctggattctgcaaagatctttggacatttaagtatcttcgaccggcgcgaaaagaggcggcctgaccttggaagtgggacggggtcctgcagcgggtccttccggcgggtgacattcagccggcggttcggggcgacggactctccattccagaaccatggcccaatttgtccgtaaccttgtggagaagaccccggcgctggtgaacgctgctgtgacttactcgaagcctcgattggccacattttaggaagctgtgctgaatggtttggtggccactgaggtgttgatgtggttttatgtcggagagattataggcaagcggggcatcattggctatgatgtttgaagaccaatctttaacatctgattatatttgatttattatttgagtgttgttggaccatgtgtgatcagactgctatctgaataaaataagatttgtcaaaactcagtgttttctccatcagatactccatgaaaggtcacaatttctcttgatattaagctgggttgtctttaaacaaccctaaatacacgtctgtttagcccgcaattggaaaggatatatgtggcaatattaacctggtacatgaatatatggggataacattttaatttgaaggtttggaatatatatatttaagctttatttccagaacagtgagggttaggtcttgggaaaactataacttgccaaagtagaagaaatagtagtaccatatgccaaagtgatagagatgaatcatgtcagtagttagaataacatttcaactgttttctttgctaaaatcacagaaagaccctattgacaacatctatgtctgtaaaaatgttagagtacttgtcatcttgaatatagcctccccaagagagaacagggtggtattctaagtatgtttctttgtaacatctttagcagtaggacagagccatacatgtgaaatctgatttttatgtgtgttattcgtttgtctggttttactacctttgcaaaaacaaaataccccaaagatatttaaacaaggttataatttagcatcttccctggatctaaatagtatattatatcctgaaataaatgaaatgattgctata

SEQ ID NO: 416392 - DNA, 1072 bp, Homo sapiens
gactacttaccttacaaaattgaaagttcaagggttctcagcagttgaagagaagtaatgttagtaattctcaactttgactaaaactgccttctagtttgaatagcatcttttatgttctttgtctccttaattctggaaaagaatagtttcaaatatatatatatatatataattatatatatatataaaaggtaccttaaaatgtatgcttcttttttcaggaagctgtgctgaatggtttggtggccactgaggtgttgatgtggttttatgtcggagagattataggcaagcggggcatcattggctatgatgtttgaagaccaatctttaacatctgattatatttgatttattatttgagtgttgttggaccatgtgtgatcagactgctatctgaataaaataagatttgtcaaaactcagtgttttctccatcagatactccatgaaaggtcacaatttctcttgatattaagctgggttgtctttaaacaaccctaaatacacgtctgtttagcccgcaattggaaaggatatatgtggcaatattaacctggtacatgaatatatggggataacattttaatttgaaggtttggaatatatatatttaagctttatttccagaacagtgagggttaggtcttgggaaaactataacttgccaaagtagaagaaatagtagtaccatatgccaaagtgatagagatgaatcatgtcagtagttagaataacatttcaactgttttctttgctaaaatcacagaaagaccctattgacaacatctatgtctgtaaaaatgttagagtacttgtcatcttgaatatagcctccccaagagagaacagggtggtattctaagtatgtttctttgtaacatctttagcagtaggacagagccatacatgtgaaatctgatttttatgtgtgttattcgtttgtctggttttactacctttgcaaaaacaaaataccccaaagatatttaaacaaggttataatttagcatcttccctggatctaaatagtatattatatcctgaaataaatgaaatgattgctata

SEQ ID NO: 416393 - DNA, 952 bp, Homo sapiens
caaaattataaagtgagttagagttccttgaagttggttgtatacgggaatatgacttggacaatctttaccagaagccatccggtaagcccctcagtcacactttccatgtagctgaccaggtgactacaggatgtggctgacagtgctcactgaaagaagagattataggcaagcggggcatcattggctatgatgtttgaagaccaatctttaacatctgattatatttgatttattatttgagtgttgttggaccatgtgtgatcagactgctatctgaataaaataagatttgtcaaaactcagtgttttctccatcagatactccatgaaaggtcacaatttctcttgatattaagctgggttgtctttaaacaaccctaaatacacgtctgtttagcccgcaattggaaaggatatatgtggcaatattaacctggtacatgaatatatggggataacattttaatttgaaggtttggaatatatatatttaagctttatttccagaacagtgagggttaggtcttgggaaaactataacttgccaaagtagaagaaatagtagtaccatatgccaaagtgatagagatgaatcatgtcagtagttagaataacatttcaactgttttctttgctaaaatcacagaaagaccctattgacaacatctatgtctgtaaaaatgttagagtacttgtcatcttgaatatagcctccccaagagagaacagggtggtattctaagtatgtttctttgtaacatctttagcagtaggacagagccatacatgtgaaatctgatttttatgtgtgttattcgtttgtctggttttactacctttgcaaaaacaaaataccccaaagatatttaaacaaggttataatttagcatcttccctggatctaaatagtatattatatcctgaaataaatgaaatgattgctata

SEQ ID NO: 416394 - DNA, 761 bp, Homo sapiens
  misc_feature (632)..(632): n is a, c, g, or t
  misc_feature (651)..(651): n is a, c, g, or t
  misc_feature (669)..(669): n is a, c, g, or t
  misc_feature (707)..(707): n is a, c, g, or t
  misc_feature (711)..(711): n is a, c, g, or t
  misc_feature (714)..(714): n is a, c, g, or t
  misc_feature (720)..(720): n is a, c, g, or t
  misc_feature (741)..(741): n is a, c, g, or t
  misc_feature (749)..(749): n is a, c, g, or t
cgagtggctgccccacaaaatgcctgcttctctgcggaatcctactgttcttcacatgctctctaataccatcttttcatatccactttctcttccatgttgaaaaattaaattgacaggctggattctgcaaagatctttggacatttaagtatcttcgaccggcgcgaaaagaggcggcctgaccttggaagtgggacggggtcctgcagcgggtccttccggcgggtgacattcagccggcggttcggggcgacggactctccattccagaaccatggcccaatttgtccgtaaccttgtggagaagaccccggcgctggtgaacgctgctgtgacttactcgaagcctcgattggccacattttggtactacgccaaggttgagctggttcctcccacccctgctgagatccctagagctattcagagcctgaaaaaaatagtcaatagtgctcagactggtagcttcaaacagctcacagttaaggaagctgtgctgaatggtttggtggccactgaggtgttgatgtggttttatgtcggagagattataggcaagcggggcatcattggctatgatgtttgaagaccaatctttaacatctgacccccctccaccctccccctcngccgctgaccctggagcanctggaccggcacccgcancccccaaccccgcctaacccacggccccacagcccgtncccngcngcgaanacccgccacccgccccacaanttccacanaaccacacgagc

SEQ ID NO: 416395 - DNA, 740 bp, Homo sapiens
cggacgcgtgggtcgacccacgcgtccgatttgagtgttgttggaccatgtgtgatcagactgctatctgaataaaataagatttgtcaaaactcagtgttttctccatcagatactccatgaaaggtcacaatttctcttgatattaagctgggttgtctttaaacaaccctaaatacacgtctgtttagcccgcaattggaaaggatatatgtggcaatattaacctggtacatgaatatatggggataacattttaatttgaaggtttggaatatatatatttaagctttatttccagaacagtgagggttaggtcttgggaaaactataacttgccaaagtagaagaaatagtagtaccatatgccaaagtgatagagatgaatcatgtcagtagttagaataacatttcaactgttttctttgctaaaatcacagaaagaccctattgacaacatctatgtctgtaaaaatgttagagtacttgtcatcttgaatatagcctccccaagagagaacagggtggtattctaagtatgtttctttgtaacatctttagcagtaggacagagccatacatgtgaaatctgatttttatgtgtgttattcgtttgtctggttttactacctttgcaaaaacaaaataccccaaagatatttaaacaaggttataatttagcatcttccctggatctaaatagtatattatatcctgaaataaatgaaatgattgctata

SEQ ID NO: 416396 - DNA, 1112 bp, Homo sapiens
  misc_feature (628)..(628): n is a, c, g, or t
  misc_feature (903)..(903): n is a, c, g, or t
cgagtggctgccccacaaaatgcctgcttctctgcggaatcctactgttcttcacatgctctctaataccatcttttcatatccactttctcttccatgttgaaaaattaaattgacaggctggattctgcaaagatctttggacatttaagtatcttcgaccggcgcgaaaagaggcggcctgaccttggaagtgggacggggtcctgcagcgggtccttccggcgggtgacattcagccggcggttcggggcgacggactctccattccagaaccatggcccaatttgtccgtaaccttgtggagaagaccccggcgctggtgaacgctgctgtgacttactcgaagcctcgattggccacattttggtactacgccaaggttgagctggttcctcccacccctgctgagatccctagagctattcagagcctgaaaaaaatagtcaatagtgctcagactggtagcttcaaacagctcacagttaaggaagctgtgctgaatggtttggtggccactgaggtgttgatgtggttttatgtcggagagatcatacgcagccaggggactatcgcgtatgatgtctgaacaccaatgtttagcatcggcccagccacgagtgagcancagagcgctgttgcaccaggtgggatcgcactgcccggtccacgaagcatctccggcccccctcccccctctattttctcctctcccgccactcaaccgcggcccaacccgccgccgttgcctttgccgaaggactaacgcatgcagccccctgaaggtataggaggcaggagggagcacccccgcacaggcaagagggtccccacagcatcgaccgcgctaaatgtacctcccgtgccgagaagccgcggatgactttagtcgtacacgagttnacacgatcgccctctccgcccctatccccagaataagcgccccacccccctcgctgtcgctcgtttcacacgcgcgtcctaatagtgtgacaatgcttggaagcgtgtactgcgtgggtcataaatacacgcacgagcgtccagggaggtccagctccacccccgccgacggcgccgccagggctaagggccccacgcgcgcgcgaggg

SEQ ID NO: 416397 - DNA, 886 bp, Homo sapiens
cgagtggctgccccacaaaatgcctgcttctctgcggaatcctactgttcttcacatgctctctaataccatcttttcatatccactttctcttccatgttgaaaaattaaattgacaggctggattctgcaaagatctttggacatttaagtatcttcgaccggcgcgaaaagaggcggcctgaccttggaagtgggacggggtcctgcagcgggtccttccggcgggtgacattcagccggcggttcggggcgacggactctccattccagaaccatggcccaatttgtccgtaaccttgtggagaagaccccggcgctggtgaacgctgctgtgacttactcgaagcctcgattggccacattttggtactacgccaaggttgagctggttcctcccacccctgctgagatccctagagctattcagagcctgaaaaaaatagtcaatagtgctcagactggtagcttcaaacagctcacagttaaggtaaccacgggctaaatgaaaacggatgtgcataacagaaaatgtcttcccttgggatttttctgattgttttgattaatatatatgtttccaatgaggctgaatccagcataatgaggaaaaaaattttgactgctgaggaagatacttacttttctaattttgtcacctgggtagaaataattagcccattttatgtcttagtttcctaagagtcttaaacctagcaaaaaagtgaccatttttattgggaaattttttttcctttcctatattagatagtatactaaaatatgatggcttgctttgctgagtctgtacttttttcatctggagtcctgagattgtccccaattcagccaaaacatctcttgaactatgtcacagtcaggaagc

SEQ ID NO: 416398 - DNA, 963 bp, Homo sapiens
cgagtggctgccccacaaaatgcctgcttctctgcggaatcctactgttcttcacatgctctctaataccatcttttcatatccactttctcttccatgttgaaaaattaaattgacaggctggattctgcaaagatctttggacatttaagtatcttcgaccggcgcgaaaagaggcggcctgaccttggaagtgggacggggtcctgcagcgggtccttccggcgggtgacattcagccggcggttcggggcgacggactctccattccagaaccatggcccaatttgtccgtaaccttgtggagaagaccccggcgctggtgaacgctgctgtgacttactcgaagcctcgattggccacattttggtactacgccaaggttgagctggttcctcccacccctgctgagatccctagagctattcagagcctgaaaaaaatagtcaatagtgctcagactggtagcttcaaacagctcacagttaagaaaaaaagcagcacctgaggattctgaacagttctctgctcagtgatgatcaagccttcctttggacaagcttaaataactcagccactgttctttgttggaggactttgggactactgatgcaatgtgtccacttgggggccctttggagaaaaaattgctaatttcagaggggcagccgcaccagtggttaaggaaatccctggggagaaaatgtttctgtctggattagagagaagacatcttatttactcattcaatcttcatgataatcttgtgaagctataattaatatccttatttttgcagattaggaaactaagacgtactgaggctgggtgcctggttcaagatcatatagctaacattattggacatgcaaatcaagcccagatttgtgactctgagctgatgttaattctgtcacaatattggttctcaagataaatctttccaggtgagggggaaaggga

SEQ ID NO: 416399 - DNA, 1150 bp, Homo sapiens
aagctggtaagcgccggaagtatgggatgtcttccggcgggtgacattcagccggcggttcggggcgacggactctccattccagaaccatggcccaatttgtccgtaaccttgtggagaagaccccggcgctggtgaacgctgctgtgacttactcgaagcctcgattggccacattttggtactacgccaaggttgagctggttcctcccacccctgctgagatccctagagctattcagagcctgaaaaaaatagtcaatagtgctcagactggtagcttcaaacagctcacagttaaggaagctgtgctgaatggtttggtggccactgaggtgttgatgtggttttatgtcggagagattataggcaagcggggcatcattggctatgatgtttgaagaccaatctttaacatctgattatatttgatttattatttgagtgttgttggaccatgtgtgatcagactgctatctgaataaaataagatttgtcaaaactcagtgttttctccatcagatactccatgaaaggtcacaatttctcttgatattaagctgggttgtctttaaacaaccctaaatacacgtctgtttagcccgcaattggaaaggatatatgtggcaatattaacctggtacatgaatatatggggataacattttaatttgaaggtttggaatatatatatttaagctttatttccagaacagtgagggttaggtcttgggaaaactataacttgccaaagtagaagaaatagtagtaccatatgccaaagtgatagagatgaatcatgtcagtagttagaataacatttcaactgttttctttgctaaaatcacagaaagaccctattgacaacatctatgtctgtaaaaatgttagagtacttgtcatcttgaatatagcctccccaagagagaacagggtggtattctaagtatgtttctttgtaacatctttagcagtaggacagagccatacatgtgaaatctgatttttatgtgtgttattcgtttgtctggttttactacctttgcaaaaacaaaataccccaaagatatttaaacaaggttataatttagcatcttccctggatctaaatagtatattatatcctgaaataaatgaaatgattgctata

SEQ ID NO: 416400 - DNA, 1165 bp, Homo sapiens
aattcgcggccgcgtcgacacggtgcgagaagacgacagaaggggcttccggcgggtgacattcagccggcggttcggggcgacggactctccattccagaaccatggcccaatttgtccgtaaccttgtggagaagaccccggcgctggtgaacgctgctgtgacttactcgaagcctcgattggccacattttggtactacgccaaggttgagctggttcctcccacccctgctgagatccctagagctattcagagcctgaaaaaaatagtcaatagtgctcagactggtagcttcaaacagctcacagttaaggaagctgtgctgaatggtttggtggccactgaggtgttgatgtggttttatgtcggagagattataggcaagcggggcatcattggctatgatgtttgaagaccaatctttaacatctgattatatttgatttattatttgagtgttgttggaccatgtgtgatcagactgctatctgaataaaataagatttgtcaaaactcagtgttttctccatcagatactccatgaaaggtcacaatttctcttgatattaagctgggttgtctttaaacaaccctaaatacacgtctgtttagcccgcaattggaaaggatatatgtggcaatattaacctggtacatgaatatatggggataacattttaatttgaaggtttggaatatatatatttaagctttatttccagaacagtgagggttaggtcttgggaaaactataacttgccaaagtagaagaaatagtagtaccatatgccaaagtgatagagatgaatcatgtcagtagttagaataacatttcaactgttttctttgctaaaatcacagaaagaccctattgacaacatctatgtctgtaaaaatgttagagtacttgtcatcttgaatatagcctccccaagagagaacagggtggtattctaagtatgtttctttgtaacatctttagcagtaggacagagccatacatgtgaaatctgatttttatgtgtgttattcgtttgtctggttttactacctttgcaaaaacaaaataccccaaagatatttaaacaaggttataatttagcatcttccctggatctaaatagtatattatatcctgaaataaatgaaatgattgctata

SEQ ID NO: 416401 - DNA, 739 bp, Homo sapiens
cgagtggctgccccacaaaatgcctgcttctctgcggaatcctactgttcttcacatgctctctaataccatcttttcatatccactttctcttccatgttgaaaaattaaattgacaggctggattctgcaaagatctttggacatttaagtatcttcgaccggcgcgaaaagaggcggcctgaccttggaagtgggacggggtcctgcagcgggtccttccggcgggtgacattcagccggcggttcggggcgacggactctccattccagaaccatggcccaatttgtccgtaaccttgtggagaagaccccggcgctggtgaacgctgctgtgacttactcgaagcctcgattggccacattttggtactacgccaaggttgagctggttcctcccacccctgctgagatccctagagctattcagagcctgaaaaaaatagtcaatagtgctcagactggtagcttcaaacagctcacagttaaggaagctgtgctgaatggtttggtggccactgaggtgttgatgtggttttatgtcggagagattataggcaagcggggcatcattggctatgatgtttgaagaccaatctttaacatctgattatatttgatttattatttgagtgttgttggaccatgtgtgatcagactgctatctgaataaaataagatttgtcaaaactcaaaaaaaagtcgacgcggccgcaatttagtagtagtaggcggccgc

SEQ ID NO: 416402 - DNA, 1099 bp, Homo sapiens
  misc_feature (750)..(750): n is a, c, g, or t
  misc_feature (753)..(753): n is a, c, g, or t
  misc_feature (762)..(762): n is a, c, g, or t
cgagtggctgccccacaaaatgcctgcttctctgcggaatcctactgttcttcacatgctctctaataccatcttttcatatccactttctcttccatgttgaaaaattaaattgacaggctggattctgcaaagatctttggacatttaagtatcttcgaccggcgcgaaaagaggcggcctgaccttggaagtgggacggggtcctgcagcgggtccttccggcgggtgacattcagccggcggttcggggcgacggactctccattccagaaccatggcccaatttgtccgtaaccttgtggagaagaccccggcgctggtgaacgctgctgtgacttactcgaagcctcgattggccacattttggtactacgccaaggttgagctggttcctcccacccctgctgagatccctagagctattcagagcctgaaaaaaatagtcaatagtgctcagactggtagcttcaaacagctcacagttaaggaagctgtgctgaatggtttggtggccactgaggtgttgatgtggttttatgtcggagagattataggcaagcggggcatcattggctatgatgtttgaagaccaatctttaacatctgattatatttgatttattatttgagtgttgttggaccatgtgtgatcagactgctatctgaataaaataagatttgtcaaaactcaaaaaaaaaaaaaaaaaaaaaaaaaaaaaaaaaaaaaaaaaaaaaaaaaaaaaaaanaanaaaaaaaanaaaaacaaaaaaaaaaaaaaaaaaaaaagacaagaaaaaatgcagaggcgggggagcgggcactataaatttatcctgcggggggggccgcacattattgagatcccacatcctttgtgattggtggagcagcgagtctcccacatgatagcgatcgtttattcattaagacgaaccatggacgggcgggtcgatctattataaagcacgctgcggcttggcggacaccaagcacatgctgggttggtatctattggagggaaaaccacctttgttggggtcggtgggcgtcttggaggcaacacccccgcgaaatgaaggtcccgtcggggtatat

SEQ ID NO: 416403 - DNA, 1115 bp, Homo sapiens
cgagtggctgccccacaaaatgcctgcttctctgcggaatcctactgttcttcacatgctctctaataccatcttttcatatccactttctcttccatgttgaaaaattaaattgacaggctggattctgcaaagatctttggacatttaagtatcttcgaccggcgcgaaaagaggcggcctgaccttggaagtgggacggggtcctgcagcgggtccttccggcgggtgacattcagccggcggttcggggcgacggactctccattccagaaccatggcccaatttgtccgtaaccttgtggagaagaccccggcgctggtgaacgctgctgtgacttactcgaagcctcgattggccacattttggtactacgccaaggttgagctggttcctcccacccctgctgagatccctagagctattcagagcctgaaaaaaatagtcaatagtgctcagactggtagcttcaaacagctcacagttaaggaagctgtgctgaatggtttggtggccactgaggtgttgatgtggttttatgtcggagagattataggcaagcggggcatcattggctatgatgtttgaagaccaatctttaacatctgattatatttgatttattatttgagtgttgttggaccatgtgtgatcagactgctatctgaataaaataagatttgtcaaaactcaaaaaaaaaaaaaaaaaaaaaaaaaaaaaaaaaaaaaaaaaaaaaggggggggggggcaaaaaaatacccccgagggggggccccgaattacgcggcggtcgccccgattttttgggcaccgaggggggcccccaaaggaggggcgcgcgcaatataagaggagggaggggaaggggcagcacgggtaaaaaagggggcggggggggaaaaacgcgctacacccggggacacctggggagagagaacccatatcacagggggggggaaccaatggtggccccaaatcccaaagaggattttaaaccgctagaggggagaattataaattttaaaggtggataaggggtgtgcacaggggggaattatggtggggtataaaaattttggcaaagaggaattatttagagaatttttaacgggg

SEQ ID NO: 416404 - DNA, 968 bp, Homo sapiens
cgagtggctgccccacaaaatgcctgcttctctgcggaatcctactgttcttcacatgctctctaataccatcttttcatatccactttctcttccatgttgaaaaattaaattgacaggctggattctgcaaagatctttggacatttaagtatcttcgaccggcgcgaaaagaggcggcctgaccttggaagtgggacggggtcctgcagcgggtccttccggcgggtgacattcagccggcggttcggggcgacggactctccattccagaaccatggcccaatttgtccgtaaccttgtggagaagaccccggcgctggtgaacgctgctgtgacttactcgaagcctcgattggccacattttggtactacgccaaggttgagctggttcctcccacccctgctgagatccctagagctattcagagcctgaaaaaaatagtcaatagtgctcagactggtagcttcaaacagctcacagttaaggaagctgtgctgaatggtttggtggccactgaggtgttgatgtggttttatgtcggagagattataggcaagcggggcatcattggctatgatgtttgaagaccaatctttaacatctgattatatttgatttattatttgagtgttgttggaccatgtgtgatcagactgctatctgaataaaataagatttgtcaaaactcccccaaaaaaaaaacgagcaagcttatgcatgggggccggaatttgaggctacttggccatttgccctattgggagggggttacaaataactgggccggggtttaaaacacgggggtggggaaaccctgggggtcccacacttaaaagcttgaggagatccccctttgcagggtggggaaaaaaaaaaagccgcccccctcccttcccaacattgggagcctaaaggggaagaaaaattaacgctaatttttttttaaaacccgtcaattttttt

SEQ ID NO: 416405 - DNA, 894 bp, Homo sapiens
  misc_feature (707)..(708): n is a, c, g, or t
cgagtggctgccccacaaaatgcctgcttctctgcggaatcctactgttcttcacatgctctctaataccatcttttcatatccactttctcttccatgttgaaaaattaaattgacaggctggattctgcaaagatctttggacatttaagtatcttcgaccggcgcgaaaagaggcggcctgaccttggaagtgggacggggtcctgcagcgggtccttccggcgggtgacattcagccggcggttcggggcgacggactctccattccagaaccatggcccaatttgtccgtaaccttgtggagaagaccccggcgctggtgaacgctgctgtgacttactcgaagcctcgattggccacattttggtactacgccaaggttgagctggttcctcccacccctgctgagatccctagagctattcagagcctgaaaaaaatagtcaatagtgctcagactggtagcttcaaacagctcacagttaaggaagctgtgctgaatggtttggtggccactgaggtgttgatgtggttttatgtcggagagattataggcaagcggggcatcattggctatgatgtttgaagaccaatctttaacatctgattatatttgatttattatttgagtgttgttggaccatgtgtgatcagactgctatctgaataaaataagatttgtcaaaactcggacataaaaaccnnaaaatttttaaaaaacatgtgggccgccttggcccagtcgattttagacttgagcaagcttatgcattcggccggaattggggttacattggcaattggccctaaagcgggtcgattaccaattaatggcggggttttaaacgcctggatgggaaaaccctggggtacccaattaatcgctttgag

SEQ ID NO: 416406 - DNA, 719 bp, Homo sapiens
cgagtggctgccccacaaaatgcctgcttctctgcggaatcctactgttcttcacatgctctctaataccatcttttcatatccactttctcttccatgttgaaaaattaaattgacaggctggattctgcaaagatctttggacatttaagtatcttcgaccggcgcgaaaagaggcggcctgaccttggaagtgggacggggtcctgcagcgggtccttccggcgggtgacattcagccggcggttcggggcgacggactctccattccagaaccatggcccaatttgtccgtaaccttgtggagaagaccccggcgctggtgaacgctgctgtgacttactcgaagcctcgattggccacattttggtactacgccaaggttgagctggttcctcccacccctgctgagatccctagagctattcagagcctgaaaaaaatagtcaatagtgctcagactggtagcttcaaacagctcacagttaaggaagctgtgctgaatggtttggtggccactgaggtgttgatgtggttttatgtcggagagattataggcaagcggggcatcattggctatgatgtttgaagaccaatctttaacatctgattatatttgatttattatttgagtgttgttggaccatgtgtgatcagactgctatctgaataaaataagatttgtcaaaactctctcccccgtgtcgggcggccctctt

SEQ ID NO: 416407 - DNA, 1130 bp, Homo sapiens
  misc_feature (13)..(13): n is a, c, g, or t
tggccggggcccnccggcggtagttttttagccggcggttcggggcgacggactctccattccagaaccatggcccaatttgtccgtaaccttgtggagaagaccccggcgctggtgaacgctgctgtgacttactcgaagcctcgattggccacattttggtactacgccaaggttgagctggttcctcccacccctgctgagatccctagagctattcagagcctgaaaaaaatagtcaatagtgctcagactggtagcttcaaacagctcacagttaaggaagctgtgctgaatggtttggtggccactgaggtgttgatgtggttttatgtcggagagattataggcaagcggggcatcattggctatgatgtttgaagaccaatctttaacatctgattatatttgatttattatttgagtgttgttggaccatgtgtgatcagactgctatctgaataaaataagatttgtcaaaactcagtgttttctccatcagatactccatgaaaggtcacaatttctcttgatattaagctgggttgtctttaaacaaccctaaatacacgtctgtttagcccgcaattggaaaggatatatgtggcaatattaacctggtacatgaatatatggggataacattttaatttgaaggtttggaatatatatatttaagctttatttccagaacagtgagggttaggtcttgggaaaactataacttgccaaagtagaagaaatagtagtaccatatgccaaagtgatagagatgaatcatgtcagtagttagaataacatttcaactgttttctttgctaaaatcacagaaagaccctattgacaacatctatgtctgtaaaaatgttagagtacttgtcatcttgaatatagcctccccaagagagaacagggtggtattctaagtatgtttctttgtaacatctttagcagtaggacagagccatacatgtgaaatctgatttttatgtgtgttattcgtttgtctggttttactacctttgcaaaaacaaaataccccaaagatatttaaacaaggttataatttagcatcttccctggatctaaatagtatattatatcctgaaataaatgaaatgattgctata

SEQ ID NO: 416408 - DNA, 1123 bp, Homo sapiens
  misc_feature (15)..(16): n is a, c, g, or t
agtacctatttgccnntaattaagccggcggttcggggcgacggactctccattccagaaccatggcccaatttgtccgtaaccttgtggagaagaccccggcgctggtgaacgctgctgtgacttactcgaagcctcgattggccacattttggtactacgccaaggttgagctggttcctcccacccctgctgagatccctagagctattcagagcctgaaaaaaatagtcaatagtgctcagactggtagcttcaaacagctcacagttaaggaagctgtgctgaatggtttggtggccactgaggtgttgatgtggttttatgtcggagagattataggcaagcggggcatcattggctatgatgtttgaagaccaatctttaacatctgattatatttgatttattatttgagtgttgttggaccatgtgtgatcagactgctatctgaataaaataagatttgtcaaaactcagtgttttctccatcagatactccatgaaaggtcacaatttctcttgatattaagctgggttgtctttaaacaaccctaaatacacgtctgtttagcccgcaattggaaaggatatatgtggcaatattaacctggtacatgaatatatggggataacattttaatttgaaggtttggaatatatatatttaagctttatttccagaacagtgagggttaggtcttgggaaaactataacttgccaaagtagaagaaatagtagtaccatatgccaaagtgatagagatgaatcatgtcagtagttagaataacatttcaactgttttctttgctaaaatcacagaaagaccctattgacaacatctatgtctgtaaaaatgttagagtacttgtcatcttgaatatagcctccccaagagagaacagggtggtattctaagtatgtttctttgtaacatctttagcagtaggacagagccatacatgtgaaatctgatttttatgtgtgttattcgtttgtctggttttactacctttgcaaaaacaaaataccccaaagatatttaaacaaggttataatttagcatcttccctggatctaaatagtatattatatcctgaaataaatgaaatgattgctata

SEQ ID NO: 416409 - DNA, 1392 bp, Homo sapiens
cgagtggctgccccacaaaatgcctgcttctctgcggaatcctactgttcttcacatgctctctaataccatcttttcatatccactttctcttccatgttgaaaaattaaattgacaggctggattctgcaaagatctttggacatttaagtatcttcgaccggcgcgaaaagaggcggcctgaccttggaagtgggacggggtcctgcagcgggtccttccggcgggtgacattcagccggcggttcggggcgacggactctccattccagaaccatggcccaatttgtccgtaaccttgtggagaagaccccggcgctggtgaacggcattggcagttctgtttggaactatctcttagagctttgtgtctgcttaaaggctgctgtgacttactcgaagcctcgattggccacattttggtactacgccaaggttgagctggttcctcccacccctgctgagatccctagagctattcagagcctgaaaaaaatagtcaatagtgctcagactggtagcttcaaacagctcacagttaaggaagctgtgctgaatggtttggtggccactgaggtgttgatgtggttttatgtcggagagattataggcaagcggggcatcattggctatgatgtttgaagaccaatctttaacatctgattatatttgatttattatttgagtgttgttggaccatgtgtgatcagactgctatctgaataaaataagatttgtcaaaactcagtgttttctccatcagatactccatgaaaggtcacaatttctcttgatattaagctgggttgtctttaaacaaccctaaatacacgtctgtttagcccgcaattggaaaggatatatgtggcaatattaacctggtacatgaatatatggggataacattttaatttgaaggtttggaatatatatatttaagctttatttccagaacagtgagggttaggtcttgggaaaactataacttgccaaagtagaagaaatagtagtaccatatgccaaagtgatagagatgaatcatgtcagtagttagaataacatttcaactgttttctttgctaaaatcacagaaagaccctattgacaacatctatgtctgtaaaaatgttagagtacttgtcatcttgaatatagcctccccaagagagaacagggtggtattctaagtatgtttctttgtaacatctttagcagtaggacagagccatacatgtgaaatctgatttttatgtgtgttattcgtttgtctggttttactacctttgcaaaaacaaaataccccaaagatatttaaacaaggttataatttagcatcttccctggatctaaatagtatattatatcctgaaataaatgaaatgattgctata

SEQ ID NO: 416410 - DNA, 797 bp, Homo sapiens
cgagtggctgccccacaaaatgcctgcttctctgcggaatcctactgttcttcacatgctctctaataccatcttttcatatccactttctcttccatgttgaaaaattaaattgacaggctggattctgcaaagatctttggacatttaagtatcttcgaccggcgcgaaaagaggcggcctgaccttggaagtgggacggggtcctgcagcgggtccttccggcgggtgacattcagccggcggttcggggcgacggactctccattccagaaccatggcccaatttgtccgtaaccttgtggagaagaccccggcgctggtgaacgctgctgtgacttactcgaagcctcgattggccacattttggtactacgccaaggttgagctggttcctcccacccctgctgagatccctagagctattcagagcctgaaaaaaatagtcaatagtgctcagactggtagcttcaaacagctcacagttaaggaagctgtgctgaatggtttggtggccactgaggtgttgatgtggttttatgtcggagagattataggcaagcggggcatcattggctatgatgtttgaagaccaatctttaacatctgattatatttgatttattatttgagtgttgttggaccatgtgtgatcagactgctatctgaattgccgtccgctccgaatcacaccaaacacccttagcctggtgatagcttatgcatggccgccgattaagggtccttctttccattcgggcctacgggacctttataaattttatgggcccgtaaag

SEQ ID NO: 416411 - DNA, 999 bp, Homo sapiens
ggggtctctccacaaggttacggacaaatggtgccatggttctggaatggagagtccgtcgccccctgctgagatccctagagctattcagagcctgaaaaaaatagtcaatagtgctcagactggtagcttcaaacagctcacagttaaggaagctgtgctgaatggtttggtggccactgaggtgttgatgtggttttatgtcggagagattataggcaagcggggcatcattggctatgatgtttgaagaccaatctttaacatctgattatatttgatttattatttgagtgttgttggaccatgtgtgatcagactgctatctgaataaaataagatttgtcaaaactcagtgttttctccatcagatactccatgaaaggtcacaatttctcttgatattaagctgggttgtctttaaacaaccctaaatacacgtctgtttagcccgcaattggaaaggatatatgtggcaatattaacctggtacatgaatatatggggataacattttaatttgaaggtttggaatatatatatttaagctttatttccagaacagtgagggttaggtcttgggaaaactataacttgccaaagtagaagaaatagtagtaccatatgccaaagtgatagagatgaatcatgtcagtagttagaataacatttcaactgttttctttgctaaaatcacagaaagaccctattgacaacatctatgtctgtaaaaatgttagagtacttgtcatcttgaatatagcctccccaagagagaacagggtggtattctaagtatgtttctttgtaacatctttagcagtaggacagagccatacatgtgaaatctgatttttatgtgtgttattcgtttgtctggttttactacctttgcaaaaacaaaataccccaaagatatttaaacaaggttataatttagcatcttccctggatctaaatagtatattatatcctgaaataaatgaaatgattgctata

SEQ ID NO: 416412 - DNA, 686 bp, Homo sapiens
cgagtggctgccccacaaaatgcctgcttctctgcggaatcctactgttcttcacatgctctctaataccatcttttcatatccactttctcttccatgttgaaaaattaaattgacaggctggattctgcaaagatctttggacatttaagtatcttcgaccggcgcgaaaagaggcggcctgaccttggaagtgggacggggtcctgcagcgggtccttccggcgggtgacattcagccggcggttcggggcgacggactctccattccagaaccatggcccaatttgtccgtaaccttgtggagaagaccccggcgctggtgaacgctgctgtgacttactcgaagcctcgattggccacattttggtactacgccaaggttgagctggttcctcccacccctgctgagatccctagagctattcagagcctgaaaaaaatagtcaatagtgctcagactggtagcttcaaacagctcacagttaaggaagctgtgctgaatggtttggtggccactgaggtgttgatgtggttttatgtcggagagattataggcaagcggggcatcattggctatgatgtttgaagaccaatctttaacatctgattatatttgatttattatttgagtgttgttcctctcctgcgacagacagcagactcgagccgagcttatcgatacc

SEQ ID NO: 416413 - DNA, 880 bp, Homo sapiens
cgagtggctgccccacaaaatgcctgcttctctgcggaatcctactgttcttcacatgctctctaataccatcttttcatatccactttctcttccatgttgaaaaattaaattgacaggctggattctgcaaagatctttggacatttaagtatcttcgaccggcgcgaaaagaggcggcctgaccttggaagtgggacggggtcctgcagcgggtccttccggcgggtgacattcagccggcggttcggggcgacggactctccattccagaaccatggcccaatttgtccgtaaccttgtggagaagaccccggcgctggtgaacgctgctgtgacttactcgaagcctcgattggccacattttggtactacgccaaggttgagctggttcctcccacccctgctgagatccctagagctattcagagcctgaaaaaaatagtcaatagtgctcagactggtagcttcaaacagctcacagttaaggaagctgtgctgaatggtttggtggccactgaggtgttgatgtggttttatgtcggcgagtttatagacaggtggggactcattgtctacgaggtctgcagaccaaccggtaccgtgggactatgtttgacctcagacatggcccgttgcagcgacattagcccacccgcctgcatacccgagttgcgcacttcgcgccatccagtcttcgcccgtcaccgcccatctcggcgcgcctccgcaagtggccgtctccgcgatgaacgcttccgccctcgcacatgcgggcctccccatgtcttgcgcccctaggatgcgccttcgtcactccgcgccccccttgcctgaccacagccggtctcccctctcccgcggctcttccgcacaccc

SEQ ID NO: 416414 - DNA, 510 bp, Homo sapiens
cgagtggctgccccacaaaatgcctgcttctctgcggaatcctactgttcttcacatgctctctaataccatcttttcatatccactttctcttccatgttgaaaaattaaattgacaggctggattctgcaaagatctttggacatttaagtatcttcgaccggcgcgaaaagaggcggcctgaccttggaagtgggacggggtcctgcagcgggtccttccggcgggtgacattcagccggcggttcggggcgacggactctccattccagaaccatggcccaatttgtccgtaaccttgtggagaagaccccggcgctggtgaacgctgctgtgacttactcgaagcctcgattggccacattttggtactacgccaaggttgagctggttcctcccacccctgctgagatccctagagctattcagagcctgaaaaaaatagtcaatagtgctcagactggtagcttcaaacagctcacagttaggagttgtgatgttgtgcactg

SEQ ID NO: 416415 - DNA, 4596 bp, Homo sapiens
agaatgcactgctgacacgtgtgcgcgcgcgcggctccactgccgggcgaccgcgggaaaattccaaaaaaactcaaaaagccaatacgaggcaaagccaaattttcaagccacagatcccgggcggtggcttcctttccgccactgcccaaactgctgaagcagctcccgcgaggaccacccgatttaatgtgtgccgaccatttccttcagtgctggacaggctgctgtgaagggacatcaccttttcgctttttccaagatggctcaagattcagtagatctttcttgtgattatcagttttggatgcagaagctttctgtatgggatcaggcttccactttggaaacccagcaagacacctgtcttcacgtggctcagttccaggagttcctaaggaagatgtatgaagccttgaaagagatggattctaatacagtcattgaaagattccccacaattggtcaactgttggcaaaagcttgttggaatccttttattttagcatatgatgaaagccaaaaaattctaatatggtgcttatgttgtctaattaacaaagaaccacagaattctggacaatcaaaacttaactcctggatacagggtgtattatctcatatactttcagcactcagatttgataaagaagttgctcttttcactcaaggtcttgggtatgcacctatagattactatcctggtttgcttaaaaatatggttttatcattagcgtctgaactcagagagaatcatcttaatggatttaacactcaaaggcgaatggctcccgagcgagtggcgtccctgtcacgagtttgtgtcccacttattaccctgacagatgttgaccccctggtggaggctctcctcatctgtcatggacgtgaacctcaggaaatcctccagccagagttctttgaggctgtaaacgaggccattttgctgaagaagatttctctccccatgtcagctgtagtctgcctctggcttcggcaccttcccagccttgaaaaagcaatgctgcatctttttgaaaagctaatctccagtgagagaaattgtctgagaaggatcgaatgctttataaaagattcatcgctgcctcaagcagcctgccaccctgccatattccgggttgttgatgagatgttcaggtgtgcactcctggaaaccgatggggccctggaaatcatagccactattcaggtgtttacgcagtgctttgtagaagctctggagaaagcaagcaagcagctgcggtttgcactcaagacctactttccttacacttctccatctcttgccatggtgctgctgcaagaccctcaagatatccctcggggacactggctccagacactgaagcatatttctgaactgctcagagaagcagttgaagaccagactcatgggtcctgcggaggtccctttgagagctggttcctgttcattcacttcggaggatgggctgagatggtggcagagcaattactgatgtcggcagccgaaccccccacggccctgctgtggctcttggccttctactacggcccccgtgatgggaggcagcagagagcacagactatggtccaggtgaaggccgtgctgggccacctcctggcaatgtccagaagcagcagcctctcagcccaggacctgcagacggtagcaggacagggcacagacacagacctcagagctcctgcacaacagctgatcaggcaccttctcctcaacttcctgctctgggctcctggaggccacacgatcgcctgggatgtcatcaccctgatggctcacactgctgagataactcacgagatcattggctttcttgaccagaccttgtacagatggaatcgtcttggcattgaaagccctagatcagaaaaactggcccgagagctccttaaagagctgcgaactcaagtctagaaggcacgcaggccgtgtgggtgcccggcgtgagggatcaggctcgccagggccacaggacaggtgatgacctgtggccacgcatttgtggagtaagtgccctcgctgggctgtgagaatgagctgtacacatcttgggacaatctgctagtatctattttacaaaatgcagagccaggtccctcagcccagactcagtcagacatgttcactaatgactcaagtgagccttcggtactcctggtgcccgcccggccagaccgtcagcttgataattactaaagcaaaggcctgggtgggagaacaggtttctagtttttacccaagtcaagctgcacatctattatttaaaaattcaaagtcttagaaccaagaatttggtcatgaaccattaaagaatttagagagaacttagctctttttagactctttttaggagtcagggatctgggataaagccacactgtcttgctgtatggagaaattcttcaaggggagtcagggtccctcaggcttcccttgtgtctccctggacctgcctgacaggccacaggagcagacagcacacccaagcccgggcctccggcacactctttccactctgtatttgctaaatgatgctaactgctaccaaaaggcccttgggacatcagaggagccggcagcgaaggtagaggatgtgttccagaaacattagaaggcaggattaattcagttagttagttctcttgttaaatggaaatgggaattggaaattcctgataaagaattggcctggctgggtgcagtggctcacacctgtgatcccagcactttgggaggccaaggcagggggattacttcagcccaggagttccagactgcctggctaacatggcaataccctatctctactaaaaatacaaaaattatcggggtgcaatggcatgcatctgtaatcccagctattcaagaggctgaggcatgaggatctcttgaacccgggaggtgggagttgtagtgagccgagatcatgacactgcactccagcctgggcaacagagcgagaccatctcttaaaaaaaggcattgttagtgtaatctcaaggttaacatttatttcatgtcagtacagggtgctttttcctttcagggacattctggaattgtattggttgtacattcttttgtgtctattctgtttgtcaagtgagtcaagacttgcttttgtccattttgatttgtgtgtattagtctgagtcttggctccgttttgaggtatgagcaaagttttgctggattagaagttaacctttagggaaattccttattttggtatgtggcaatgctaatagatccactgaagatctggaaaattccaggaacttttcacctgagcctttcttctgagaaatgctgcagtcagaagggtgtgctggtaaagtattttggtggcagctgccatcatggtcattgccttcatataacatgcttcgtgctcatggtcattgccttcatataacatgcttcgtgccatcatgatccttgccttcatataacaaacatgcttcgtcagaggtgttggggttgaaaaaggagctgcatgcttcactggagttgagggcctctctcctgttctgactttaagccagaacttgtggctgggccatggaagctgtgactcctctgtggacatggtggcagcagggaacccctagagagaggggccactgggaccaggcctcctgttgtggagggactcctgggacagtcctccaccctgtcctgtggtcctgtgtacagggttggcctcttcctcctcccctgccaggcctctgcccatgccccttccttccttctcctgggactggtgaagctaggcatctggaagacttcttcctagcctggaagccctgacctcggcccatctgcagaatctcccagttccttcacagctgccgagtcctctcacgggtgcggtggaggcggccttgcggtggtgctttctgggcagccaggggttcctgggtgggaggactgtccctctggggacgtggcactgaagtgcctgctggcttcatgtggccctttgccctttcccagcctgagagatgctcaaaggtggggagctgggggagccacccctcggccattccctccacctccaagacaggtggcggccgggcaggcactcttaagcccacctccccctcttgttgccttcgatttcggcaaagcctgggcaggtgccaccgggaaggaatggcatccgagatgctgggcggggacgcggcgtggccgagggggccttgacggcgttggcggggcctgggcacaggggcagccgcagggaggcagggatggcaaggcgtgaagccaccctggaaggaactggaccaaggtcttcagaggtgcgacagggtctggaatctgaccttactctagcaggagtttttgtagactctccctgatagtttagtttttgataaagcatgctggtaaaaccactaccctcagagagagccaaaaatacagaagaggcggagagcgcccctccaaccaggctgttattcccctggactccgtgacatctgtggaattttttagctctttaaaatctgtaatttgttgtctattttttcattctaaataaaacttcagtttgcacctaaaaaata

SEQ ID NO: 416416 - DNA, 4507 bp, Homo sapiens
gagcccccggagaggcgggagcggtgttggcgttttggttctttttgttcattgagcgcaggcagctatgtcttcttcaaaggagaggagcaaagatttaatgtgtgccgaccatttccttcagtgctggacaggctgctgtgaagggacatcaccttttcgctttttccaagatggctcaagattcagtagatctttcttgtgattatcagttttggatgcagaagctttctgtatgggatcaggcttccactttggaaacccagcaagacacctgtcttcacgtggctcagttccaggagttcctaaggaagatgtatgaagccttgaaagagatggattctaatacagtcattgaaagattccccacaattggtcaactgttggcaaaagcttgttggaatccttttattttagcatatgatgaaagccaaaaaattctaatatggtgcttatgttgtctaattaacaaagaaccacagaattctggacaatcaaaacttaactcctggatacagggtgtattatctcatatactttcagcactcagatttgataaagaagttgctcttttcactcaaggtcttgggtatgcacctatagattactatcctggtttgcttaaaaatatggttttatcattagcgtctgaactcagagagaatcatcttaatggatttaacactcaaaggcgaatggctcccgagcgagtggcgtccctgtcacgagtttgtgtcccacttattaccctgacagatgttgaccccctggtggaggctctcctcatctgtcatggacgtgaacctcaggaaatcctccagccagagttctttgaggctgtaaacgaggccattttgctgaagaagatttctctccccatgtcagctgtagtctgcctctggcttcggcaccttcccagccttgaaaaagcaatgctgcatctttttgaaaagctaatctccagtgagagaaattgtctgagaaggatcgaatgctttataaaagattcatcgctgcctcaagcagcctgccaccctgccatattccgggttgttgatgagatgttcaggtgtgcactcctggaaaccgatggggccctggaaatcatagccactattcaggtgtttacgcagtgctttgtagaagctctggagaaagcaagcaagcagctgcggtttgcactcaagacctactttccttacacttctccatctcttgccatggtgctgctgcaagaccctcaagatatccctcggggacactggctccagacactgaagcatatttctgaactgctcagagaagcagttgaagaccagactcatgggtcctgcggaggtccctttgagagctggttcctgttcattcacttcggaggatgggctgagatggtggcagagcaattactgatgtcggcagccgaaccccccacggccctgctgtggctcttggccttctactacggcccccgtgatgggaggcagcagagagcacagactatggtccaggtgaaggccgtgctgggccacctcctggcaatgtccagaagcagcagcctctcagcccaggacctgcagacggtagcaggacagggcacagacacagacctcagagctcctgcacaacagctgatcaggcaccttctcctcaacttcctgctctgggctcctggaggccacacgatcgcctgggatgtcatcaccctgatggctcacactgctgagataactcacgagatcattggctttcttgaccagaccttgtacagatggaatcgtcttggcattgaaagccctagatcagaaaaactggcccgagagctccttaaagagctgcgaactcaagtctagaaggcacgcaggccgtgtgggtgcccggcgtgagggatcaggctcgccagggccacaggacaggtgatgacctgtggccacgcatttgtggagtaagtgccctcgctgggctgtgagaatgagctgtacacatcttgggacaatctgctagtatctattttacaaaatgcagagccaggtccctcagcccagactcagtcagacatgttcactaatgactcaagtgagccttcggtactcctggtgcccgcccggccagaccgtcagcttgataattactaaagcaaaggcctgggtgggagaacaggtttctagtttttacccaagtcaagctgcacatctattatttaaaaattcaaagtcttagaaccaagaatttggtcatgaaccattaaagaatttagagagaacttagctctttttagactctttttaggagtcagggatctgggataaagccacactgtcttgctgtatggagaaattcttcaaggggagtcagggtccctcaggcttcccttgtgtctccctggacctgcctgacaggccacaggagcagacagcacacccaagcccgggcctccggcacactctttccactctgtatttgctaaatgatgctaactgctaccaaaaggcccttgggacatcagaggagccggcagcgaaggtagaggatgtgttccagaaacattagaaggcaggattaattcagttagttagttctcttgttaaatggaaatgggaattggaaattcctgataaagaattggcctggctgggtgcagtggctcacacctgtgatcccagcactttgggaggccaaggcagggggattacttcagcccaggagttccagactgcctggctaacatggcaataccctatctctactaaaaatacaaaaattatcggggtgcaatggcatgcatctgtaatcccagctattcaagaggctgaggcatgaggatctcttgaacccgggaggtgggagttgtagtgagccgagatcatgacactgcactccagcctgggcaacagagcgagaccatctcttaaaaaaaggcattgttagtgtaatctcaaggttaacatttatttcatgtcagtacagggtgctttttcctttcagggacattctggaattgtattggttgtacattcttttgtgtctattctgtttgtcaagtgagtcaagacttgcttttgtccattttgatttgtgtgtattagtctgagtcttggctccgttttgaggtatgagcaaagttttgctggattagaagttaacctttagggaaattccttattttggtatgtggcaatgctaatagatccactgaagatctggaaaattccaggaacttttcacctgagcctttcttctgagaaatgctgcagtcagaagggtgtgctggtaaagtattttggtggcagctgccatcatggtcattgccttcatataacatgcttcgtgctcatggtcattgccttcatataacatgcttcgtgccatcatgatccttgccttcatataacaaacatgcttcgtcagaggtgttggggttgaaaaaggagctgcatgcttcactggagttgagggcctctctcctgttctgactttaagccagaacttgtggctgggccatggaagctgtgactcctctgtggacatggtggcagcagggaacccctagagagaggggccactgggaccaggcctcctgttgtggagggactcctgggacagtcctccaccctgtcctgtggtcctgtgtacagggttggcctcttcctcctcccctgccaggcctctgcccatgccccttccttccttctcctgggactggtgaagctaggcatctggaagacttcttcctagcctggaagccctgacctcggcccatctgcagaatctcccagttccttcacagctgccgagtcctctcacgggtgcggtggaggcggccttgcggtggtgctttctgggcagccaggggttcctgggtgggaggactgtccctctggggacgtggcactgaagtgcctgctggcttcatgtggccctttgccctttcccagcctgagagatgctcaaaggtggggagctgggggagccacccctcggccattccctccacctccaagacaggtggcggccgggcaggcactcttaagcccacctccccctcttgttgccttcgatttcggcaaagcctgggcaggtgccaccgggaaggaatggcatccgagatgctgggcggggacgcggcgtggccgagggggccttgacggcgttggcggggcctgggcacaggggcagccgcagggaggcagggatggcaaggcgtgaagccaccctggaaggaactggaccaaggtcttcagaggtgcgacagggtctggaatctgaccttactctagcaggagtttttgtagactctccctgatagtttagtttttgataaagcatgctggtaaaaccactaccctcagagagagccaaaaatacagaagaggcggagagcgcccctccaaccaggctgttattcccctggactccgtgacatctgtggaattttttagctctttaaaatctgtaatttgttgtctattttttcattctaaataaaacttcagtttgcacctaaaaaata

SEQ ID NO: 416417 - DNA, 838 bp, Homo sapiens
agaatgcactgctgacacgtgtgcgcgcgcgcggctccactgccgggcgaccgcgggaaaattccaaaaaaactcaaaaagccaatacgaggcaaagccaaattttcaagccacagatcccgggcggtggcttcctttccgccactgcccaaactgctgaagcagctcccgcgaggaccacccgatttaatgtgtgccgaccatttccttcagtgctggacaggctgctgtgaagggacatcaccttttcgctttttccaagatggctcaagattcagtagatctttcttgtgattatcagttttggatgcagaagctttctgtatgggatcaggcttccactttggaaacccagcaagacacctgtcttcacgtggctcagttccaggagttcctaaggaagatgtatgaagccttgaaagagatggattctaatacagtcattgaaagattccccacaattggtcaactgttggcaaaagcttgttggaatccttttattttagcatatgatgaaagccaaaaaattctaatatggtgcttatgttgtctaattaacaaagaaccacagaattctggacaatcaaaacttaactcctggatacagtaactcctggactgtttctgtagcagccacacaagtctcctttatattgccaatatctatctttatcccaaagacaagatgaatgttcaaaaacgggtgtattatctcatatactttcagcactcagatttgataaagaagttgctcttttcactcaaggtcttgggtatgcacctatagattactatcctggtttgcttaaaaatgtgagtatttaaaatttatcacttt

SEQ ID NO: 416418 - DNA, 842 bp, Homo sapiens
agccatttctgtttaaaattttgtttatttctttctgaaaggaagaagatttctctccccatgtcagctgtagtctgcctctggcttcggcaccttcccagccttgaaaaagcaatgctgcatctttttgaaaagctaatctccagtgagagaaattgtctgagaaggatcgaatgctttataaaagattcatcgctgcctcaagcagcctgccaccctgccatattccgggttgttgatgagatgttcaggtgtgcactcctggaaaccgatggggccctggaaatcatagccactattcaggtgtttacgcagtgctttgtagaagctctggagaaagcaagcaagcagctgcggtttgcactcaagacctactttccttacacttctccatctcttgccatggtgctgctgcaagaccctcaagatatccctcggggacactggctccagacactgaagcatatttctgaactgctcagagaagcagttgaagaccagactcatgggtcctgcggaggtccctttgagagctggttcctgttcattcacttcggaggatgggctgagatggtggcagagcaattactgatgtcggcagccgaaccccccacggccctgctgtggctcttggccttctactacggcccccgtgatgggaggcagcagagagcacagactatggcacaattaaatcagctggtggcgtatccccgcatcgtgtgctgggcctggcgtcactgcctctgtggatgtccttgaggtgaagaacatgggtgcaaagaccaagcgtgtccccgcccaggatgtgtcctgcctgtgagaaggcctgtcccactcat

SEQ ID NO: 416419 - DNA, 392 bp, Homo sapiens
aaaataaggatcattccctttgatttctcttctttactagggttgttattagtttgttttgctatcattgcttgtcttatattccacataaactttgaaaccaatttttctagttgcagggaagacacccagtgttgttgggggaagactcctgtaagtatatagattatcgagagagctggcgttttcatgatgttaaggctgtctgtccgcctgttcaagaacacatacgttttaccatttgttaagcttttgtgatctgaagggagtgttgtatatatttttcacacattggatttacacatttcttgttcctaatgttttgttgtatttgtgttttcaatgttttcactgtcataaatggatcttctcctccatcttcaaaaaaaaaa

SEQ ID NO: 416420 - DNA, 4710 bp, Homo sapiens
agaatgcactgctgacacgtgtgcgcgcgcgcggctccactgccgggcgaccgcgggaaaattccaaaaaaactcaaaaagccaatacgaggcaaagccaaattttcaagccacagatcccgggcggtggcttcctttccgccactgcccaaactgctgaagcagctcccgcgaggaccacccgggtcttgccctgtcaaccaggagtgcagtggcacgaacatagctcactgcagcctcaaactcctgggctccaggaatcatgccacctcagccacctgagtaactaggactacagatttaatgtgtgccgaccatttccttcagtgctggacaggctgctgtgaagggacatcaccttttcgctttttccaagatggctcaagattcagtagatctttcttgtgattatcagttttggatgcagaagctttctgtatgggatcaggcttccactttggaaacccagcaagacacctgtcttcacgtggctcagttccaggagttcctaaggaagatgtatgaagccttgaaagagatggattctaatacagtcattgaaagattccccacaattggtcaactgttggcaaaagcttgttggaatccttttattttagcatatgatgaaagccaaaaaattctaatatggtgcttatgttgtctaattaacaaagaaccacagaattctggacaatcaaaacttaactcctggatacagggtgtattatctcatatactttcagcactcagatttgataaagaagttgctcttttcactcaaggtcttgggtatgcacctatagattactatcctggtttgcttaaaaatatggttttatcattagcgtctgaactcagagagaatcatcttaatggatttaacactcaaaggcgaatggctcccgagcgagtggcgtccctgtcacgagtttgtgtcccacttattaccctgacagatgttgaccccctggtggaggctctcctcatctgtcatggacgtgaacctcaggaaatcctccagccagagttctttgaggctgtaaacgaggccattttgctgaagaagatttctctccccatgtcagctgtagtctgcctctggcttcggcaccttcccagccttgaaaaagcaatgctgcatctttttgaaaagctaatctccagtgagagaaattgtctgagaaggatcgaatgctttataaaagattcatcgctgcctcaagcagcctgccaccctgccatattccgggttgttgatgagatgttcaggtgtgcactcctggaaaccgatggggccctggaaatcatagccactattcaggtgtttacgcagtgctttgtagaagctctggagaaagcaagcaagcagctgcggtttgcactcaagacctactttccttacacttctccatctcttgccatggtgctgctgcaagaccctcaagatatccctcggggacactggctccagacactgaagcatatttctgaactgctcagagaagcagttgaagaccagactcatgggtcctgcggaggtccctttgagagctggttcctgttcattcacttcggaggatgggctgagatggtggcagagcaattactgatgtcggcagccgaaccccccacggccctgctgtggctcttggccttctactacggcccccgtgatgggaggcagcagagagcacagactatggtccaggtgaaggccgtgctgggccacctcctggcaatgtccagaagcagcagcctctcagcccaggacctgcagacggtagcaggacagggcacagacacagacctcagagctcctgcacaacagctgatcaggcaccttctcctcaacttcctgctctgggctcctggaggccacacgatcgcctgggatgtcatcaccctgatggctcacactgctgagataactcacgagatcattggctttcttgaccagaccttgtacagatggaatcgtcttggcattgaaagccctagatcagaaaaactggcccgagagctccttaaagagctgcgaactcaagtctagaaggcacgcaggccgtgtgggtgcccggcgtgagggatcaggctcgccagggccacaggacaggtgatgacctgtggccacgcatttgtggagtaagtgccctcgctgggctgtgagaatgagctgtacacatcttgggacaatctgctagtatctattttacaaaatgcagagccaggtccctcagcccagactcagtcagacatgttcactaatgactcaagtgagccttcggtactcctggtgcccgcccggccagaccgtcagcttgataattactaaagcaaaggcctgggtgggagaacaggtttctagtttttacccaagtcaagctgcacatctattatttaaaaattcaaagtcttagaaccaagaatttggtcatgaaccattaaagaatttagagagaacttagctctttttagactctttttaggagtcagggatctgggataaagccacactgtcttgctgtatggagaaattcttcaaggggagtcagggtccctcaggcttcccttgtgtctccctggacctgcctgacaggccacaggagcagacagcacacccaagcccgggcctccggcacactctttccactctgtatttgctaaatgatgctaactgctaccaaaaggcccttgggacatcagaggagccggcagcgaaggtagaggatgtgttccagaaacattagaaggcaggattaattcagttagttagttctcttgttaaatggaaatgggaattggaaattcctgataaagaattggcctggctgggtgcagtggctcacacctgtgatcccagcactttgggaggccaaggcagggggattacttcagcccaggagttccagactgcctggctaacatggcaataccctatctctactaaaaatacaaaaattatcggggtgcaatggcatgcatctgtaatcccagctattcaagaggctgaggcatgaggatctcttgaacccgggaggtgggagttgtagtgagccgagatcatgacactgcactccagcctgggcaacagagcgagaccatctcttaaaaaaaggcattgttagtgtaatctcaaggttaacatttatttcatgtcagtacagggtgctttttcctttcagggacattctggaattgtattggttgtacattcttttgtgtctattctgtttgtcaagtgagtcaagacttgcttttgtccattttgatttgtgtgtattagtctgagtcttggctccgttttgaggtatgagcaaagttttgctggattagaagttaacctttagggaaattccttattttggtatgtggcaatgctaatagatccactgaagatctggaaaattccaggaacttttcacctgagcctttcttctgagaaatgctgcagtcagaagggtgtgctggtaaagtattttggtggcagctgccatcatggtcattgccttcatataacatgcttcgtgctcatggtcattgccttcatataacatgcttcgtgccatcatgatccttgccttcatataacaaacatgcttcgtcagaggtgttggggttgaaaaaggagctgcatgcttcactggagttgagggcctctctcctgttctgactttaagccagaacttgtggctgggccatggaagctgtgactcctctgtggacatggtggcagcagggaacccctagagagaggggccactgggaccaggcctcctgttgtggagggactcctgggacagtcctccaccctgtcctgtggtcctgtgtacagggttggcctcttcctcctcccctgccaggcctctgcccatgccccttccttccttctcctgggactggtgaagctaggcatctggaagacttcttcctagcctggaagccctgacctcggcccatctgcagaatctcccagttccttcacagctgccgagtcctctcacgggtgcggtggaggcggccttgcggtggtgctttctgggcagccaggggttcctgggtgggaggactgtccctctggggacgtggcactgaagtgcctgctggcttcatgtggccctttgccctttcccagcctgagagatgctcaaaggtggggagctgggggagccacccctcggccattccctccacctccaagacaggtggcggccgggcaggcactcttaagcccacctccccctcttgttgccttcgatttcggcaaagcctgggcaggtgccaccgggaaggaatggcatccgagatgctgggcggggacgcggcgtggccgagggggccttgacggcgttggcggggcctgggcacaggggcagccgcagggaggcagggatggcaaggcgtgaagccaccctggaaggaactggaccaaggtcttcagaggtgcgacagggtctggaatctgaccttactctagcaggagtttttgtagactctccctgatagtttagtttttgataaagcatgctggtaaaaccactaccctcagagagagccaaaaatacagaagaggcggagagcgcccctccaaccaggctgttattcccctggactccgtgacatctgtggaattttttagctctttaaaatctgtaatttgttgtctattttttcattctaaataaaacttcagtttgcacctaaaaaata

SEQ ID NO: 416421 - DNA, 4284 bp, Homo sapiens
agaatgcactgctgacacgtgtgcgcgcgcgcggctccactgccgggcgaccgcgggaaaattccaaaaaaactcaaaaagccaatacgaggcaaagccaaattttcaagccacagatcccgggcggtggcttcctttccgccactgcccaaactgctgaagcagctcccgcgaggaccacccgatttaatgtgtgccgaccatttccttcagtgctggacaggctgctgtgaagggacatcaccttttcgctttttccaagatggctcaagattcagtagatctttcttgtgattatcagttttggatgcagaagctttctgtatgggatcaggcttccactttggaaacccagcaagacacctgtcttcacgtggctcagttccaggagttcctaaggaagatgtatgaagccttgaaagagatggattctaatacagtcattgaaagattccccacaattggtcaactgttggcaaaagcttgttggaatccttttattttagcatatgatgaaagccaaaaaattctaatatggtgcttatgttgtctaattaacaaagaaccacagaattctggacaatcaaaacttaactcctggatacagggtgtattatctcatatactttcagcactcagatttgataaagaagttgctcttttcactcaaggtcttgggtatgcacctatagattactatcctggtttgcttaaaaatatggttttatcattagcgtctgaactcagagagaatcatcttaatggatttaacactcaaaggcgaatggctcccgagcgagtggcgtccctgtcacgagtttgtgtcccacttattaccctgacagatgttgaccccctggtggaggctctcctcatctgtcatggacgtgaacctcaggaaatcctccagccagagttctttgaggctgtaaacgaggccattttgctgaagaagatttctctccccatgtcagctgtagtctgcctctggcttcggcaccttcccagccttgaaaaagcaatgctgcatctttttgaaaagctaatctccagtgagagaaattgtctgagaaggatcgaatgctttataaaagattcatcgctgcctcaagcagcctgccaccctgccatattccgggttgttgatgagatgttcaggtgtgcactcctggaaaccgatggggccctggaaatcatagccactattcaggtgtttacgcagtgctttgtagaagctctggagaaagcaagcaagcagctgcggtttgcactcaagacctactttccttacacttctccatctcttgccatggtgctgctgcaagaccctcaagatatccctcggggacactggctccagacactgaagcatatttctgaactgctcagagaagcagttgaagaccagactcatgggtcctgcggaggtccctttgagagctggttcctgttcattcacttcggaggatgggctgagatggtggcagagcaattactgatgtcggcagccgaaccccccacggccctgctgtggctcttggccttctactacggcccccgtgatgggaggcagcagagagcacagactatggtccaggtgaaggccgtgctgggccacctcctggcaatgtccagaagcagcagcctctcagcccaggacctgcagacggtagcaggacagggcacagacacagacctcagagctcctgcacaacagctgatcaggcaccttctcctcaacttcctgctctgggctcctggaggccacacgatcgcctgggatgtcatcaccctgatggctcacactgctgagataactcacgagatcattggctttcttgaccagaccttgtacagatggaatcgtcttggcattgaaagccctagatcagaaaaactggcccgagagctccttaaagagctgcgaactcaagtctagaaggcacgcaggccgtgtgggtgcccggcgtgagggatcaggctcgccagggccacaggacaggtgatgacctgtggccacgcatttgtggagtaagtgccctcgctgggctgtgagaatgagctgtacacatcttgggacaatctgctagtatctattttacaaaatgcagagccaggtccctcagcccagactcagtcagacatgttcactaatgactcaagtgagccttcggtactcctggtgcccgcccggccagaccgtcagcttgataattactaaagcaaaggcctgggtgggagaacaggtttctagtttttacccaagtcaagctgcacatctattatttaaaaattcaaagtcttagaaccaagaatttggtcatgaaccattaaagaatttagagagaacttagctctttttagactctttttaggagtcagggatctgggataaagccacactgtcttgctgtatggagaaattcttcaaggggagtcagggtccctcaggcttcccttgtgtctccctggacctgcctgacaggccacaggagcagacagcacacccaagcccgggcctccggcacactctttccactctgtatttgctaaatgatgctaactgctaccaaaaggcccttgggacatcagaggagccggcagcgaaggtagaggatgtgttccagaaacattagaaggcaggattaattcagttagttagttctcttgttaaatggaaatgggaattggaaattcctgataaagaattggcctggctgggtgcagtggctcacacctgtgatcccagcactttgggaggccaaggcagggggattacttcagcccaggagttccagactgcctggctaacatggcaataccctatctctactaaaaatacaaaaattatcggggtgcaatggcatgcatctgtaatcccagctattcaagaggctgaggcatgaggatctcttgaacccgggaggtgggagttgtagtgagccgagatcatgacactgcactccagcctgggcaacagagcgagaccatctcttaaaaaaaggcattgttagtgtaatctcaaggttaacatttatttcatgtcagtacagggtgctttttcctttcagggacattctggaattgtattggttgtacattcttttgtgtctattctgtttgtcaagtgagtcaagacttgcttttgtccattttgatttgtgtgtattagtctgagtcttggctccgttttgaggtatgagcaaagttttgctggattagaagttaacctttagggaaattccttattttggtatgtggcaatgctaatagatccactgaagatctggaaaattccaggaacttttcacctgagcctttcttctgagaaatgctgcagtcagaagggtgtgctggtaaagtattttggtggcagctgccatcatggtcattgccttcatataacatgcttcgtgctcatggtcattgccttcatataacatgcttcgtgccatcatgatccttgccttcatataacaaacatgcttcgtcagaggtgttggggttgaaaaaggagctgcatgcttcactggagttgagggcctctctcctgttctgactttaagccagaacttgtggctgggccatggaagctgtgactcctctgtggacatggtggcagcagggaacccctagagagaggggccactgggaccaggcctcctgttgtggagggactcctgggacagtcctccaccctgtcctgtggtcctgtgtacagggttggcctcttcctcctcccctgccaggcctctgcccatgccccttccttccttctcctgggactggtgaagctaggcatctggaagacttcttcctagcctggaagccctgacctcggcccatctgcagaatctcccagttccttcacagctgccgaatgctgggcggggacgcggcgtggccgagggggccttgacggcgttggcggggcctgggcacaggggcagccgcagggaggcagggatggcaaggcgtgaagccaccctggaaggaactggaccaaggtcttcagaggtgcgacagggtctggaatctgaccttactctagcaggagtttttgtagactctccctgatagtttagtttttgataaagcatgctggtaaaaccactaccctcagagagagccaaaaatacagaagaggcggagagcgcccctccaaccaggctgttattcccctggactccgtgacatctgtggaattttttagctctttaaaatctgtaatttgttgtctattttttcattctaaataaaacttcagtttgcacctaaaaaata

SEQ ID NO: 416422 - DNA, 3661 bp, Homo sapiens
caggcaggctccacggcatgcgggcagagggatgtttaaagtttctctaatacttactgattctgtattatggatcgcctgagcttttatagaaaatgtgggacatacaggagtatacagaggaataagctgcctgtaacccctgcccagggagaccaccgtatgcacttcctcaagcagcctgccaccctgccatattccgggttgttgatgagatgttcaggtgtgcactcctggaaaccgatggggccctggaaatcatagccactattcaggtgtttacgcagtgctttgtagaagctctggagaaagcaagcaagcagctgcggtttgcactcaagacctactttccttacacttctccatctcttgccatggtgctgctgcaagaccctcaagatatccctcggggacactggctccagacactgaagcatatttctgaactgctcagagaagcagttgaagaccagactcatgggtcctgcggaggtccctttgagagctggttcctgttcattcacttcggaggatgggctgagatggtggcagagcaattactgatgtcggcagccgaaccccccacggccctgctgtggctcttggccttctactacggcccccgtgatgggaggcagcagagagcacagactatggtccaggtgaaggccgtgctgggccacctcctggcaatgtccagaagcagcagcctctcagcccaggacctgcagacggtagcaggacagggcacagacacagacctcagagctcctgcacaacagctgatcaggcaccttctcctcaacttcctgctctgggctcctggaggccacacgatcgcctgggatgtcatcaccctgatggctcacactgctgagataactcacgagatcattggctttcttgaccagaccttgtacagatggaatcgtcttggcattgaaagccctagatcagaaaaactggcccgagagctccttaaagagctgcgaactcaagtctagaaggcacgcaggccgtgtgggtgcccggcgtgagggatcaggctcgccagggccacaggacaggtgatgacctgtggccacgcatttgtggagtaagtgccctcgctgggctgtgagaatgagctgtacacatcttgggacaatctgctagtatctattttacaaaatgcagagccaggtccctcagcccagactcagtcagacatgttcactaatgactcaagtgagccttcggtactcctggtgcccgcccggccagaccgtcagcttgataattactaaagcaaaggcctgggtgggagaacaggtttctagtttttacccaagtcaagctgcacatctattatttaaaaattcaaagtcttagaaccaagaatttggtcatgaaccattaaagaatttagagagaacttagctctttttagactctttttaggagtcagggatctgggataaagccacactgtcttgctgtatggagaaattcttcaaggggagtcagggtccctcaggcttcccttgtgtctccctggacctgcctgacaggccacaggagcagacagcacacccaagcccgggcctccggcacactctttccactctgtatttgctaaatgatgctaactgctaccaaaaggcccttgggacatcagaggagccggcagcgaaggtagaggatgtgttccagaaacattagaaggcaggattaattcagttagttagttctcttgttaaatggaaatgggaattggaaattcctgataaagaattggcctggctgggtgcagtggctcacacctgtgatcccagcactttgggaggccaaggcagggggattacttcagcccaggagttccagactgcctggctaacatggcaataccctatctctactaaaaatacaaaaattatcggggtgcaatggcatgcatctgtaatcccagctattcaagaggctgaggcatgaggatctcttgaacccgggaggtgggagttgtagtgagccgagatcatgacactgcactccagcctgggcaacagagcgagaccatctcttaaaaaaaggcattgttagtgtaatctcaaggttaacatttatttcatgtcagtacagggtgctttttcctttcagggacattctggaattgtattggttgtacattcttttgtgtctattctgtttgtcaagtgagtcaagacttgcttttgtccattttgatttgtgtgtattagtctgagtcttggctccgttttgaggtatgagcaaagttttgctggattagaagttaacctttagggaaattccttattttggtatgtggcaatgctaatagatccactgaagatctggaaaattccaggaacttttcacctgagcctttcttctgagaaatgctgcagtcagaagggtgtgctggtaaagtattttggtggcagctgccatcatggtcattgccttcatataacatgcttcgtgctcatggtcattgccttcatataacatgcttcgtgccatcatgatccttgccttcatataacaaacatgcttcgtcagaggtgttggggttgaaaaaggagctgcatgcttcactggagttgagggcctctctcctgttctgactttaagccagaacttgtggctgggccatggaagctgtgactcctctgtggacatggtggcagcagggaacccctagagagaggggccactgggaccaggcctcctgttgtggagggactcctgggacagtcctccaccctgtcctgtggtcctgtgtacagggttggcctcttcctcctcccctgccaggcctctgcccatgccccttccttccttctcctgggactggtgaagctaggcatctggaagacttcttcctagcctggaagccctgacctcggcccatctgcagaatctcccagttccttcacagctgccgagtcctctcacgggtgcggtggaggcggccttgcggtggtgctttctgggcagccaggggttcctgggtgggaggactgtccctctggggacgtggcactgaagtgcctgctggcttcatgtggccctttgccctttcccagcctgagagatgctcaaaggtggggagctgggggagccacccctcggccattccctccacctccaagacaggtggcggccgggcaggcactcttaagcccacctccccctcttgttgccttcgatttcggcaaagcctgggcaggtgccaccgggaaggaatggcatccgagatgctgggcggggacgcggcgtggccgagggggccttgacggcgttggcggggcctgggcacaggggcagccgcagggaggcagggatggcaaggcgtgaagccaccctggaaggaactggaccaaggtcttcagaggtgcgacagggtctggaatctgaccttactctagcaggagtttttgtagactctccctgatagtttagtttttgataaagcatgctggtaaaaccactaccctcagagagagccaaaaatacagaagaggcggagagcgcccctccaaccaggctgttattcccctggactccgtgacatctgtggaattttttagctctttaaaatctgtaatttgttgtctattttttcattctaaataaaacttcagtttgcacctaaaaaata

SEQ ID NO: 416423 - DNA, 2348 bp, Homo sapiens
agaatgcactgctgacacgtgtgcgcgcgcgcggctccactgccgggcgaccgcgggaaaattccaaaaaaactcaaaaagccaatacgaggcaaagccaaattttcaagccacagatcccgggcggtggcttcctttccgccactgcccaaactgctgaagcagctcccgcgaggaccacccgatttaatgtgtgccgaccatttccttcagtgctggacaggctgctgtgaagggacatcaccttttcgctttttccaagatggctcaagattcagtagatctttcttgtgattatcagttttggatgcagaagctttctgtatgggatcaggcttccactttggaaacccagcaagacacctgtcttcacgtggctcagttccaggagttcctaaggaagatgtatgaagccttgaaagagatggattctaatacagtcattgaaagattccccacaattggtcaactgttggcaaaagcttgttggaatccttttattttagcatatgatgaaagccaaaaaattctaatatggtgcttatgttgtctaattaacaaagaaccacagaattctggacaatcaaaacttaactcctggatacagggtgtattatctcatatactttcagcactcagatttgataaagaagttgctcttttcactcaaggtcttgggtatgcacctatagattactatcctggtttgcttaaaaatatggttttatcattagcgtctgaactcagagagaatcatcttaatggatttaacactcaaaggcgaatggctcccgagcgagtggcgtccctgtcacgagtttgtgtcccacttattaccctgacagatgttgaccccctggtggaggctctcctcatctgtcatggacgtgaacctcaggaaatcctccagccagagttctttgaggctgtaaacgaggccattttgctgaagaagatttctctccccatgtcagctgtagtctgcctctggcttcggcaccttcccagccttgaaaaagcaatgctgcatctttttgaaaagctaatctccagtgagagaaattgtctgagaaggatcgaatgctttataaaagattcatcgctgcctcaagcagcctgccaccctgccatattccgggttgttgatgagatgttcaggtgtgcactcctggaaaccgatggggccctggaaatcatagccactattcaggtgtttacgcagtgctttgtagaagctctggagaaagcaagcaagcagctgcggtttgcactcaagacctactttccttacacttctccatctcttgccatggtgctgctgcaagaccctcaagatatccctcggggacactggctccagacactgaagcatatttctgaactgctcagagaagcagttgaagaccagactcatgggtcctgcggaggtccctttgagagctggttcctgttcattcacttcggaggatgggctgagatggtggcagagcaattactgatgtcggcagccgaaccccccacggccctgctgtggctcttggccttctactacggcccccgtgatgggaggcagcagagagcacagactatggtccaggtgaaggccgtgctgggccacctcctggcaatgtccagaagcagcagcctctcagcccaggacctgcagacggtagcaggacagggcacagacacagacctcagagctcctgcacaacagctgatcaggcaccttctcctcaacttcctgctctgggctcctggaggccacacgatcgcctgggatgtcatcaccctgatggctcacactgctgagataactcacgagatcattggctttcttgaccagaccttgtacagatggaatcgtcttggcattgaaagccctagatcagaaaaactggcccgagagctccttaaagagctgcgaactcaagtctagaaggcacgcaggccgtgtgggtgcccggcgtgagggatcaggctcgccagggccacaggacaggtgatgacctgtggccacgcatttgtggagtaagtgccctcgctgggctgtgagaatgagctgtacacatcttgggacaatctgctagtatctattttacaaaatgcagagccaggtccctcagcccagactcagtcagacatgttcactaatgactcaagtgagccttcggtactcctggtgcccgcccggccagaccgtcagcttgataattactaaagcaaaggcctgggtgggagaacaggtttctagtttttacccaagtcaagctgcacatctattatttaaaaattcaaagtcttagaaccaagaatttggtcatgaaccattaaagaatttagagaga

SEQ ID NO: 416424 - DNA, 1747 bp, Homo sapiens
agaatgcactgctgacacgtgtgcgcgcgcgcggctccactgccgggcgaccgcgggaaaattccaaaaaaactcaaaaagccaatacgaggcaaagccaaattttcaagccacagatcccgggcggtggcttcctttccgccactgcccaaactgctgaagcagctcccgcgaggaccacccgatttaatgtgtgccgaccatttccttcagtgctggacaggctgctgtgaagggacatcaccttttcgctttttccaagatggctcaagattcagtagatctttcttgtgattatcagttttggatgcagaagctttctgtatgggatcaggcttccactttggaaacccagcaagacacctgtcttcacgtggctcagttccaggagttcctaaggaagatgtatgaagccttgaaagagatggattctaatacagtcattgaaagattccccacaattggtcaactgttggcaaaagcttgttggaatccttttattttagcatatgatgaaagccaaaaaattctaatatggtgcttatgttgtctaattaacaaagaaccacagaattctggacaatcaaaacttaactcctggatacagggtgtattatctcatatactttcagcactcagatttgataaagaagttgctcttttcactcaaggtcttgggtatgcacctatagattactatcctggtttgcttaaaaatatggttttatcattagcgtctgaactcagagagaatcatcttaatggatttaacactcaaaggcgaatggctcccgagcgagtggcgtccctgtcacgagtttgtgtcccacttattaccctgacagatgttgaccccctggtggaggctctcctcatctgtcatggacgtgaacctcaggaaatcctccagccagagttctttgaggctgtaaacgaggccattttgctgaagaagatttctctccccatgtcagctgtagtctgcctctggcttcggcaccttcccagccttgaaaaagcaatgctgcatctttttgaaaagctaatctccagtgagagaaattgtctgagaaggatcgaatgctttataaaagattcatcgctgcctcaagcagcctgccaccctgccatattccgggttgttgatgagatgttcaggtgtgcactcctggaaaccgatggggccctggaaatcatagccactattcaggtgtttacgcagtgctttgtagaagctctggagaaagcaagcaagcagctgcggtttgcactcaagacctactttccttacacttctccatctcttgccatggtgctgctgcaagaccctcaagatatccctcggggacactggctccagacactgaagcatatttctgaactgctcagagaagcagttgaagaccagactcatgggtcctgcggaggtccctttgagagctggttcctgttcattcatcctgcaaaacgaagacccttcttccccaaggtcatttgatctgttattgctcagctgccatatctgccccagggtcgcgtcctccaaggcgtgccctgcagaggcgggctgttctgaggggtgtgccggcagcagagcctggccacagccagggccctgtctcgctccccagcagcccggccagggcttgcttccatcttgactgtctcctttcttggatcagtcaacagatcctcacattactggctttatttacatctcttactaaagtaatcagatgatattaac

SEQ ID NO: 416425 - DNA, 1227 bp, Homo sapiens
agaatgcactgctgacacgtgtgcgcgcgcgcggctccactgccgggcgaccgcgggaaaattccaaaaaaactcaaaaagccaatacgaggcaaagccaaattttcaagccacagatcccgggcggtggcttcctttccgccactgcccaaactgctgaagcagctcccgcgaggaccacccgatttaatgtgtgccgaccatttccttcagtgctggacaggctgctgtgaagggacatcaccttttcgctttttccaagatggctcaagattcagtagatctttcttgtgattatcagttttggatgcagaagctttctgtatgggatcaggcttccactttggaaacccagcaagacacctgtcttcacgtggctcagttccaggagttcctaaggaagatgtatgaagccttgaaagagatggattctaatacagtcattgaaagattccccacaattggtcaactgttggcaaaagcttgttggaatccttttattttagcatatgatgaaagccaaaaaattctaatatggtgcttatgttgtctaattaacaaagaaccacagaattctggacaatcaaaacttaactcctggatacagggtgtattatctcatatactttcagcactcagatttgataaagaagttgctcttttcactcaaggtcttgggtatgcacctatagattactatcctggtttgcttaaaaatatggttttatcattagcgtctgaactcagagagaatcatcttaatggatttaacactcaaaggcgaatggctcccgagcgagtggcgtccctgtcacgagtttgtgtcccacttattaccctgacagatgttgaccccctggtggaggctctcctcatctgtcatggacgtgaacctcaggaaatcctccagccagagttctttgaggctgtaaacgaggccattttgctttgcagggaagacacccagtgttgttgggggaagactcctgtaagtatatagattatcgagagagctggcgttttcatgatgttaaggctgtctgtccgcctgttcaagaacacatacgttttaccatttgttaagcttttgtgatctgaagggagtgttgtatatatttttcacacattggatttacacatttcttgttcctaatgttttgttgtatttgtgttttcaatgttttcactgtcataaatggatcttctcctccatcttcaaaaaaaaaa

SEQ ID NO: 416426 - DNA, 792 bp, Homo sapiens
agaatgcactgctgacacgtgtgcgcgcgcgcggctccactgccgggcgaccgcgggaaaattccaaaaaaactcaaaaagccaatacgaggcaaagccaaattttcaagccacagatcccgggcggtggcttcctttccgccactgcccaaactgctgaagcagctcccgcgaggaccacccgatttaatgtgtgccgaccatttccttcagtgctggacaggctgctgtgaagggacatcaccttttcgctttttccaagatggctcaagattcagtagatctttcttgtgattatcagttttggatgcagaagctttctgtatgggatcaggcttccactttggaaacccagcaagacacctgtcttcacgtggctcagttccaggagttcctaaggaagatgtatgaagccttgaaagagatggattctaatacagtcattgaaagattccccacaattggtcaactgttggcaaaagcttgttggaatccttttattttagcatatgatgaaagccaaaaaattctaatatggtgcttatgttgtctaattaacaaagaaccacagaattctggacaatcaaaacttaactcctggatacagactgaaacgtcacctcttcccgggtctaaagcctgctggccttctgactgaaactataccggtgactctcctggttatctgggcatttgctctcttgtgtctctgacttgctggctactgtaatggtgttagctgattccttataataaatccctgtgtgtgtgtgtgtctatcttattggttca

SEQ ID NO: 416427 - DNA, 588 bp, Homo sapiens
ctttggattttccatcctgtggcagctgcggtttgcactcaagacctactttccttacacttctccatctcttgccatggtgctgctgcaagaccctcaaggtgagttagggttgactttgcccacatcagaatgatttcctgggaagagcattgtcaaattatgacctcctcatcaggcccttatctacagcatgagggagacagaactggttatttctaagatccctttaagcccccaggatcccacattctgtggattttgatatgagagtctgcttggcttcccagttgtgatcacttaccaaaagaagaaaacaaacaaaaaaacaatggcctctggtaggtgttgctagtctgcctccagataacacaggctcttctggtgccaaccagatccaccagatgccaggaacaggctaagacttggctgagtcagaataaaacagtacattcgtttgcttttcattctttctactctgtgcagccttgttgcagaagaaaagacaaaatgatggatgaagctgaggaaatgcaggggaagtttcccctaaccaagctaagggaaggattttgagagagttcagta

SEQ ID NO: 416428 - DNA, 555 bp, Homo sapiens
caattctcatgttcgtgtgagccttttgcagaaagtcaagccacagcatgctcatttgcctttgttccccacagtggatcatcccacaacttgtgactggcattctgagaagcacttctgattgcaagcagcgcttgtttgtggcctttatgagtctaaggctgttggcagctgagctcaatgcgaggaggctcgttaggaaatggcaccgctcactgtgtagccagccttggagacagacttgctatgctaatcaccttgcaaactagagcccctgatgctttactttggaactgatggaaatgctggatagggcttctttcagggactgggtggttatggtccgtccctggacaaaggacaaatctgtctggaaagtgttttaatttgccttctcttctgtcctgattgcagatggctcacactgctgagataactcacgagatcattggctttcttgaccagaccttgtacagatggaatcgtcttggcattgaaagccctagatcagaaaaactggcccgagagctccttaaagagctgcgaactcaagtc

SEQ ID NO: 416429 - DNA, 1144 bp, Homo sapiens
tcagaccaatagtgattaggaaaccttgaagcctgcccaacgatcgtgggcaggaggtggtttctggtttgttggggcgtgtgtatgtgtatttggggggactgaagggtacgtggggcgaaacaaaaccggccatggcagcagcggaggaggaggacgggggccccgaagggccaaatcgcgagcggggcggggcgggcgcgaccttcgaatgtaatatatgtttggagactgctcgggaagctgtggtcagtgtgtgtggccacctgtactgttggccatgtcttcatcagtggctggagacacggccagaacggcaagagtgtccagtatgtaaagctgggatcagcagagagaaggttgtcccgctttatgggcgagggagccagaagccccaggatcccagattaaaaactccaccccgcccccagggccagagaccagctccggagagcagagggggattccagccatttggtgataccgggggcttccacttctcatttggtgttggtgcttttccctttggctttttcaccaccgtcttcaatgcccatgagcctttccgccggggtacaggtgtggatctgggacagggtcacccagcctccagctggcaggattccctcttcctgtttctcgccatcttcttctttttttggctgctcagtatttgagctatgtctgcttcctgcccacctccagccagagaagaatcagtattgagggtccctgctgacccttccgtactcctggacccccttgacccctctatttctgttggctaaggccagccctggacattgtccaggaaggcctggggaggaggagtgaagtctgtgcatagatgggagagccttctgctcagaggctcactcagtaacgttgtttaattctctgccctggggaaggaggatggattgagagaatgtctttctcctctcctaagtctttgctttccctgatttcttgatttgatcttcaaaggtgggcaaagttccctctgactcttcccccactccccatcttactgatttaatttaatttttcactccccagagtctaatatggattctgactcttaagtgcttccgccccctcactacctcctttaatacaaattcaataaaaaaggtgaaatata

SEQ ID NO: 416430 - DNA, 821 bp, Homo sapiens
tcagaccaatagtgattaggaaaccttgaagcctgcccaacgatcgtgggcaggaggtggtttctggtttgttggggcgtgtgtatgtgtatttggggggactgaagggtacgtggggcgaaacaaaaccggccatggcagcagcggaggaggaggacgggggccccgaagggccaaatcgcgagcggggcggggcgggcgcgaccttcgaatgtaatatatgtttggagactgctcgggaagctgtggtcagtgtgtgtggatctgggacagggtcacccagcctccagctggcaggattccctcttcctgtttctcgccatcttcttctttttttggctgctcagtatttgagctatgtctgcttcctgcccacctccagccagagaagaatcagtattgagggtccctgctgacccttccgtactcctggacccccttgacccctctatttctgttggctaaggccagccctggacattgtccaggaaggcctggggaggaggagtgaagtctgtgcatagatgggagagccttctgctcagaggctcactcagtaacgttgtttaattctctgccctggggaaggaggatggattgagagaatgtctttctcctctcctaagtctttgctttccctgatttcttgatttgatcttcaaaggtgggcaaagttccctctgactcttcccccactccccatcttactgatttaatttaatttttcactccccagagtctaatatggattctgactcttaagtgcttccgccccctcactacctcctttaatacaaattcaataaaaaaggtgaaatata

SEQ ID NO: 416431 - DNA, 1414 bp, Homo sapiens
tcagaccaatagtgattaggaaaccttgaagcctgcccaacgatcgtgggcaggaggtggtttctggtttgttggggcgtgtgtatgtgtatttggggggactgaagggtacgtggggcgaaacaaaaccggccatggcagcagcggaggaggaggacgggggccccgaagggccaaatcgcgagcggggcggggcgggcgcgaccttcgaatgtaatatatgtttggagactgctcgggaagctgtggtcagtgtgtgtggccacctgtactgttggccatgtcttcatcagtggctggagacacggccagaacggcaagagtgtccagtatgtaaagctgggatcagcagagagaaggttgtcccgctttatgggcgagggagccagaagccccaggatcccagattaaaaactccaccccgcccccagggccagagaccagctccggagagcagagggggattccagccatttggtgataccgggggcttccacttctcatttggtgttggtgcttttccctttggctttttcaccaccgtcttcaatgcccatgagcctttccgccggggtacaggtgtggatctgggacagggtcacccagcctccagctggcaggattccctcttcctgtttctcgccatcttcttctttttttggctgctcagtatttgagctatgtctgcttcctgcccacctccagccagagaagaatcagtattgagggtccctgctgacccttccgtactcctggacccccttgacccctctatttctgttggctaaggccagccctggacattgtccaggaaggcctggggaggaggagtgaagtctgtgcatagatgggagagccttctgctcagaggctcactcagtaacgttgtttaattctctgccctggggaaggaggatggattgagagaatgtctttctcctctcctaagtctttgctttccctgatttcttgatttgatcttcaaaggtgggcaaagttccctctgactcttcccccactccccatcttactgatttaatttaatttttcactccccagagtctaatatggattctgactcttaagtgcttccgccccctcactacctcctttaatacaaattcaataaaaaaggtgaaatataaaaaaaaaaaagtggcgcggcggaatttagtatgtattactcaccgggattccggtctgtcgtgaggggacaagcttccaaaaagagcggataaacttgggtaccaggcaaaccgttcaggggaatgtttccggccaatccaaacaattgggcggcgaaaatgtaaccgggtccaacaggcccacgcataatggtgggccagcccgttcattggaactgttgccatgataaaaacgccacccgggaaggggttctttgggcaggtgtttg

SEQ ID NO: 416432 - DNA, 1211 bp, Homo sapiens
  misc_feature (1149)..(1149): n is a, c, g, or t
tcagaccaatagtgattaggaaaccttgaagcctgcccaacgatcgtgggcaggaggtggtttctggtttgttggggcgtgtgtatgtgtatttggggggactgaagggtacgtggggcgaaacaaaaccggccatggcagcagcggaggaggaggacgggggccccgaagggccaaatcgcgagcggggcggggcgggcgcgaccttcgaatgtaatatatgtttggagactgctcgggaagctgtggtcagtgtgtgtggccacctgtactgttggccatgtcttcatcagtggctggagacacggccagaacggcaagagtgtccagtatgtaaagctgggatcagcagagagaaggttgtcccgctttatgggcgagggagccagaagccccaggatcccagattaaaaactccaccccgcccccagggccagagaccagctccggagagcagagggggattccagccatttggtgataccgggggcttccacttctcatttggtgttggtgcttttccctttggctttttcaccaccgtcttcaatgcccatgagcctttccgccggggtacaggtgtggatctgggacagggtcacccagcctccagctggcaggattccctcttcctgtttctcgccatcttcttctttttttggctgctcagtatttgagctatgtctgcttcctgcccacctccagccagagaagaatcagtattgagggtccctgctgacccttccgtactcctggacccccttgacccctctatttctgttggctaaggccagccctggacattgtccaggaaggcctggggaggaggagtgaagtctgtgcatagatgggagagccttctgctcagaggctcactcagtaacgttgtttaattctctgccctggggaaggaggatggattgagagaatgtctttctcctctcctaagtctttgctttccctgatttcttgatttgatcttcaaaggtgggcaaagttccctctgactcttcccccactccccatcttactgatttaatttaatttttcactccccagagtctaatatggattctgactcttaagtgcttccgccccctcactacctcctttaatacaaattcaataaaaaaggtgaaatataaaaanaacaaaaacacaaaaaaaaaattttgggggggcctgggcccgaaaaaagtttttaaaacctg

SEQ ID NO: 416433 - DNA, 1729 bp, Homo sapiens
tcagaccaatagtgattaggaaaccttgaagcctgcccaacgatcgtgggcaggaggtggtttctggtttgttggggcgtgtgtatgtgtatttggggggactgaagggtacgtggggcgaaacaaaaccggccatggcagcagcggaggaggaggacgggggccccgaagggccaaatcgcgagcggggcggggcgggcgcgaccttcgaatgtaatatatgtttggagactgctcgggaagctgtggtcagtgtgtgtggccacctgtactgttggccatgtcttcatcagtggctggagacacggccagaacggcaagagtgtccagtatgtaaagctgggatcagcagagagaaggttgtcccgctttatgggcgagggagccagaagccccaggatcccagattaaaaactccaccccgcccccagggccagagaccagctccggagagcagagggggattccagccatttggtgataccgggggcttccacttctcatttggtgttggtgcttttccctttggctttttcaccaccgtcttcaatgcccatgagcctttccgccggggtacaggtgtggatctgggacagggtcacccagcctccagctggcaggattccctcttcctgtttctcgccatcttcttctttttttggctgctcagtatttgagctatgtctgcttcctgcccacctccagccagagaagaatcagtattgagggtccctgctgacccttccgtactcctggacccccttgacccctctatttctgttggctaaggccagccctggacattgtccaggaaggcctggggaggaggagtgaagtctgtgcatagatgggagagccttctgctcagaggctcactcagtaacgttgtttaattctctgccctggggaaggaggatggattgagagaatgtctttctcctctcctaagtctttgctttccctgatttcttgatttgatcttcaaaggtgggcaaagttccctctgactcttcccccactccccatcttactgatttaatttaatttttcactccccagagtctaatatggattctgactcttaagtgcttccgccccctcactacctcctttaatacaaattcaataaaaaaggtgaaatataaaaaaaaaaaaaaaaaaaaaaaaaagagggtgtaaaaaaaaaaaaaaaaaaaaaaaaaaaaatgttttgtgggcgcgcccgcccgcgcggcccccgagaaaagatttttcaaaccccttgcgtggggggcgcgcgcgggcccccaggagtgtaacgagagcaacagcggcggccacacgacggggctttccccagaggagaaaccctcggggcccagcacaagcggctgcggggatttccccaccacactaaaaaaagaccgccgcggggaaaaacagaagcgctgtgctgctacacacacactccccccagagggggggctctctcgagagccacccacaacggggggttcatcacaccacagcgggcggctccccaccgaggcagctccgctccgattaatcaaaattaacaaggcccccgcccgggtggtgagcctctcacgccgcgccatccgcatgccgcctccatcgccgcccgactccctcagctaaccagcaacccagcaaccacatccacgcagccagcacacagaccatcatcccatgctgaacacaccaaacgatcaacagtcaagacagacgc

SEQ ID NO: 416434 - DNA, 1195 bp, Homo sapiens
tcagaccaatagtgattaggaaaccttgaagcctgcccaacgatcgtgggcaggaggtggtttctggtttgttggggcgtgtgtatgtgtatttggggggactgaagggtacgtggggcgaaacaaaaccggccatggcagcagcggaggaggaggacgggggccccgaagggccaaatcgcgagcggggcggggcgggcgcgaccttcgaatgtaatatatgtttggagactgctcgggaagctgtggtcagtgtgtgtggccacctgtactgttggccatgtcttcatcagtggctggagacacggccagaacggcaagagtgtccagtatgtaaagctgggatcagcagagagaaggttgtcccgctttatgggcgagggagccagaagccccaggatcccagattaaaaactccaccccgcccccagggccagagaccagctccggagagcagagggggattccagccatttggtgataccgggggcttccacttctcatttggtgttggtgcttttccctttggctttttcaccaccgtcttcaatgcccatgagcctttccgccggggtacaggtgtggatctgggacagggtcacccagcctccagctggcaggattccctcttcctgtttctcgccatcttcttctttttttggctgctcagtatttgagctatgtctgcttcctgcccacctccagccagagaagaatcagtattgagggtccctgctgacccttccgtactcctggacccccttgacccctctatttctgttggctaaggccagccctggacattgtccaggaaggcctggggaggaggagtgaagtctgtgcatagatgggagagccttctgctcagaggctcactcagtaacgttgtttaattctctgccctggggaaggaggatggattgagagaatgtctttctcctctcctaagtctttgctttccctgatttcttgatttgatcttcaaaggtgggcaaagttccctctgactcttcccccactccccatcttactgatttaatttaatttttcactccccagagtctaatatggattctgactcttaagtgcttccgccccctcactacctcctttaatacaaattcaataaaaaaggtgaaatataaaattaacagtaagatggggagtgggggaccagaactgggatcctctaaca

SEQ ID NO: 416435 - DNA, 968 bp, Homo sapiens
tcagaccaatagtgattaggaaaccttgaagcctgcccaacgatcgtgggcaggaggtggtttctggtttgttggggcgtgtgtatgtgtatttggggggactgaagggtacgtggggcgaaacaaaaccggccatggcagcagcggaggaggaggacgggggccccgaagggccaaatcgcgagcggggcggggcgggcgcgaccttcgaatgtaatatatgtttggagactgctcgggaagctgtggtcagtgtgtgtggccacctgtactgttggccatgtcttcatcagtggctggagacacggccagaacggcaagagtgtccagtatgtaaagctgggatcagcagagagaaggttgtcccgctttatgggcgagggagccagaagccccaggatcccagattaaaaactccaccccgcccccagggccagagaccagctccggagagcagagggggattccagccatttggtgataccgggggcttccacttctcatttggtgttggtgcttttccctttggctttttcaccaccgtcttcaatgcccatgagcctttccgccggggtacaggtgtggatctgggacagggtcacccagcctccagctggcaggattccctcttcctgtttctcgccatcttcttctttttttggctgctcagtatttgagctatgtctgcttcctgcccacctccagccagagaagaatcagtattgaggggggaaggaggatggattgagagaatgtctttctcctctcctaagtctttgctttccctgatttcttgatttgatcttcaaaggtgggcaaagttccctctgactcttcccccactccccatcttactgatttaatttaatttttcactccccagagtctaatatggattctgactcttaagtgcttccgccccctcactacctcctttaatacaaattcaataaaaaaggtgaaatata

SEQ ID NO: 416436 - DNA, 930 bp, Homo sapiens
  misc_feature (2)..(2): n is a, c, g, or t
  misc_feature (54)..(54): n is a, c, g, or t
  misc_feature (61)..(61): n is a, c, g, or t
antgtggtgaaacaggtgaaaacccttctgtaactaaaaaatacaaaaaactanccccagntgtggtggcaacaaggccctagtttatttatttatttaaaagaacggggtttccactctgtcaccccaggctgccaggcagtggcacaatcatggctcactgcaaacctcaaactccctgggttcgagcgatcctcttgcctcagcctcccaaagcacagtgacagcaagcctcactctacatcttcagtgctggacgtcatccagtgtcatggcatcatgtgatttttagggtactattcatgtgtgttcagttatgtaaacttgtttctcagttgtatcaataggcgtaaataagttctcattgttgatgttattgaagtgtatccataagtatgtatggtcattcctctttttttttttaaggatgatacatatatttatttcttaaaaatttcaggggacgtcccagtgttagccacttcttgtcccttctgtgggctacatccagttgtaattgttcagtacaacacatcaggtgtttgaaatgcctcaaatgtcaagaaacactaacttatctctggcataccgtactttttaaagcagaagtattttctgtaatggttactacagagtgtttactggttaatttttagttaaccagaagcatacattccatagctattccagttaactgaggtttatatccataaagacattaccagagatagaaaaatttcccttttcttcagctagagaccccaggcaccaacacaccctcaccaccttcttgaaaatataaagtgatgggacagggtgcggtggctcaagtctgtaatcctagtgctttgggaggctgaggcagatggatcacttgagaccaggagtttgagaccagtgtggtgaacatggtgaaacccttctgtacta

SEQ ID NO: 416437 - DNA, 1182 bp, Homo sapiens
tcctaattcttggctttagttctgttttcttcaactatagggagcgagtcaagtcatcccacctctgtgagacttgcttgattatttgcaggcatctatgcatgactccttccgtctttcattgtcttgactgcacagccttagtacctccagatccccacccacctattactttctcaggagttttgaactttctcactaacttttttaatgtggatctaggattgaaaagaatcgtgagcttaggaagcgttacagatacaaagactacaaattcaggtctcacttgtcaaatatcagaaaggttatttctgacagtcctccttccccaaatctaaatgtttccctcttttagcaatctttccctccctcataactttagcatggtgtatggtgtgtgcgtagtcatacattagtgtgatttttgtctgttttgaacactatactgtgaagtccacgaggtagaggcacagtgacagcaagcctcactctacatcttcagtgctggacgtcatccagtgtcatggcatcatgtgatttttagggtactattcatgtgtgttcagttatgtaaacttgtttctcagttgtatcaataggcgtaaataagttctcattgttgatgttattgaagtgtatccataagtatgtatggtcattcctctttttttttttaaggatgatacatatatttatttcttaaaaatttcaggggacgtcccagtgttagccacttcttgtcccttctgtgggctacatccagttgtaattgttcagtacaacacatcaggtgtttgaaatgcctcaaatgtcaagaaacactaacttatctctggcataccgtactttttaaagcagaagtattttctgtaatggttactacagagtgtttactggttaatttttagttaaccagaagcatacattccatagctattccagttaactgaggtttatatccataaagacattaccagagatagaaaaatttcccttttcttcagctagagaccccaggcaccaacacaccctcaccaccttcttgaaaatataaagtgatgggacagggtgcggtggctcaagtctgtaatcctagtgctttgggaggctgaggcagatggatcacttgagaccaggagtttgagaccagtgtggtgaacatggtgaaacccttctgtacta

SEQ ID NO: 416438 - DNA, 512 bp, Homo sapiens
acttccttgttcatctgttcattcattcattcttctatgcattggttagttcatggaatatctcactctttcattcattcatgtccttctgcaatgattcattcactgctttgttcatctgttcattcactcattcttctatgcattgatgaaatcactcattcagtgatttattcatctatactcatgcttcaatgcattgatttactcatttcctcatgcatttattcattcatctatgcattggttaaatcactggccaactcactaactcattcattcattcacacttttctgcaatgatttgttcacttgttcactcccttgcttatctgttcattcactcattcttcaatacattgaccaagccattcactgacatttattcagctacatttattctttcatgcattggtttctggatttatttggtcattcatttatttattttgcaaaattaatgtatttttaattgacaaataaaaactgtatatattttcatgtgcaacata

SEQ ID NO: 416439 - DNA, 438 bp, Homo sapiens
ccttttcacgtaatcacagtataaactgatttcttggctccaaatatgatgatagttttttaaaagagcaagaagcaagtatgctccctatatgtcatcatatacattttggaaacttcagagtcttaaaaatcattctgaccaggtgtggtggctcacacctgtaatccaatcacttctgaaggccaaagctggtagactgcttgagtccaggagtttaagaccggcctagtcaacatggcaaaaacccatctctacaaaaaaaaatgtataaattagctgggcgtggtggcatgttatctgtagttccagctacgtgggaggctgaggtgggaggaatacctgagcctggagaggtcgggacctcagtaagccgtgactgcaccactgcactccagcctaggtggcagagtgagaccctgtctcagaaaaaaaaaa

SEQ ID NO: 416440 - DNA, 2121 bp, Homo sapiens
  misc_feature (1)..(2): n is a, c, g, or t
nnaaaaggctcttgcaggaagcattgcttgttaggagccatcctgtgctttcaggtgtcacagattagcatggggttggagggtgggagacagcatcctgaagagcaggggtaggtgtggctttgcctggggctgtggcagagaggagagacatgcagttatcaaaagagtcagctgcactgtctttttagctttgccctgtggacactggaactcagctatttggagtttccaacatctctcacatcaagtccaaggagaacctttcccttagtttcctcagctgcagaatgggctgctgacttctcagggactttgagggaataactttcatttcattcacccagcagtgccctcatgtttactgttttcaatgagtaacagttgtctccattagtttgtgtttgttgttttgtaattctgcctttttttttcctctctctctatccctactccaaacaggtaccctgtttgcttgtattgctttcttagaaacacttggaggagtcactgcagtttctacttttaatggaatttactcagccactgttgcttggtaccctggcttcactttcctgctgtctgctggtctgttactacttccagccatcagtctatgtgttgtcaagtgtaccagctggaatgagggaagctatgaacttcttatacaagaagaatccagtgaagatgcttcagacaggtgactgtgatttaaacaaacaaaaaaaatctatgaatgcacatatcatataccatgacttctgaagactataaatgaattccacaatcagtgcttcactgagaaccaattttacctatcttttcttctaaactgaacagtcagagagacagctcctggctttagcttcttgtggtaccacgcactttgagcactttgtgcgtatcatgcaatatacttgcaatacacagaacaaatttcaaatacgcctcacttttagacttagaagagaaacattaaaacttaagggtgtaaggagggatcaagaaacttgataaggtcaaaagcaataatctctctgacatattccaggctcttacactgagaccaaagagaaatctttacctcagtttcttcatcagcagaatgggtttctggcctctctcagggataattttgaaggcataatgaaaattatgatgaatcactcattggtaggaaaataatgatataagtttcaaatatgtatgattttacctatacttggtaatgctttgttttatagagcctgttaagctgctattgatagtcggagcttatatactgtgacttctgaagactatacatgaattccacaatcagtgctttgttgatacaaaatccttaaaagggaggcactttaaagaatatgtatttttcacttttcttaatatgtttcatcggtgacaggcatgataatatttctatatgtaatgggtaattgggaaaaaatagatgataaataaaattgctctaaagaagttaaaaaactgaatgaacagctaatactggtataaagtaactaatgtttggagccaacatttgttccttgtgtcagcaaaaggatattcacattccatgatccctggctgagaattctgcctctagtctttcttacccagctgttgtctatccttgttcaattataaatactgctaagggcatttttaaaatacgatcttgtagtccttaaatttgaatccgtcagcacggtcactcataggaaaatgatcaaacaagcaagccagtcatgatttgactccttcccatctcatttcttactgccttacgctcatcctgaggtccaccttggtctctaaaaacaccatgtgttctcatgcctccatgtcttttcacacactgttccatttgctcttcctcccacattacattgaaactttcaagcctcagtcgaaacattgcttcttctggatagcagccttcttgacatccctcctcactccccagtccctacagggcttccatagctctttgtgtgcacttcgatcccagcattttccatcgacttgtaattgtttctgctacctgacaatcatcgccttgagtactgggacaacctttgattactcattatatcctcaataaatatttgttgaactaaa

SEQ ID NO: 416441 - DNA, 1995 bp, Homo sapiens
atttttttgtggtaattggcattgccccaatttttatcctttatgaattggattcaccactctgctggaatgaagtttttataggttatggatcagctttgggtagtgcctcttttttgactagtttcctaggaatatggcttttttcttattgtatggaagatattcatatggccttcattgggatttttaccacgatgacaggaatggctatgaccgcgtttgccagtacaacactgatgatgtttttagccagggtgccgttccttttcactattgtgccattctctgttctacggtccatgttgtcaaaagtggttcgttcgactgaacaaggtaccctgtttgcttgtattgctttcttagaaacacttggaggagtcactgcagtttctacttttaatggaatttactcagccactgttgcttggtaccctggcttcactttcctgctgtctgctggtctgttactacttccagccatcagtctatgtgttgtcaagtgtaccagctggaatgagggaagctatgaacttcttatacaagaagaatccagtgaagatgcttcagacaggtgactgtgatttaaacaaacaaaaaaaatctatgaatgcacatatcatataccatgacttctgaagactataaatgaattccacaatcagtgcttcactgagaaccaattttacctatcttttcttctaaactgaacagtcagagagacagctcctggctttagcttcttgtggtaccacgcactttgagcactttgtgcgtatcatgcaatatacttgcaatacacagaacaaatttcaaatacgcctcacttttagacttagaagagaaacattaaaacttaagggtgtaaggagggatcaagaaacttgataaggtcaaaagcaataatctctctgacatattccaggctcttacactgagaccaaagagaaatctttacctcagtttcttcatcagcagaatgggtttctggcctctctcagggataattttgaaggcataatgaaaattatgatgaatcactcattggtaggaaaataatgatataagtttcaaatatgtatgattttacctatacttggtaatgctttgttttatagagcctgttaagctgctattgatagtcggagcttatatactgtgacttctgaagactatacatgaattccacaatcagtgctttgttgatacaaaatccttaaaagggaggcactttaaagaatatgtatttttcacttttcttaatatgtttcatcggtgacaggcatgataatatttctatatgtaatgggtaattgggaaaaaatagatgataaataaaattgctctaaagaagttaaaaaactgaatgaacagctaatactggtataaagtaactaatgtttggagccaacatttgttccttgtgtcagcaaaaggatattcacattccatgatccctggctgagaattctgcctctagtctttcttacccagctgttgtctatccttgttcaattataaatactgctaagggcatttttaaaatacgatcttgtagtccttaaatttgaatccgtcagcacggtcactcataggaaaatgatcaaacaagcaagccagtcatgatttgactccttcccatctcatttcttactgccttacgctcatcctgaggtccaccttggtctctaaaaacaccatgtgttctcatgcctccatgtcttttcacacactgttccatttgctcttcctcccacattacattgaaactttcaagcctcagtcgaaacattgcttcttctggatagcagccttcttgacatccctcctcactccccagtccctacagggcttccatagctctttgtgtgcacttcgatcccagcattttccatcgacttgtaattgtttctgctacctgacaatcatcgccttgagtactgggacaacctttgattactcattatatcctcaataaatatttgttgaactaaa

SEQ ID NO: 416442 - DNA, 1451 bp, Homo sapiens
atttttttgtggtaattggcattgccccaatttttatcctttatgaattggattcaccactctgctggaatgaagtttttataggttatggatcagctttgggtagtgcctcttttttgactagtttcctaggaatatggcttttttcttattgtatggaagatattcatatggccttcattgggatttttaccacgatgacaggaatggctatgaccgcgtttgccagtacaacactgatgatgtttttagccagggtgccgttccttttcactattgtgccattctctgttctacggtccatgttgtcaaaagtggttcgttcgactgaacaaggtaccctgtttgcttgtattgctttcttagaaacacttggaggagtcactgcagtttctacttttaatggaatttactcagccactgttgcttggtaccctggcttcactttcctgctgtctgctggtctgttactacttccagccatcagtctatgtgttgtcaagtgtaccagctggaatgagggaagctatgaacttcttatacaagaagaatccagtgaagatgcttcagacagagcctgttaagctgctattgatagtcggagcttatatactgtgacttctgaagactatacatgaattccacaatcagtgctttgttgatacaaaatccttaaaagggaggcactttaaagaatatgtatttttcacttttcttaatatgtttcatcggtgacaggcatgataatatttctatatgtaatgggtaattgggaaaaaatagatgataaataaaattgctctaaagaagttaaaaaactgaatgaacagctaatactggtataaagtaactaatgtttggagccaacatttgttccttgtgtcagcaaaaggatattcacattccatgatccctggctgagaattctgcctctagtctttcttacccagctgttgtctatccttgttcaattataaatactgctaagggcatttttaaaatacgatcttgtagtccttaaatttgaatccgtcagcacggtcactcataggaaaatgatcaaacaagcaagccagtcatgatttgactccttcccatctcatttcttactgccttacgctcatcctgaggtccaccttggtctctaaaaacaccatgtgttctcatgcctccatgtcttttcacacactgttccatttgctcttcctcccacattacattgaaactttcaagcctcagtcgaaacattgcttcttctggatagcagccttcttgacatccctcctcactccccagtccctacagggcttccatagctctttgtgtgcacttcgatcccagcattttccatcgacttgtaattgtttctgctacctgacaatcatcgccttgagtactgggacaacctttgattactcattatatcctcaataaatatttgttgaactaaa

SEQ ID NO: 416443 - DNA, 959 bp, Homo sapiens
  misc_feature (41)..(41): n is a, c, g, or t
aatactacctcacacgtcgtataagtatttactcgaactcnccatcgctgtcactatagtatttcaatcgtatagattttatagcgccaaccaaagtaatttttcaacaaatgtgagtttggaaagaaactggactggaaatgcaactctgattcctggttcaattttaagttttgagaccaccacactgtggcccatcaccaccatcaactatatcacagtagcattcatcttttctaagggaaagccatttcgaaaacccatctatacaaactatatattttcatttctgctgctagctgccttgggcctcacaattttcattctgttttctgactttcaagttatataccgtggaatggagttgatcccaaccataacatcgtggagggttttaattttggtggtagccctcacccaattctgtgtggctttctttgcagaggattccatccttcaaaatcatgaactctggctgttgatcaaaagagaatttggattctactctaaaagtcaatataggacttggcaaaagaagctagcagaagactcaacctggcctcccataaacaggacagattattcaggtgatggcaaaaatggattctacatcaacggaggctatgaaagccatgaacagattccaaaaagaaaactcaaattgggaggccaacccacagaacagcatttctgggccaggctgtaatcagaattgtcgtcgtacatgctcaacagcattgcttttttccccaaaattaacacattgtggagaagtgatgatactctccccttacctttcctctctccattcaagcattcaaagtatattttcaatgaattaaaccttgcagcaagggaccttagataggcttattctgactgtatgctttaccaatgagagaaaaaaatgcatttcctgtatcatccttttcaataaactgtattcattttgcatagca

SEQ ID NO: 416444 - DNA, 247 bp, Homo sapiens
agtttatgaatttgtgtcgggccacacattcaaagccatctttgggctgcatgcggcctgcgggtcgtgggttggacaagcttgaattatataaagaactcttatcattcaacaataacaatatcaataatgcaattgaaaaatgaacaaaggatccaaatagaactttctctagcaaagatatacagatggtcagtagacagatgagaaagcgctcaacatcattacccatgagggaaataaaaat

SEQ ID NO: 416445 - DNA, 5575 bp, Homo sapiens
aggcatgagcccttgggcccagccggctgtttaatgttcttaaatagcacaagggacttctatgaactttcctagatgaaatatttattaactactaggtaaaacacttgtttgatactgcaaagggttatttctgaaacttaaacctcatgattggccaaccaagaactttttctccacagcatgctttaataatgaaatgcggattaagagtccaatattataaaacatttccacaaaagaaagaatccatctgattctcaactctgaatgcacatttgaattccctcggggagcttttaaaagtctaatgccccagtgtaccccccccagttaattaattaaataattctctggggatgagaactgactgacagcaacacttaagcttcgagactgcagtgtgcagccgaggcccactcctccagcgtcaccacctcgtctttatctgccactgtgtctcctcattgcccacagctttagcaacagcaaaagtagaattcaaaccttggtaaacaaggcttaaattattactgttcatgaccttaattaattgaaaatgattactggtgaccacagcactccatgctcttccttatggaaaaagggttgcctagaagatttaggcaatactgggagttcttatttgaagtcacagaaaggagaaacttttctcaagccgtttttattacacttagtgtattaagacaagtacaaaataaccttgtaattaagatactgtatcagtcaaaaaagaagtcactattgtatgaagagatttacaaatgactaaaatatacaggctgtgacagaattaacagtttgaaagagggttgcttttttcttttagaaatgctaaattttcttaacaagacaaaaatacagtgctctaaatatgcattaccatgaaaacgttaaagaaaagcagtcttaacacttaactactattaacagcctttgccaacacatgcctgcctactccctttcctaactttaaagaactgtttcctctaaggaatactagtgcagcataacccttaaataatttcatttatttttaaagttacaacctacagagaaattaacatcttgtcaatctaataacagtggcaaccattcttcacatgcacttctcttagaataaatccccttggctggcaggataaggcttatgctgtagaaccttctcccccacagccacaaatccccttctataagtccctcctaccctcatccccccgcatccccactggcattcacctttcccaccccaaaaagtgcagctcatggtagccttctagaaaatggttttaatgggtatcccagcatacacgcttttttaaaagccccctctgaacaccagaggtggtgaaaatgaattgtgttcttggatttttttttttttaagcctccactgggtcaaaaatatgtgctcttaatacttgagtttttgctttgtgtgtgggttttctttctttttcatttagatatcgtgggataaagtggagaggacatctccattttcccatacaaactgagggtgagaagagaaagagaagcaagctgttgcccccactttggcctggcttcccagccatcttcccagctctggttctttcataggaactagttattgcttccacaatgccgttatacggaatgttccacaaaggctgtgaacctagtcacagtctacccacaacaagaactctgctctgaaaaaccagcccaagagctcttacccagaagaacaatctttagccctcaaggtcactgaaacttcattagagcagtttagagtagacgtgtaagatttggcatatattaaatgattattggcacaatgttctccagttccatgtataaatgttgatatgcacatcggccagggcccaggatgaatcagccaatctgcaccatttttatgtcagcaataattccatctcttccctttgagcactgtagggagagctgcttcatccggttctccaaggcctggccctcaggggaggtgctgctttggctcttactgctgccaccactgccactgctactgctgaggccccggttgttgttggctttgtcacttgttttattctctgccccttctgccctgtctcctatagaaatacaaggattatcaaaagtgagtattgacaattctgccctgtctcctatagaaatacaaagattatcaaaagtgagtattgacaattctaagtcacttgagctcaaaccagtcagctaactcagccctgtagaagtcccactgttacctaccgtgcctatcagagaggttctcagtacataatcatttactgcttttattccttgtgatgttttatatattccttagctatagagatgaaatttgccatattcactttattgctgagaaacaaacctctctactatgtgcttgccaaggagactgttctgatgtgagacataggacctaagctctactttatagaagctgagtggagccaggagcccccccagaacagcacttggaaacaacctcagtgatcaatactgacagcacaaccacagagacctggtaatgcagcatgggggccctgagacctggcagaggtatggaatggcacaacagtcaggctacagaggcagtgtggcatctgggacggggtgagaaggctgctactcacctcgttctacttcacattcaggggaggaggccccgctgcattcacttcgagggcccaacactgggaacatcatcccaaactctgacagggacacagggctgggcagatccaggctgccaggcctcacaaccgcagggaactggtcaggcatctcagacgggcttgttggtcctgaactaaagctggacacggactgggtttccgagtcatcttcagacacaaagttgctacagctgtcatcttcaaaggcctccgaggccactaagttgagagagaacaccagtcacatgggttctgtcacctcctcaaacaccacaagtgcttgctgctggcaggcagctagacacagcatgggggactaaagagtctctacctctgtgagtgcctaatgaaggaatgtgacttcccaagcctgaatgaccagcctctaaagcagctggaagggaagcagctggcagcaggatcccatggatattaagcgcccttccaataaccttataaccctgccaagaaatcagtgtcaccagacaccacctaaaaatggaagattaattcagccacaaattaggacctttactccacctcagtcccccaaatacatcctcatgtgcacaggaagaggttctagtcctctgtaacatatcccaaacaaagccagctggactcaggcttctttcttagggcaatagaagcaagagctgctagaagaaacaggccagcatggaacatctgttgggacctttgttatctccagaatcctgactttgaggaacacttagtaccttcttaatgaacacagtgttccataaaacatgggaacccaccagaaatagccctcaggcctgcccaactctgagacctttcactgatggccagagaaagtgaggaccttgggaaacaaatcacacagtctgatatctccccacatacccagtggagcccctgacttaccagaaatggcatcaggctcaggtttgctccctggcagatcctccacagatgtgctgctgccctcagcaccaacaccgcatccccgaggccccatggcactggagcgccgccgctcgtggatctcatctgagatcatctccaggttcttcagggccatcttgtactcgccttttgccagggtcagtttggcctgcaggtcatccacagtctttttcagttgctgatcaagagaacaggagactaagtgaagactaccctgctagccttaagatgctttctgaatgacaggttcaagtacattttctgcccatcattctacttcaaggaattttccaagacatgactgaagacctaattaccattgtaactgctattcattcaccagacaaaatcagccaccaccatccccagatcccatccaggtgacaacctctaatatccaaaaactctcactggtggaacaaaccccatcagggaagcaaaaatgggcatcagacacaccaaagtcccacagtctagacatctggttcccagtacagtggttctcaaagttgagcttgcatcaaaatccccttgggtgttaagactcagctcactagactccaacctcagagtttctaattcagtcggtctagagtgggacctggtctatcaggtctccaggtgatgctgatgctgctggtcctaagagcatgctgtgagaaccactggcctagtacaacagagaaggtgactgaatggcagttacagaggttcagagaccactgaagacccaaccgagacaattttgaggtctgaaaactcagtaaagcctgtctctccactttccccttatagcaagtggcccatgtgatactctgctaccccagaaaagtgaagctttgagtgcagaaaaatctcatcagtgacgaagcccaaagctacacatacctcgagctgcacatagtactttgccttgagttcaaaataaggcctgcagaagacaggaaggaaagccatcagagtaatataatacagtgaccacaatcaactccacaagatgaacaagaggcatcagctaccactggccaggtcgtccttccaatatttagtaaactcttaacaaggccgtgacatgtcagtgatgctcctagctctggagactgacagacaccagatggaacgactgggctcacccagggctatattaacaggaggcccatctcaagacacggggaacccacacacacatatcttggggactctgcaacttagctcatgttcctcctctgtgggaaggctgttcagagcctcacaggttatacccagcagtaagggtggcctggatctgctctcctaatgaagttggctccccagggatgaagagcagctgaggctggagaaggggctgcttaaacctcctcctctactgaagtcaactggggaagagagagaagcaccactcctccctcacagcacagcaaggccaccactaggagggggtctcaggttggtcctcccaaaccttgtccaaagactggagttattagttggctgactcagccacataatgggcccaagaaatgccagcgtcctagcagttcccttggttctgggtcagctgaaagagcttggctcttttttaggaactttggtgcctgaacattaagagtagatcactgctttattcttgagctgttcaccctccatgaagctctcaagtcctgcatcctgaggatccagatggatgacaaggacacaggactgccattgagaaatgaagatgaactgtgtcacagatgcagtggattactgactgcccttgtaatagtccattttgcatctgttggtaattcattgaggcactcttggttttctatgagtttgtattttttgaattcaagaattgtaacatcactgttagatccctccttatttaatgagagaaataaaatatttgacacgagaaaatttta

SEQ ID NO: 416446 - DNA, 3738 bp, Homo sapiens
aggcatgagcccttgggcccagccggctgtttaatgttcttaaatagcacaagggacttctatgaactttcctagatgaaatatttattaactactaggtaaaacacttgtttgatactgcaaagggttatttctgaaacttaaacctcatgattggccaaccaagaactttttctccacagcatgctttaataatgaaatgcggattaagagtccaatattataaaacatttccacaaaagaaagaatccatctgattctcaactctgaatgcacatttgaattccctcggggagcttttaaaagtctaatgccccagtgtaccccccccagttaattaattaaataattctctggggatgagaactgactgacagcaacacttaagcttcgagactgcagtgtgcagccgaggcccactcctccagcgtcaccacctcgtctttatctgccactgtgtctcctcattgcccacagctttagcaacagcaaaagtagaattcaaaccttggtaaacaaggcttaaattattactgttcatgaccttaattaattgaaaatgattactggtgaccacagcactccatgctcttccttatggaaaaagggttgcctagaagatttaggcaatactgggagttcttatttgaagtcacagaaaggagaaacttttctcaagccgtttttattacacttagtgtattaagacaagtacaaaataaccttgtaattaagatactgtatcagtcaaaaaagaagtcactattgtatgaagagatttacaaatgactaaaatatacaggctgtgacagaattaacagtttgaaagagggttgcttttttcttttagaaatgctaaattttcttaacaagacaaaaatacagtgctctaaatatgcattaccatgaaaacgttaaagaaaagcagtcttaacacttaactactattaacagcctttgccaacacatgcctgcctactccctttcctaactttaaagaactgtttcctctaaggaatactagtgcagcataacccttaaataatttcatttatttttaaagttacaacctacagagaaattaacatcttgtcaatctaataacagtggcaaccattcttcacatgcacttctcttagaataaatccccttggctggcaggataaggcttatgctgtagaaccttctcccccacagccacaaatccccttctataagtccctcctaccctcatccccccgcatccccactggcattcacctttcccaccccaaaaagtgcagctcatggtagccttctagaaaatggttttaatgggtatcccagcatacacgcttttttaaaagccccctctgaacaccagaggtggtgaaaatgaattgtgttcttggatttttttttttttaagcctccactgggtcaaaaatatgtgctcttaatacttgagtttttgctttgtgtgtgggttttctttctttttcatttagatatcgtgggataaagtggagaggacatctccattttcccatacaaactgagggtgagaagagaaagagaagcaagctgttgcccccactttggcctggcttcccagccatcttcccagctctggttctttcataggaactagttattgcttccacaatgccgttatacggaatgttccacaaaggctgtgaacctagtcacagtctacccacaacaagaactctgctctgaaaaaccagcccaagagctcttacccagaagaacaatctttagccctcaaggtcactgaaacttcattagagcagtttagagtagacgtgtaagatttggcatatattaaatgattattggcacaatgttctccagttccatgtataaatgttgatatgcacatcggccagggcccaggatgaatcagccaatctgcaccatttttatgtcagcaataattccatctcttccctttgagcactgtagggagagctgcttcatccggttctccaaggcctggccctcaggggaggtgctgctttggctcttactgctgccaccactgccactgctactgctgaggccccggttgttgttggctttgtcacttgttttattctctgccccttctgccctgtctcctatagaaatacaaggattatcaaaagtgagtattgacaattctgccctgtctcctatagaaatacaaagattatcaaaagtgagtattgacaattctaagtcacttgagctcaaaccagtcagctaactcagccctgtagaagtcccactgttacctaccgtgcctatcagagaggttctcagtacataatcatttactgcttttattccttgtgatgttttatatattccttagctatagagatgaaatttgccatattcactttattgctgagaaacaaacctctctactatgtgcttgccaaggagactgttctgatgtgagacataggacctaagctctactttatagaagctgagtggagccaggagcccccccagaacagcacttggaaacaacctcagtgatcaatactgacagcacaaccacagagacctggtaatgcagcatgggggccctgagacctggcagaggtatggaatggcacaacagtcaggctacagaggcagtgtggcatctgggacggggtgagaaggctgctactcacctcgttctacttcacattcaggggaggaggccccgctgcattcacttcgagggcccaacactgggaacatcatcccaaactctgacagggacacagggctgggcagatccaggctgccaggcctcacaaccgcagggaactggtcaggcatctcagacgggcttgttggtcctgaactaaagctggacacggactgggtttccgagtcatcttcagacacaaagttgctacagctgtcatcttcaaaggcctccgaggccactaagttgagagagaacaccagtcacatgggttctgtcacctcctcaaacaccacaagtgcttgctgctggcaggcagctagacacagcatgggggactaaagagtctctacctctgtgagtgcctaatgaaggaatgtgacttcccaagcctgaatgaccagcctctaaagcagctggaagggaagcagctggcagcaggatcccatggatattaagcgcccttccaataaccttataaccctgccaagaaatcagtgtcaccagacaccacctaaaaatggaagattaattcagccacaaattaggacctttactccacctcagtcccccaaatacatcctcatgtgcacaggaagaggttctagtcctctgtaacatatcccaaacaaagccagctggactcaggcttctttcttagggcaatagaagcaagagctgctagaagaaacaggccagcatggaacatctgttgggacctttgttatctccaggtaacttctgatctcataaagaacacactcaaaggctacccacatcaccatttgctgcaaaagaacagaaatcctttacaatgctctgtagccacattatttggtagaccaaagtaacaaggcccagacacatgttattcccatggtttcaaagcctctttggcctttagcggttttccctcagcctgcccacaatcccactccttattagaactttcctactccatttttccccccctttctctttaaaaacagccttgtagcattccataaaggtttcttataaatgataaatactgtaatgttggggacaga

SEQ ID NO: 416447 - DNA, 1279 bp, Homo sapiens
gccacaatcagccctaggatagtttacttattacttacgataaggatttttaaaggtaccatgaaaaattatgaaagacttttatatgggcattaaaaattacagggtgtcctgtctagggcacccttccaggctatctctgactttgtcttgaagctgttttacaaccctgtaagttgtagaaaactgacagtaatacaaatggtttttttttttttccagagaaatgaagatgaactgtgtcacagatgcagtggattactgactgcccttgtaatagtccattttgcatctgttggtaattcattgaggcactcttggttttctatgagtttgtattttttgaattcaagaattgtaacatcactgttagatccctccttatttaatgagagaaataaaatatttgacacgagaaaattttaaattgtatcccaattatgcttttaccttcttaaaaatatcttttaacaaaggcttcagtgcttcagataatttttaaaaacagaaaaacaacaaaatcagagaagaaaaataggagagaactgagctaagcttggcacgaggagacatgcttgctcacatgacttctcaaccaagaccaaagggctaagagaatcctttccctttgcttccaaaaccagatatttcacaaggaaacaaaatgcactaaaaatatctcatgcttgatacttggggaaacagcagtaaatcttaagctttaaggatttactggtataacctttatgaaaactcaaaccttcaggttcatcaaagacaacatgttgggggtgattgttttattacaaaaagatccaattaaaggtttacctttaaggagctgtcagaatgcattttcaacagacttgtagaacctgtaatttgagggtcctgtacagaaagagtcccctgtaagaagcaggattctcaccatctgcacacaggccctcattctatcttggcctctaggctgcaagcagaagcacaggctttctacaataaaacacttggaaagctccgagcccatggcaatactggcagtgaaaactgaagaagtggccagcacatcactgtcccctgcttcgccccaccaggccacgtctaccacatcctgtccctatctccccacttctcatatatatacaaaacctccagggcagccaggtgcgatggggctcatgcctgtaatcccagcactttgggaggccaaggcgggcagatcacttgaggtcaggagttcaagaccaacctggccaacatggtgaaaccacgtctctac

SEQ ID NO: 416448 - DNA, 585 bp, Homo sapiens
accaaaaggagcacaaggtgaagagtatgtgtgtgaatgggcatcggagggcacagggaagatgtcccagcaaaaggaacatgagcatccatgcaagggagtgtggctggagaggcagggtgggcatggaggtggcctggaagccactctgtggaatgcacagatgtacattttaacctttgggcagacaggagccacccaagactacgatctatccctgtactcttctcggagtctgaaaaggttggcaaagtacaatcacaagatttattttcttaaacaggttaatggatgagtatgtgatgtgtgtgcagtgtgaattcggggtcttttgagaaaagacccaccatattcacaccaaaggaagcagcatcaaaggctgctcctcggcctccttgggtgttggcatgtggatgatgcctgggcttgcccagagcaggcacaggtcctacaacaaccctcgccacctcctgcctcccctgcagaaaaatgccatatacacgtctactacttagctctcaggagatcagcccctgacacaccaaaaaccaaaccaaaacaaaaatacactagtcaattaagtgc

SEQ ID NO: 416449 - DNA, 446 bp, Homo sapiens
accaaaaggagcacaaggtgaagagtatgtgtgtgaatgggcatcggagggcacagggaagatgtcccagcaaaaggaacatgagcatccatgcaagggagtgtggctggagaggcagggtgggcatggaggtggcctggaagccactctgtggaatgcacagatgtacattttaacctttgggcagacaggagccacccaagactacgatctatccctgtactcttctcggagtctgaaaagagaaatgaagatgaactgtgtcacagatgcagtggattactgactgcccttgtaatagtccattttgcatctgttggtaattcattgaggcactcttggttttctatgagtttgtattttttgaattcaagaattgtaacatcactgttagatccctccttatttaatgagagaaataaaatatttgacacgagaaaatttta

SEQ ID NO: 416450 - DNA, 425 bp, Homo sapiens
gccacaatcagccctaggatagtttacttattacttacgataaggatttttaaaggtaccatgaaaaattatgaaagacttttatatgggcattaaaaattacagggtgtcctgtctagggcacccttccaggctatctctgactttgtcttgaagctgttttacaaccctgtaagttgtagaaaactgacagtaatacaaatggtttttttttttttccagagaaatgaagatgaactgtgtcacagatgcagtggattactgactgcccttgtaatagtccattttgcatctgttggtaattcattgaggcactcttggttttctatgagtttgtattttttgaattcaagaattgtaacatcactgttagatccctccttatttaatgagagaaataaaatatttgacacgagaaaatttta

SEQ ID NO: 416451 - DNA, 5521 bp, Homo sapiens
aggcatgagcccttgggcccagccggctgtttaatgttcttaaatagcacaagggacttctatgaactttcctagatgaaatatttattaactactaggtaaaacacttgtttgatactgcaaagggttatttctgaaacttaaacctcatgattggccaaccaagaactttttctccacagcatgctttaataatgaaatgcggattaagagtccaatattataaaacatttccacaaaagaaagaatccatctgattctcaactctgaatgcacatttgaattccctcggggagcttttaaaagtctaatgccccagtgtaccccccccagttaattaattaaataattctctggggatgagaactgactgacagcaacacttaagcttcgagactgcagtgtgcagccgaggcccactcctccagcgtcaccacctcgtctttatctgccactgtgtctcctcattgcccacagctttagcaacagcaaaagtagaattcaaaccttggtaaacaaggcttaaattattactgttcatgaccttaattaattgaaaatgattactggtgaccacagcactccatgctcttccttatggaaaaagggttgcctagaagatttaggcaatactgggagttcttatttgaagtcacagaaaggagaaacttttctcaagccgtttttattacacttagtgtattaagacaagtacaaaataaccttgtaattaagatactgtatcagtcaaaaaagaagtcactattgtatgaagagatttacaaatgactaaaatatacaggctgtgacagaattaacagtttgaaagagggttgcttttttcttttagaaatgctaaattttcttaacaagacaaaaatacagtgctctaaatatgcattaccatgaaaacgttaaagaaaagcagtcttaacacttaactactattaacagcctttgccaacacatgcctgcctactccctttcctaactttaaagaactgtttcctctaaggaatactagtgcagcataacccttaaataatttcatttatttttaaagttacaacctacagagaaattaacatcttgtcaatctaataacagtggcaaccattcttcacatgcacttctcttagaataaatccccttggctggcaggataaggcttatgctgtagaaccttctcccccacagccacaaatccccttctataagtccctcctaccctcatccccccgcatccccactggcattcacctttcccaccccaaaaagtgcagctcatggtagccttctagaaaatggttttaatgggtatcccagcatacacgcttttttaaaagccccctctgaacaccagaggtggtgaaaatgaattgtgttcttggatttttttttttttaagcctccactgggtcaaaaatatgtgctcttaatacttgagtttttgctttgtgtgtgggttttctttctttttcatttagatatcgtgggataaagtggagaggacatctccattttcccatacaaactgagggtgagaagagaaagagaagcaagctgttgcccccactttggcctggcttcccagccatcttcccagctctggttctttcataggaactagttattgcttccacaatgccgttatacggaatgttccacaaaggctgtgaacctagtcacagtctacccacaacaagaactctgctctgaaaaaccagcccaagagctcttacccagaagaacaatctttagccctcaaggtcactgaaacttcattagagcagtttagagtagacgtgtaagatttggcatatattaaatgattattggcacaatgttctccagttccatgtataaatgttgatatgcacatcggccagggcccaggatgaatcagccaatctgcaccatttttatgtcagcaataattccatctcttccctttgagcactgtagggagagctgcttcatccggttctccaaggcctggccctcaggggaggtgctgctttggctcttactgctgccaccactgccactgctactgctgaggccccggttgttgttggctttgtcacttgttttattctctgccccttctgccctgtctcctatagaaatacaaggattatcaaaagtgagtattgacaattctgccctgtctcctatagaaatacaaagattatcaaaagtgagtattgacaattctaagtcacttgagctcaaaccagtcagctaactcagccctgtagaagtcccactgttacctaccgtgcctatcagagaggttctcagtacataatcatttactgcttttattccttgtgatgttttatatattccttagctatagagatgaaatttgccatattcactttattgctgagaaacaaacctctctactatgtgcttgccaaggagactgttctgatgtgagacataggacctaagctctactttatagaagctgagtggagccaggagcccccccagaacagcacttggaaacaacctcagtgatcaatactgacagcacaaccacagagacctggtaatgcagcatgggggccctgagacctggcagaggtatggaatggcacaacagtcaggctacagaggcagtgtggcatctgggacggggtgagaaggctgctactcacctcgttctacttcacattcaggggaggaggccccgctgcattcacttcgagggcccaacactgggaacatcatcccaaactctgacagggacacagggctgggcagatccaggctgccaggcctcacaaccgcagggaactggtcaggcatctcagacgggcttgttggtcctgaactaaagctggacacggactgggtttccgagtcatcttcagacacaaagttgctacagctgtcatcttcaaaggcctccgaggccactaagttgagagagaacaccagtcacatgggttctgtcacctcctcaaacaccacaagtgcttgctgctggcaggcagctagacacagcatgggggactaaagagtctctacctctgtgagtgcctaatgaaggaatgtgacttcccaagcctgaatgaccagcctctaaagcagctggaagggaagcagctggcagcaggatcccatggatattaagcgcccttccaataaccttataaccctgccaagaaatcagtgtcaccagacaccacctaaaaatggaagattaattcagccacaaattaggacctttactccacctcagtcccccaaatacatcctcatgtgcacaggaagaggttctagtcctctgtaacatatcccaaacaaagccagctggactcaggcttctttcttagggcaatagaagcaagagctgctagaagaaacaggccagcatggaacatctgttgggacctttgttatctccagaatcctgactttgaggaacacttagtaccttcttaatgaacacagtgttccataaaacatgggaacccaccagaaatagccctcaggcctgcccaactctgagacctttcactgatggccagagaaagtgaggaccttgggaaacaaatcacacagtctgatatctccccacatacccagtggagcccctgacttaccagaaatggcatcaggctcaggtttgctccctggcagatcctccacagatgtgctgctgccctcagcaccaacaccgcatccccgaggccccatggcactggagcgccgccgctcgtggatctcatctgagatcatctccaggttcttcagggccatcttgtactcgccttttgccagggtcagtttggcctgcaggtcatccacagtctttttcagttgctgatcaagagaacaggagactaagtgaagactaccctgctagccttaagatgctttctgaatgacaggttcaagtacattttctgcccatcattctacttcaaggaattttccaagacatgactgaagacctaattaccattgtaactgctattcattcaccagacaaaatcagccaccaccatccccagatcccatccaggtgacaacctctaatatccaaaaactctcactggtggaacaaaccccatcagggaagcaaaaatgggcatcagacacaccaaagtcccacagtctagacatctggttcccagtacagtggttctcaaagttgagcttgcatcaaaatccccttgggtgttaagactcagctcactagactccaacctcagagtttctaattcagtcggtctagagtgggacctggtctatcaggtctccaggtgatgctgatgctgctggtcctaagagcatgctgtgagaaccactggcctagtacaacagagaaggtgactgaatggcagttacagaggttcagagaccactgaagacccaaccgagacaattttgaggtctgaaaactcagtaaagcctgtctctccactttccccttatagcaagtggcccatgtgatactctgctaccccagaaaagtgaagctttgagtgcagaaaaatctcatcagtgacgaagcccaaagctacacatacctcgagctgcacatagtactttgccttgagttctgaccacaatcaactccacaagatgaacaagaggcatcagctaccactggccaggtcgtccttccaatatttagtaaactcttaacaaggccgtgacatgtcagtgatgctcctagctctggagactgacagacaccagatggaacgactgggctcacccagggctatattaacaggaggcccatctcaagacacggggaacccacacacacatatcttggggactctgcaacttagctcatgttcctcctctgtgggaaggctgttcagagcctcacaggttatacccagcagtaagggtggcctggatctgctctcctaatgaagttggctccccagggatgaagagcagctgaggctggagaaggggctgcttaaacctcctcctctactgaagtcaactggggaagagagagaagcaccactcctccctcacagcacagcaaggccaccactaggagggggtctcaggttggtcctcccaaaccttgtccaaagactggagttattagttggctgactcagccacataatgggcccaagaaatgccagcgtcctagcagttcccttggttctgggtcagctgaaagagcttggctcttttttaggaactttggtgcctgaacattaagagtagatcactgctttattcttgagctgttcaccctccatgaagctctcaagtcctgcatcctgaggatccagatggatgacaaggacacaggactgccattgagaaatgaagatgaactgtgtcacagatgcagtggattactgactgcccttgtaatagtccattttgcatctgttggtaattcattgaggcactcttggttttctatgagtttgtattttttgaattcaagaattgtaacatcactgttagatccctccttatttaatgagagaaataaaatatttgacacgagaaaatttta

SEQ ID NO: 416452 - DNA, 6429 bp, Homo sapiens
aggcatgagcccttgggcccagccggctgtttaatgttcttaaatagcacaagggacttctatgaactttcctagatgaaatatttattaactactaggtaaaacacttgtttgatactgcaaagggttatttctgaaacttaaacctcatgattggccaaccaagaactttttctccacagcatgctttaataatgaaatgcggattaagagtccaatattataaaacatttccacaaaagaaagaatccatctgattctcaactctgaatgcacatttgaattccctcggggagcttttaaaagtctaatgccccagtgtaccccccccagttaattaattaaataattctctggggatgagaactgactgacagcaacacttaagcttcgagactgcagtgtgcagccgaggcccactcctccagcgtcaccacctcgtctttatctgccactgtgtctcctcattgcccacagctttagcaacagcaaaagtagaattcaaaccttggtaaacaaggcttaaattattactgttcatgaccttaattaattgaaaatgattactggtgaccacagcactccatgctcttccttatggaaaaagggttgcctagaagatttaggcaatactgggagttcttatttgaagtcacagaaaggagaaacttttctcaagccgtttttattacacttagtgtattaagacaagtacaaaataaccttgtaattaagatactgtatcagtcaaaaaagaagtcactattgtatgaagagatttacaaatgactaaaatatacaggctgtgacagaattaacagtttgaaagagggttgcttttttcttttagaaatgctaaattttcttaacaagacaaaaatacagtgctctaaatatgcattaccatgaaaacgttaaagaaaagcagtcttaacacttaactactattaacagcctttgccaacacatgcctgcctactccctttcctaactttaaagaactgtttcctctaaggaatactagtgcagcataacccttaaataatttcatttatttttaaagttacaacctacagagaaattaacatcttgtcaatctaataacagtggcaaccattcttcacatgcacttctcttagaataaatccccttggctggcaggataaggcttatgctgtagaaccttctcccccacagccacaaatccccttctataagtccctcctaccctcatccccccgcatccccactggcattcacctttcccaccccaaaaagtgcagctcatggtagccttctagaaaatggttttaatgggtatcccagcatacacgcttttttaaaagccccctctgaacaccagaggtggtgaaaatgaattgtgttcttggatttttttttttttaagcctccactgggtcaaaaatatgtgctcttaatacttgagtttttgctttgtgtgtgggttttctttctttttcatttagatatcgtgggataaagtggagaggacatctccattttcccatacaaactgagggtgagaagagaaagagaagcaagctgttgcccccactttggcctggcttcccagccatcttcccagctctggttctttcataggaactagttattgcttccacaatgccgttatacggaatgttccacaaaggctgtgaacctagtcacagtctacccacaacaagaactctgctctgaaaaaccagcccaagagctcttacccagaagaacaatctttagccctcaaggtcactgaaacttcattagagcagtttagagtagacgtgtaagatttggcatatattaaatgattattggcacaatgttctccagttccatgtataaatgttgatatgcacatcggccagggcccaggatgaatcagccaatctgcaccatttttatgtcagcaataattccatctcttccctttgagcactgtagggagagctgcttcatccggttctccaaggcctggccctcaggggaggtgctgctttggctcttactgctgccaccactgccactgctactgctgaggccccggttgttgttggctttgtcacttgttttattctctgccccttctgccctgtctcctatagaaatacaaggattatcaaaagtgagtattgacaattctgccctgtctcctatagaaatacaaagattatcaaaagtgagtattgacaattctaagtcacttgagctcaaaccagtcagctaactcagccctgtagaagtcccactgttacctaccgtgcctatcagagaggttctcagtacataatcatttactgcttttattccttgtgatgttttatatattccttagctatagagatgaaatttgccatattcactttattgctgagaaacaaacctctctactatgtgcttgccaaggagactgttctgatgtgagacataggacctaagctctactttatagaagctgagtggagccaggagcccccccagaacagcacttggaaacaacctcagtgatcaatactgacagcacaaccacagagacctggtaatgcagcatgggggccctgagacctggcagaggtatggaatggcacaacagtcaggctacagaggcagtgtggcatctgggacggggtgagaaggctgctactcacctcgttctacttcacattcaggggaggaggccccgctgcattcacttcgagggcccaacactgggaacatcatcccaaactctgacagggacacagggctgggcagatccaggctgccaggcctcacaaccgcagggaactggtcaggcatctcagacgggcttgttggtcctgaactaaagctggacacggactgggtttccgagtcatcttcagacacaaagttgctacagctgtcatcttcaaaggcctccgaggccactaagttgagagagaacaccagtcacatgggttctgtcacctcctcaaacaccacaagtgcttgctgctggcaggcagctagacacagcatgggggactaaagagtctctacctctgtgagtgcctaatgaaggaatgtgacttcccaagcctgaatgaccagcctctaaagcagctggaagggaagcagctggcagcaggatcccatggatattaagcgcccttccaataaccttataaccctgccaagaaatcagtgtcaccagacaccacctaaaaatggaagattaattcagccacaaattaggacctttactccacctcagtcccccaaatacatcctcatgtgcacaggaagaggttctagtcctctgtaacatatcccaaacaaagccagctggactcaggcttctttcttagggcaatagaagcaagagctgctagaagaaacaggccagcatggaacatctgttgggacctttgttatctccagaatcctgactttgaggaacacttagtaccttcttaatgaacacagtgttccataaaacatgggaacccaccagaaatagccctcaggcctgcccaactctgagacctttcactgatggccagagaaagtgaggaccttgggaaacaaatcacacagtctgatatctccccacatacccagtggagcccctgacttaccagaaatggcatcaggctcaggtttgctccctggcagatcctccacagatgtgctgctgccctcagcaccaacaccgcatccccgaggccccatggcactggagcgccgccgctcgtggatctcatctgagatcatctccaggttcttcagggccatcttgtactcgccttttgccagggtcagtttggcctgcaggtcatccacagtctttttcagttgctgatcaagagaacaggagactaagtgaagactaccctgctagccttaagatgctttctgaatgacaggttcaagtacattttctgcccatcattctacttcaaggaattttccaagacatgactgaagacctaattaccattgtaactgctattcattcaccagacaaaatcagccaccaccatccccagatcccatccaggtgacaacctctaatatccaaaaactctcactggtggaacaaaccccatcagggaagcaaaaatgggcatcagacacaccaaagtcccacagtctagacatctggttcccagtacagtggttctcaaagttgagcttgcatcaaaatccccttgggtgttaagactcagctcactagactccaacctcagagtttctaattcagtcggtctagagtgggacctggtctatcaggtctccaggtgatgctgatgctgctggtcctaagagcatgctgtgagaaccactggcctagtacaacagagaaggtgactgaatggcagttacagaggttcagagaccactgaagacccaaccgagacaattttgaggtctgaaaactcagtaaagcctgtctctccactttccccttatagcaagtggcccatgtgatactctgctaccccagaaaagtgaagctttgagtgcagaaaaatctcatcagtgacgaagcccaaagctacacatacctcgagctgcacatagtactttgccttgagttcaaaataaggcctgcagaagacaggaaggaaagccatcagagtaatataatacagtgaccacaatcaactccacaagatgaacaagaggcatcagctaccactggccaggtcgtccttccaatatttagtaaactcttaacaaggccgtgacatgtcagtgatgctcctagctctggagactgacagacaccagatggaacgactgggctcacccagggctatattaacaggaggcccatctcaagacacggggaacccacacacacatatcttggggactctgcaacttagctcatgttcctcctctgtgggaaggctgttcagagcctcacaggttatacccagcagtaagggtggcctggatctgctctcctaatgaagttggctccccagggatgaagagcagctgaggctggagaaggggctgcttaaacctcctcctctactgaagtcaactggggaagagagagaagcaccactcctccctcacagcacagcaaggccaccactaggagggggtctcaggttggtcctcccaaaccttgtccaaagactggagttattagttggctgactcagccacataatgggcccaagaaatgccagcgtcctagcagttcccttggttctgggtcagctgaaagagcttggctcttttttaggaactttggtgcctgaacattaagagtagatcactgctttattcttgagctgttcaccctccatgaagctctcaagtcctgcatcctgaggatccagatggatgacaaggacacaggactgccattgagaaatgaagatgaactgtgtcacagatgcagtggattactgactgcccttgtaatagtccattttgcatctgttggtaattcattgaggcactcttggttttctatgagtttgtattttttgaattcaagaattgtaacatcactgttagatccctccttatttaatgagagaaataaaatatttgacacgagaaaattttaaattgtatcccaattatgcttttaccttcttaaaaatatcttttaacaaaggcttcagtgcttcagataatttttaaaaacagaaaaacaacaaaatcagagaagaaaaataggagagaactgagctaagcttggcacgaggagacatgcttgctcacatgacttctcaaccaagaccaaagggctaagagaatcctttccctttgcttccaaaaccagatatttcacaaggaaacaaaatgcactaaaaatatctcatgcttgatacttggggaaacagcagtaaatcttaagctttaaggatttactggtataacctttatgaaaactcaaaccttcaggttcatcaaagacaacatgttgggggtgattgttttattacaaaaagatccaattaaaggtttacctttaaggagctgtcagaatgcattttcaacagacttgtagaacctgtaatttgagggtcctgtacagaaagagtcccctgtaagaagcaggattctcaccatctgcacacaggccctcattctatcttggcctctaggctgcaagcagaagcacaggctttctacaataaaacacttggaaagctccgagcccatggcaatactggcagtgaaaactgaagaagtggccagcacatcactgtcccctgcttcgccccaccaggccacgtctaccacatcctgtccctatctccccacttctcatatatatacaaaacctccagggcagccaggtgcgatggggctcatgcctgtaatcccagcactttgggaggccaaggcgggcagatcacttgaggtcaggagttcaagaccaacctggccaacatggtgaaaccacgtctctac

SEQ ID NO: 416453 - DNA, 5088 bp, Homo sapiens
  misc_feature (5045)..(5045): n is a, c, g, or t
  misc_feature (5054)..(5054): n is a, c, g, or t
aggcatgagcccttgggcccagccggctgtttaatgttcttaaatagcacaagggacttctatgaactttcctagatgaaatatttattaactactaggtaaaacacttgtttgatactgcaaagggttatttctgaaacttaaacctcatgattggccaaccaagaactttttctccacagcatgctttaataatgaaatgcggattaagagtccaatattataaaacatttccacaaaagaaagaatccatctgattctcaactctgaatgcacatttgaattccctcggggagcttttaaaagtctaatgccccagtgtaccccccccagttaattaattaaataattctctggggatgagaactgactgacagcaacacttaagcttcgagactgcagtgtgcagccgaggcccactcctccagcgtcaccacctcgtctttatctgccactgtgtctcctcattgcccacagctttagcaacagcaaaagtagaattcaaaccttggtaaacaaggcttaaattattactgttcatgaccttaattaattgaaaatgattactggtgaccacagcactccatgctcttccttatggaaaaagggttgcctagaagatttaggcaatactgggagttcttatttgaagtcacagaaaggagaaacttttctcaagccgtttttattacacttagtgtattaagacaagtacaaaataaccttgtaattaagatactgtatcagtcaaaaaagaagtcactattgtatgaagagatttacaaatgactaaaatatacaggctgtgacagaattaacagtttgaaagagggttgcttttttcttttagaaatgctaaattttcttaacaagacaaaaatacagtgctctaaatatgcattaccatgaaaacgttaaagaaaagcagtcttaacacttaactactattaacagcctttgccaacacatgcctgcctactccctttcctaactttaaagaactgtttcctctaaggaatactagtgcagcataacccttaaataatttcatttatttttaaagttacaacctacagagaaattaacatcttgtcaatctaataacagtggcaaccattcttcacatgcacttctcttagaataaatccccttggctggcaggataaggcttatgctgtagaaccttctcccccacagccacaaatccccttctataagtccctcctaccctcatccccccgcatccccactggcattcacctttcccaccccaaaaagtgcagctcatggtagccttctagaaaatggttttaatgggtatcccagcatacacgcttttttaaaagccccctctgaacaccagaggtggtgaaaatgaattgtgttcttggatttttttttttttaagcctccactgggtcaaaaatatgtgctcttaatacttgagtttttgctttgtgtgtgggttttctttctttttcatttagatatcgtgggataaagtggagaggacatctccattttcccatacaaactgagggtgagaagagaaagagaagcaagctgttgcccccactttggcctggcttcccagccatcttcccagctctggttctttcataggaactagttattgcttccacaatgccgttatacggaatgttccacaaaggctgtgaacctagtcacagtctacccacaacaagaactctgctctgaaaaaccagcccaagagctcttacccagaagaacaatctttagccctcaaggtcactgaaacttcattagagcagtttagagtagacgtgtaagatttggcatatattaaatgattattggcacaatgttctccagttccatgtataaatgttgatatgcacatcggccagggcccaggatgaatcagccaatctgcaccatttttatgtcagcaataattccatctcttccctttgagcactgtagggagagctgcttcatccggttctccaaggcctggccctcaggggaggtgctgctttggctcttactgctgccaccactgccactgctactgctgaggccccggttgttgttggctttgtcacttgttttattctctgccccttctgccctgtctcctatagaaatacaaggattatcaaaagtgagtattgacaattctgccctgtctcctatagaaatacaaagattatcaaaagtgagtattgacaattctaagtcacttgagctcaaaccagtcagctaactcagccctgtagaagtcccactgttacctaccgtgcctatcagagaggttctcagtacataatcatttactgcttttattccttgtgatgttttatatattccttagctatagagatgaaatttgccatattcactttattgctgagaaacaaacctctctactatgtgcttgccaaggagactgttctgatgtgagacataggacctaagctctactttatagaagctgagtggagccaggagcccccccagaacagcacttggaaacaacctcagtgatcaatactgacagcacaaccacagagacctggtaatgcagcatgggggccctgagacctggcagaggtatggaatggcacaacagtcaggctacagaggcagtgtggcatctgggacggggtgagaaggctgctactcacctcgttctacttcacattcaggggaggaggccccgctgcattcacttcgagggcccaacactgggaacatcatcccaaactctgacagggacacagggctgggcagatccaggctgccaggcctcacaaccgcagggaactggtcaggcatctcagacgggcttgttggtcctgaactaaagctggacacggactgggtttccgagtcatcttcagacacaaagttgctacagctgtcatcttcaaaggcctccgaggccactaagttgagagagaacaccagtcacatgggttctgtcacctcctcaaacaccacaagtgcttgctgctggcaggcagctagacacagcatgggggactaaagagtctctacctctgtgagtgcctaatgaaggaatgtgacttcccaagcctgaatgaccagcctctaaagcagctggaagggaagcagctggcagcaggatcccatggatattaagcgcccttccaataaccttataaccctgccaagaaatcagtgtcaccagacaccacctaaaaatggaagattaattcagccacaaattaggacctttactccacctcagtcccccaaatacatcctcatgtgcacaggaagaggttctagtcctctgtaacatatcccaaacaaagccagctggactcaggcttctttcttagggcaatagaagcaagagctgctagaagaaacaggccagcatggaacatctgttgggacctttgttatctccagaatcctgactttgaggaacacttagtaccttcttaatgaacacagtgttccataaaacatgggaacccaccagaaatagccctcaggcctgcccaactctgagacctttcactgatggccagagaaagtgaggaccttgggaaacaaatcacacagtctgatatctccccacatacccagtggagcccctgacttaccagaaatggcatcaggctcaggtttgctccctggcagatcctccacagatgtgctgctgccctcagcaccaacaccgcatccccgaggccccatggcactggagcgccgccgctcgtggatctcatctgagatcatctccaggttcttcagggccatcttgtactcgccttttgccagggtcagtttggcctgcaggtcatccacagtctttttcagttgctgatcaagagaacaggagactaagtgaagactaccctgctagccttaagatgctttctgaatgacaggttcaagtacattttctgcccatcattctacttcaaggaattttccaagacatgactgaagacctaattaccattgtaactgctattcattcaccagacaaaatcagccaccaccatccccagatcccatccaggtgacaacctctaatatccaaaaactctcactggtggaacaaaccccatcagggaagcaaaaatgggcatcagacacaccaaagtcccacagtctagacatctggttcccagtacagtggttctcaaagttgagcttgcatcaaaatccccttgggtgttaagactcagctcactagactccaacctcagagtttctaattcagtcggtctagagtgggacctggtctatcaggtctccaggtgatgctgatgctgctggtcctaagagcatgctgtgagaaccactggcctagtacaacagagaaggtgactgaatggcagttacagaggttcagagaccactgaagacccaaccgagacaattttgaggtctgaaaactcagtaaagcctgtctctccactttccccttatagcaagtggcccatgtgatactctgctaccccagaaaagtgaagctttgagtgcagaaaaatctcatcagtgacgaagcccaaagctacacatacctcgagctgcacatagtactttgccttgagttcaaaataaggcctgcagaagacaggaaggaaagccatcagagtaatataatacagtgaccacaatcaactccacaagatgaacaagaggcatcagctaccactggccaggtcgtccttccaatatttagtaaactcttaacaaggccgtgacatgtcagtgatgctcctagctctggagactgacagacaccagatggaacgactgggctcacccagggctatattaacaggaggcccatctcaagacacggggaacccacacacacatatcttggggactctgcaacttagctcatgttcctcctctgtgggaaggctgttcagagcctcacaggttatacccagcagtaagggtggcctggatctgctctcctaatgaagttggctccccagggatgaagagcagctgaggctggagaaggggctgcttaaacctcctcctctacctaatcgagggagagnacactgganaatggctttgagatcctctagaacactacacaaa

SEQ ID NO: 416454 - DNA, 732 bp, Homo sapiens
gaaatcagtgtcaccagacaccacctaaaaatggaagattaattcagccacaaattaggacctttactccacctcagtcccccaaatacatcctcatgtgcacaggaagaggttctagtcctctgtaacatatcccaaacaaagccagctggactcaggcttctttcttagggcaatagaagcaagagctgctagaagaaacaggccagcatggaacatctgttgggacctttgttatctccaggtaacttctgatctcataaagaacacactcaaaggctacccacatcaccatttgctgcaaaagaacagaaatcctttacaatgctctgtagccacattatttggtagaccaaagtaacaaggcccagacacatgttattcccatggtttcaaagcctctttggcctttagcggttttccctcagcctgcccacaatcccactccttattagaactttcctactccatttttccccccctttctctttaaaaacagccttgtagcattccataaaggtttcttataaatgataaatactgtaatgttggggacagaaaatgggctcagacctgaattgaatccctaactccactacttgctgtgtgaccttggtcaagttactttacctctgtaagcttcatgatcctctccatgcagggtttgagatgatgtatatattaaagtacctcatacatagtagttgttcaaatgatagtttccttttcctt

SEQ ID NO: 416455 - DNA, 546 bp, Homo sapiens
ggaaatttgagcctgggtttatctgtctccagatcagtggggtgaggggagtttctcccaggcccaggcaggaagggggtgcattgtctgtagaaaatgttttaggaaactaatctttggccaggtgggtttgttttttctaatcacttgcactggcaatcctaaacaatgccagggataaattactcttccctgcagggacctgcagggacggacactctcgctgcctgcgccctggtaaaccactgcaccatcttaaccactgtgttggttttggagcagatggaaagtggctccataatctaaatgaagcaagacagccttgaactttgatttcctacatatttccttaaatggccttttttgagagatttgggtttttctcaggccttctcttcctctttccttaattcctgcttgcttttctcacctctctgcataggtcagatttgttgtttttttcactaataaattgtattttcaattaattcaattagttgaatattcatgcttattataaaaaacaaaattcaggaaagtaataaa

SEQ ID NO: 416456 - DNA, 1316 bp, Homo sapiens
aataggggaaaataagccagatggataaaggaagtgctggtcaccctggaggtgcactggtttggggaaggctcctggcccccacagccctcttcggagcctgagcccggctctcctcactcacctcaacccccaggcggcccctccacagggcccctctcctgcctggacggctctgctggtctccccgtcccctggagaagaacaaggccatgggtcggcccctgctgctgcccctactgcccctgctgctgccgccagcatttctgcagcctagtggctccacaggatctggtccaagctacctttatggggtcactcaaccaaaacacctctcagcctccatgggtggctctgtggaaatccccttctccttctattacccctgggagttagccacagctcccgacgtgagaatatcctggagacggggccacttccacgggcagtccttctacagcacaaggccgccttccattcacaaggattatgtgaaccggctctttctgaactggacagagggtcagaagagcggcttcctcaggatctccaacctgcagaagcaggaccagtctgtgtatttctgccgagttgagctggacacacggagctcagggaggcagcagtggcagtccatcgaggggaccaaactctccatcacccaggctgtcacgaccaccacccagaggcccagcagcatgactaccacctggaggctcagtagcacaaccaccacaaccggcctcagggtcacacagggcaaacgacgctcagactcttggcacataagtctggagactgctgtgggggtggcagtggctgtcactgtgctcggaatcatgattttgggactgatctgcctcctcaggtggaggagaaggaaaggtcagcagcggactaaagccacaaccccagccagggaacccttccaaaacacagaggagccatatgagaatatcaggaatgaaggacaaaatacagatcccaagctaaatcccaaggatgacggcatcgtctatgcttcccttgccctctccagctccacctcacccagagcacctcccagccaccgtcccctcaagagcccccagaacgagaccctgtactctgtcttaaaggcctaaccaatggacagccctctcaagactgaatggtgaggccaggtacagtggcgcacacctgtaatcccagctactctgaagcctgaggcagaatcaagtgagcccaggagttcagggccagctttgataatggagcgagatgccatctctagttaaaaatatatattaacaataaagtaacaaatttaaaaagat

SEQ ID NO: 416457 - DNA, 291 bp, Homo sapiens
gtccctgcctgcttctgtctcaagaaggctgatgtcacttcctctgatgaaatcctgtcttcccccacggcccctcaactgatgccacctcaccctggagagggtgggcagagcctcctacggagggagccctgtgcaccaccaaagctccctgctccagtgaccacccccgggcaaaggccggcagatccccgttagagatgggcccaggactgtgtgtggggtgggtgttgctctgagccttcactttcttctgtgtccaaggaagcttctggatcagccaagggctca

SEQ ID NO: 416458 - DNA, 1097 bp, Homo sapiens
aataggggaaaataagccagatggataaaggaagtgctggtcaccctggaggtgcactggtttggggaaggctcctggcccccacagccctcttcggagcctgagcccggctctcctcactcacctcaacccccaggcggcccctccacagggcccctctcctgcctggacggctctgctggtctccccgtcccctggagaagaacaaggccatgggtcggcccctgctgctgcccctactgcccctgctgctgccgccagcatttctgcagcctagtggctccacaggatctggtccaagctacctttatggggtcactcaaccaaaacacctctcagcctccatgggtggctctgtggaaatccccttctccttctattacccctgggagttagccacagctcccgacgtgagaatatcctggagacggggccacttccacgggcagtccttctacagcacaaggccgccttccattcacaaggattatgtgaaccggctctttctgaactggacagagggtcagaagagcggcttcctcaggatctccaacctgcagaagcaggaccagtctgtgtatttctgccgagttgagctggacacacggagctcagggaggcagcagtggcagtccatcgaggggaccaaactctccatcacccagggtcagcagcggactaaagccacaaccccagccagggaacccttccaaaacacagaggagccatatgagaatatcaggaatgaaggacaaaatacagatcccaagctaaatcccaaggatgacggcatcgtctatgcttcccttgccctctccagctccacctcacccagagcacctcccagccaccgtcccctcaagagcccccagaacgagaccctgtactctgtcttaaaggcctaaccaatggacagccctctcaagactgaatggtgaggccaggtacagtggcgcacacctgtaatcccagctactctgaagcctgaggcagaatcaagtgagcccaggagttcagggccagctttgataatggagcgagatgccatctctagttaaaaatatatattaacaataaagtaacaaatttaaaaagat

SEQ ID NO: 416459 - DNA, 1403 bp, Homo sapiens
gtccctgcctgcttctgtctcaagaaggctgatgtcacttcctctgatgaaatcctgtcttcccccacggcccctcaactgatgccacctcaccctggagagggtgggcagagcctcctacggagggagccctgtgcaccaccaaagctccctgctccagtgaccacccccgggcaaaggccggcagatccccgttagagatgggcccaggactgtgtgtggggcggcccctccacagggcccctctcctgcctggacggctctgctggtctccccgtcccctggagaagaacaaggccatgggtcggcccctgctgctgcccctactgcccctgctgctgccgccagcatttctgcagcctagtggctccacaggatctggtccaagctacctttatggggtcactcaaccaaaacacctctcagcctccatgggtggctctgtggaaatccccttctccttctattacccctgggagttagccacagctcccgacgtgagaatatcctggagacggggccacttccacgggcagtccttctacagcacaaggccgccttccattcacaaggattatgtgaaccggctctttctgaactggacagagggtcagaagagcggcttcctcaggatctccaacctgcagaagcaggaccagtctgtgtatttctgccgagttgagctggacacacggagctcagggaggcagcagtggcagtccatcgaggggaccaaactctccatcacccaggctgtcacgaccaccacccagaggcccagcagcatgactaccacctggaggctcagtagcacaaccaccacaaccggcctcagggtcacacagggcaaacgacgctcagactcttggcacataagtctggagactgctgtgggggtggcagtggctgtcactgtgctcggaatcatgattttgggactgatctgcctcctcaggtggaggagaaggaaaggtcagcagcggactaaagccacaaccccagccagggaacccttccaaaacacagaggagccatatgagaatatcaggaatgaaggacaaaatacagatcccaagctaaatcccaaggatgacggcatcgtctatgcttcccttgccctctccagctccacctcacccagagcacctcccagccaccgtcccctcaagagcccccagaacgagaccctgtactctgtcttaaaggcctaaccaatggacagccctctcaagactgaatggtgaggccaggtacagtggcgcacacctgtaatcccagctactctgaagcctgaggcagaatcaagtgagcccaggagttcagggccagctttgataatggagcgagatgccatctctagttaaaaatatatattaacaataaagtaacaaatttaaaaagat

SEQ ID NO: 416460 - DNA, 1063 bp, Homo sapiens
aataggggaaaataagccagatggataaaggaagtgctggtcaccctggaggtgcactggtttggggaaggctcctggcccccacagccctcttcggagcctgagcccggctctcctcactcacctcaacccccaggcggcccctccacagggcccctctcctgcctggacggctctgctggtctccccgtcccctggagaagaacaaggccatgggtcggcccctgctgctgcccctactgcccctgctgctgccgccagcatttctgcagcctagtggctccacaggatctggtccaagctacctttatggggtcactcaaccaaaacacctctcagcctccatgggtggctctgtggaaatccccttctccttctattacccctgggagttagccacagctcccgacgtgagaatatcctggagacggggccacttccacgggcagtccttctacagcacaaggccgccttccattcacaaggattatgtgaaccggctctttctgaactggacagagggtcagaagagcggcttcctcaggatctccaacctgcagaagcaggaccagtctgtgtatttctgccgagttgagctggacacacggagctcagggaggcagcagtggcagtccatcgaggggaccaaactctccatcacccaggggaacccttccaaaacacagaggagccatatgagaatatcaggaatgaaggacaaaatacagatcccaagctaaatcccaaggatgacggcatcgtctatgcttcccttgccctctccagctccacctcacccagagcacctcccagccaccgtcccctcaagagcccccagaacgagaccctgtactctgtcttaaaggcctaaccaatggacagccctctcaagactgaatggtgaggccaggtacagtggcgcacacctgtaatcccagctactctgaagcctgaggcagaatcaagtgagcccaggagttcagggccagctttgataatggagcgagatgccatctctagttaaaaatatatattaacaataaagtaacaaatttaaaaagat

SEQ ID NO: 416461 - DNA, 2253 bp, Homo sapiens
aataggggaaaataagccagatggataaaggaagtgctggtcaccctggaggtgcactggtttggggaaggctcctggcccccacagccctcttcggagcctgagcccggctctcctcactcacctcaacccccaggcggcccctccacagggcccctctcctgcctggacggctctgctggtctccccgtcccctggagaagaacaaggccatgggtcggcccctgctgctgcccctactgcccctgctgctgccgccagcatttctgcagcctagtggctccacaggatctggtccaagctacctttatggggtcactcaaccaaaacacctctcagcctccatgggtggctctgtggaaatccccttctccttctattacccctgggagttagccacagctcccgacgtgagaatatcctggagacggggccacttccacgggcagtccttctacagcacaaggccgccttccattcacaaggattatgtgaaccggctctttctgaactggacagagggtcagaagagcggcttcctcaggatctccaacctgcagaagcaggaccagtctgtgtatttctgccgagttgagctggacacacggagctcagggaggcagcagtggcagtccatcgaggggaccaaactctccatcacccaggggacctgcagggacggacactctcgctgcctgcgccctggtaaaccactgcaccatcttaaccactgtgttggttttggagcagatggaaagtggctccataatctaaatgaagcaagacagccttgaactttgatttcctacatatttccttaaatggccttttttgagagatttgggtttttctcaggccttctcttcctctttccttaattcctgcttgcttttctcacctctctgcataggtcagatttgttgtttttttcactaataaattgtattttcaattaaaaaaaaaaaaaaaaaaaaaaaaaaaaaaaaaaaaaaaaaaaaaaaaaaaaaaaaaaaaaaaaaaaaaaaaaaaaaaaaagacagagaagagcaaaaaacaaatagagagagaggggggggcgcgcgcgcgcgccttgctctctctctccccgcggggggcgcagcccaggggggccccacaaattaagaaaaaaaaggagagggggcacaagagaggggggcttataaaaaaaagggggggggggggggagaaaaaacacagacgaggcgctatggggaggaacacgcagaggcctctggagctgccttatgtatgagcgactcgacaacttatctatctctctcgtgtcgtggcgacataagagtggggagtaccctatcaacgcaagtagcatacaatacacgccccggggggctgcacaacatacagattccacccatttcacacattataatagtttattataacaaacacacatatctctctacatattactatcatctagaaacaatgaaaataacactattcctcatataatgataataaaatatacactaatatacacacatacatcattaccaccacaggaatttttaatattactataactaaatcaataaacaccagaggaatacagcaaactgcacgagagagagtgagtctcggtggcagtaaaacggtagataagataagtatgagagagatagtcgcgagtcgcgatgagggacagcgacaggaagagagatcatgcagacgagaggtcaaggttgggcacctaggagatcggaagaggataagaaacgtcgatgaagaaaacaacagaacagcgacaacgacgcaacctcaagcacgaagcacatcacgtgaaagcaggaggggaacagaggagcgcgaattagccagcgacgatgcacggcacgacagcggcacggatgtgcgaggcgcagcagtaaggagctacactaagatagatacaacaacaatccgaaatgaggatacagactgctgaatgcgtcacaagccacgtaaatggtatacggaacacgagagtgagaagagaaggacggcggcgatgcgtacagagacattctcgtgctgcttcagggagcactacgagccacagagtgataagcagggtacctctagcgacgctgacgctgcggagcctaccacgttagcgatcacggtgcagcgctcgagaccacaggcgacgattacttctccagacctagacgctagcacgagcctctacgctgtggccagtacgcagctaaagacaagaggcgcgaagaaaag

SEQ ID NO: 416462 - DNA, 1785 bp, Homo sapiens
ggaaatttgagcctgggtttatctgtctccagatcagtggggtgaggggagtttctcccaggcccaggcaggaagggggtgcattgtctgtagaaaatgttttaggaaactaatctttggccaggtgggtttgttttttctaatcacttgcactggcaatcctaaacaatgccagggataaattactcttccctgcagggacctgcagggacggacactctcgctgcctgcgccctggtaaaccactgcaccatcttaaccactgtgttggttttggagcagatggaaagtggctccataatctaaatgaagcaagacagccttgaactttgatttcctacatatttccttaaatggccttttttgagagatttgggtttttctcaggccttctcttcctctttccttaattcctgcttgcttttctcacctctctgcataggtcagatttgttgtttttttcactaataaattgtattttcaattaaaaaaaaaaaaaaaaaaaaaaaaaaaaaaaaaaaaaaaaaaaaaaaaaaaaaaaaaaaaaaaaaaaaaaaaaaaaaaaaagacagagaagagcaaaaaacaaatagagagagaggggggggcgcgcgcgcgcgccttgctctctctctccccgcggggggcgcagcccaggggggccccacaaattaagaaaaaaaaggagagggggcacaagagaggggggcttataaaaaaaagggggggggggggggagaaaaaacacagacgaggcgctatggggaggaacacgcagaggcctctggagctgccttatgtatgagcgactcgacaacttatctatctctctcgtgtcgtggcgacataagagtggggagtaccctatcaacgcaagtagcatacaatacacgccccggggggctgcacaacatacagattccacccatttcacacattataatagtttattataacaaacacacatatctctctacatattactatcatctagaaacaatgaaaataacactattcctcatataatgataataaaatatacactaatatacacacatacatcattaccaccacaggaatttttaatattactataactaaatcaataaacaccagaggaatacagcaaactgcacgagagagagtgagtctcggtggcagtaaaacggtagataagataagtatgagagagatagtcgcgagtcgcgatgagggacagcgacaggaagagagatcatgcagacgagaggtcaaggttgggcacctaggagatcggaagaggataagaaacgtcgatgaagaaaacaacagaacagcgacaacgacgcaacctcaagcacgaagcacatcacgtgaaagcaggaggggaacagaggagcgcgaattagccagcgacgatgcacggcacgacagcggcacggatgtgcgaggcgcagcagtaaggagctacactaagatagatacaacaacaatccgaaatgaggatacagactgctgaatgcgtcacaagccacgtaaatggtatacggaacacgagagtgagaagagaaggacggcggcgatgcgtacagagacattctcgtgctgcttcagggagcactacgagccacagagtgataagcagggtacctctagcgacgctgacgctgcggagcctaccacgttagcgatcacggtgcagcgctcgagaccacaggcgacgattacttctccagacctagacgctagcacgagcctctacgctgtggccagtacgcagctaaagacaagaggcgcgaagaaaag

SEQ ID NO: 416463 - DNA, 1014 bp, Homo sapiens
aataggggaaaataagccagatggataaaggaagtgctggtcaccctggaggtgcactggtttggggaaggctcctggcccccacagccctcttcggagcctgagcccggctctcctcactcacctcaacccccaggcggcccctccacagggcccctctcctgcctggacggctctgctggtctccccgtcccctggagaagaacaaggccatgggtcggcccctgctgctgcccctactgcccctgctgctgccgccagcatttctgcagcctagtggctccacaggatctggtccaagctacctttatggggtcactcaaccaaaacacctctcagcctccatgggtggctctgtggaaatccccttctccttctattacccctgggagttagccacagctcccgacgtgagaatatcctggagacggggccacttccacgggcagtccttctacagcacaaggccgccttccattcacaaggattatgtgaaccggctctttctgaactggacagagggtcagaagagcggcttcctcaggatctccaacctgcagaagcaggaccagtctgtgtatttctgccgagttgagctggacacacggagctcagggaggcagcagtggcagtccatcgaggggaccaaactctccatcacccaggggacctgcagggacggacactctcgctgcctgcgccctggtaaaccactgcaccatcttaaccactgtgttggttttggagcagatggaaagtggctccataatctaaatgaagcaagacagccttgaactttgatttcctacatatttccttaaatggccttttttgagagatttgggtttttctcaggccttctcttcctctttccttaattcctgcttgcttttctcacctctctgcataggtcagatttgttgtttttttcactaataaattgtattttcaattaattcaattagttgaatattcatgcttattataaaaaacaaaattcaggaaagtaataaa

SEQ ID NO: 416464 - DNA, 834 bp, Homo sapiens
tgaggagtcctgcgatcatcggcacggaacccttccaaaacacagaggagccatatgagaatatcaggaatgaaggtgagtccttaccaccatccttccccagtttctacccctggcacttcctgtttccccaaataccccctacctgggtccgtgcccctgtcagtattttcttctttccattccttgccccttgccctcacgtgaccctggccctgacctagcagataacctcactcctagagccccctgcccatctctctcccctggctgtcacgccacctgaccttggcacaccttgctttttattcttaggacaaaatacagatcccaagctaaatcccaaggtaagcaatcagaccagggcctgaaggaattaaagagaagcctggagaaggtggggtggaagggagaaggggagtgtggtgtgggcaggagagtcaaactgtaggcttgccgctaagatgggaacagctccgtctccactgtctaaccctttctctctgggttctcgcccaggatgacggcatcgtctatgcttcccttgccctctccagctccacctcacccagagcacctcccagccaccgtcccctcaagagcccccagaacgagaccctgtactctgtcttaaaggcctaaccaatggacagccctctcaagactgaatggtgaggccaggtacagtggcgcacacctgtaatcccagctactctgaagcctgaggcagaatcaagtgagcccaggagttcagggccagctttgataatggagcgagatgccatctctagttaaaaatatatattaacaataaagtaacaaatttaaaaagat

SEQ ID NO: 416465 - DNA, 931 bp, Homo sapiens
aataggggaaaataagccagatggataaaggaagtgctggtcaccctggaggtgcactggtttggggaaggctcctggcccccacagccctcttcggagcctgagcccggctctcctcactcacctcaacccccaggcggcccctccacagggcccctctcctgcctggacggctctgctggtctccccgtcccctggagaagaacaaggccatgggtcggcccctgctgctgcccctactgcccctgctgctgccgccagcatttctgcagcctagtggctccacaggatctggtccaagctacctttatggggtcactcaaccaaaacacctctcagcctccatgggtggctctgtggaaatccccttctccttctattacccctgggagttagccacagctcccgacgtgagaatatcctggagacggggccacttccacgggcagtccttctacagcacaaggccgccttccattcacaaggattatgtgaaccggctctttctgaactggacagagggtcagaagagcggcttcctcaggatctccaacctgcagaagcaggaccagtctgtgtatttctgccgagttgagctggacacacggagctcagggaggcagcagtggcagtccatcgaggggaccaaactctccatcacccagggttgaaaatattggccagacacagtggctcatgcctgcagtcctggctactcaggaagctgagacagaattgcttgaacccgggagtcagaggaggtttcagtgagccaagatcgcatcactgcactccagcctgagtgacagagcaaggcttcttaatttaaaaaaaaatttgtatgtagtgataatttattttggtatatggcataaacaactaaattgatctttatatgaaataatataatcagttgtcccaaccccattta

SEQ ID NO: 416466 - DNA, 843 bp, Homo sapiens
aataggggaaaataagccagatggataaaggaagtgctggtcaccctggaggtgcactggtttggggaaggctcctggcccccacagccctcttcggagcctgagcccggctctcctcactcacctcaacccccaggcggcccctccacagggcccctctcctgcctggacggctctgctggtctccccgtcccctggagaagaacaaggccatgggtcggcccctgctgctgcccctactgcccctgctgctgccgccagcatttctgcagcctagtggctccacaggatctggtccaagctacctttatggggtcactcaaccaaaacacctctcagcctccatgggtggctctgtggaaatccccttctccttctattacccctgggagttagccacagctcccgacgtgagaatatcctggagacggggccacttccacgggcagtccttctacagcacaaggccgccttccattcacaaggattatgtgaaccggctctttctgaactggacagagggtcagaagagcggcttcctcaggatctccaacctgcagaagcaggaccagtctgtgtatttctgccgagttgagctggacacacggagctcagggaggcagcagtggcagtccatcgaggggaccaaactctccatcacccagggtgagtccagctgccctggcacccgctttgcccaccgcagtgaggcttttatgatcactggtgacatcgtccccagcacctcagaccccacttcttctgacgacccctaagttctctctttggcccctaacacttcctcaggcctttgccacctctccccttttctcttccccttgt

SEQ ID NO: 416467 - DNA, 1442 bp, Homo sapiens
tttttttttttgttgtgtgtgttgtaagatcagatttatttggagaaaacaaaaaacccacaacccaaaggatgggattttacatcaagacatctcccaggtaataagtctacagattacaaatcattttcatagaagatatttttgtacaaattttacatgtattcaggagcgggacattaatcaatccctgtttctattttaataggggggacaaggtaggggagagggaaaaacagttttggatataactatttggaaggagagtagacatgaagagggcaaaccctagcttttcattatctacaatcaatagtttgtttttcttttttaaaaaagaaagaaaaaccctttcaatcttcaatactctttaaaagcccacttcttagctactggccaatccacaccaattatttaaattcacttggtacacacctttgtccactgggtaaattatattcattatgcccactgctgcagcacgcataaaccaacacccctgcatggctgaacagggcctaatctaggactgatgggagaagggcttgcaaaccaagatcaaggtgtttctccgctaatactgtctaccaagctgatccctacaaaaatgcatataaaagcaggcaagtttagctactgtgttgcaagagaaaccaggaccttgttaaatagttctctccattaccatttattctctcaagggaagcttaaaaaaaaaacaacaacaaaacaacacattggtctggccacctcatgaatccaacaagcattagtgtggcatttcagtggagaaggaaacttggggggaaaaatcccatcaaggttgtaagaaaggctcccaatttaactgtccctgtccctatttatccatcatccaagaccatccattattctagagcactctgatcaataaaaggggtccaagcatcaggagcaggcaaggagaaccaaaagacatcaagaaaccgatttgcttgagaaaagcagcgattcttcctttcagagttctccatggctcagaaaatgcccaagacatcatgtatgtgacttagatactgctttttgggaggttaagagtagcatgaagaacttaagatgatgataagagtctaaatttttagtttcaaggtttcaatagaatgtggatatattcaaaactttcaaaaaggacagtgtttagaaagggtaaaactaggacacagaaaacactgggaattaccacgacccccaagtgcttccggctccaggaaataaccattcatgtgtttgctggaggtcacacaattttcccctattacctggtgcaaaatgactcatcacttcccaaaagcttcttttcaaaccacgattttcccatttattttggtccaatgcagtcccattctttatggcctatagtctcactcccaactacccccctggggggttaaaaaaaaaaaagg

SEQ ID NO: 416468 - DNA, 1189 bp, Homo sapiens
tttttttttttgttgtgtgtgttgtaagatcagatttatttggagaaaacaaaaaacccacaacccaaaggatgggattttacatcaagacatctcccaggtaataagtctacagattacaaatcattttcatagaagatatttttgtacaaattttacatgtattcaggagcgggacattaatcaatccctgtttctattttaataggggggacaaggtaggggagagggaaaaacagttttggatataactatttggaaggagagtagacatgaagagggcaaaccctagcttttcattatctacaatcaatagtttgtttttcttttttaaaaaagaaagaaaaaccctttcaatcttcaatactctttaaaagcccacttcttagctactggccaatccacaccaattatttaaattcacttggtacacacctttgtccactgggtaaattatattcattatgcccactgctgcagcacgcataaaccaacacccctgcatggctgaacagggcctaatctaggactgatgggagaagggcttgcaaaccaagatcaaggtgtttctccgctaatactgtctaccaagctgatccctacaaaaatgcatataaaagcaggcaagtttagctactgtgttgcaagagaaaccaggaccttgttaaatagttctctccattaccatttattctctcaagggaagcttaaaaaaaaaacaacaacaaaacaacacattggtctggccacctcatgaatccaacaagcattagtgtggcatttcagtggagaaggaaacttggggggaaaaatcccatcaaggttgtaagaaaggctcccaatttaactgtccctgtccctatttatccatcatccaagaccatccattattctagagcactctgatcaataaaaggggtccaagcatcaggagcaggcaaggagaaccaaaagacatcaagaaaccgatttgcttgagaaaagcagcgattcttcctttcagagttctccatggctcagaaaatgcccaagacatcatgtatgtgacttagatactgctttttgggaggttaagagtagcatgaagaacttaagatgatgataagagtctaaatttttagtttcaaggtttcaatagaatgtggatatattcaaaactttcaggctgactgtgctgtcctgattgttg

SEQ ID NO: 416469 - DNA, 1458 bp, Homo sapiens
  misc_feature (123)..(123): n is a, c, g, or t
  misc_feature (163)..(163): n is a, c, g, or t
  misc_feature (168)..(168): n is a, c, g, or t
  misc_feature (170)..(170): n is a, c, g, or t
acgtacctacaaaacacaaaacgtgccacaactcacctttcctgcccctttctcttagcttcaactcttcttcccggactcccccttttttgactacccatttttgaacccaccccccagggnttccaccaactttgcagtaatctccaacactattcataanaaatntntttacatgtattcaggagcgggacattaatcaatccctgtttctattttaataggggggacaaggtaggggagagggaaaaacagttttggatataactatttggaaggagagtagacatgaagagggcaaaccctagcttttcattatctacaatcaatagtttgtttttcttttttaaaaaagaaagaaaaaccctttcaatcttcaatactctttaaaagcccacttcttagctactggccaatccacaccaattatttaaattcacttggtacacacctttgtccactgggtaaattatattcattatgcccactgctgcagcacgcataaaccaacacccctgcatggctgaacagggcctaatctaggactgatgggagaagggcttgcaaaccaagatcaaggtgtttctccgctaatactgtctaccaagctgatccctacaaaaatgcatataaaagcaggcaagtttagctactgtgttgcaagagaaaccaggaccttgttaaatagttctctccattaccatttattctctcaagggaagcttaaaaaaaaaacaacaacaaaacaacacattggtctggccacctcatgaatccaacaagcattagtgtggcatttcagtggagaaggaaacttggggggaaaaatcccatcaaggttgtaagaaaggctcccaatttaactgtccctgtccctatttatccatcatccaagaccatccattattctagagcactctgatcaataaaaggggtccaagcatcaggagcaggcaaggagaaccaaaagacatcaagaaaccgatttgcttgagaaaagcagcgattcttcctttcagagttctccatggctcagaaaatgcccaagacatcatgtatgtgacttagatactgctttttgggaggttaagagtagcatgaagaacttaagatgatgataagagtctaaatttttagtttcaaggtttcaatagaatgtggatatattcaaaactttcaaaaaggacagtgtttagaaagggtaaaactaggacacagaaaacactgggaattaccacgacccccaagtgcttccggctccaggaaataaccattcatgtgtttgctggaggtcacacaattttcccctattacctggtgcaaaatgactcatcacttcccaaaagcttcttttcaaaccacgattttcccatttattttggtccaatgcagtcccattctttatggcctatagtctcactcccaactacccccctggggggttaaaaaaaaaaaagg

SEQ ID NO: 416470 - DNA, 1619 bp, Homo sapiens
cggggacccactctgcccagccggaggacgcggaggaggaagagggtagacaggggcgacctgtgattgttgttattgatgttgttgttgatggcaaaaaaaaaaaagcgacttcgagtttgctcccctttgcttgaagagaccccctcccccttccaacgagcttccggacttgtctgcacccccagcaagaaggcgagttagttttctagagacttgaaggagtctcccccttcctgcatcaccaccttggttttgttttattttgcttcttggtcaagaaaggaggggagaacccagcgcacccctccccccctattaaaatagaaactttacatgtattcaggagcgggacattaatcaatccctgtttctattttaataggggggacaaggtaggggagagggaaaaacagttttggatataactatttggaaggagagtagacatgaagagggcaaaccctagcttttcattatctacaatcaatagtttgtttttcttttttaaaaaagaaagaaaaaccctttcaatcttcaatactctttaaaagcccacttcttagctactggccaatccacaccaattatttaaattcacttggtacacacctttgtccactgggtaaattatattcattatgcccactgctgcagcacgcataaaccaacacccctgcatggctgaacagggcctaatctaggactgatgggagaagggcttgcaaaccaagatcaaggtgtttctccgctaatactgtctaccaagctgatccctacaaaaatgcatataaaagcaggcaagtttagctactgtgttgcaagagaaaccaggaccttgttaaatagttctctccattaccatttattctctcaagggaagcttaaaaaaaaaacaacaacaaaacaacacattggtctggccacctcatgaatccaacaagcattagtgtggcatttcagtggagaaggaaacttggggggaaaaatcccatcaaggttgtaagaaaggctcccaatttaactgtccctgtccctatttatccatcatccaagaccatccattattctagagcactctgatcaataaaaggggtccaagcatcaggagcaggcaaggagaaccaaaagacatcaagaaaccgatttgcttgagaaaagcagcgattcttcctttcagagttctccatggctcagaaaatgcccaagacatcatgtatgtgacttagatactgctttttgggaggttaagagtagcatgaagaacttaagatgatgataagagtctaaatttttagtttcaaggtttcaatagaatgtggatatattcaaaactttcaaaaaggacagtgtttagaaagggtaaaactaggacacagaaaacactgggaattaccacgacccccaagtgcttccggctccaggaaataaccattcatgtgtttgctggaggtcacacaattttcccctattacctggtgcaaaatgactcatcacttcccaaaagcttcttttcaaaccacgattttcccatttattttggtccaatgcagtcccattctttatggcctatagtctcactcccaactacccccctggggggttaaaaaaaaaaaagg

SEQ ID NO: 416471 - DNA, 630 bp, Homo sapiens
tttttttttttgttgtgtgtgttgtaagatcagatttatttggagaaaacaaaaaacccacaacccaaaggatgggattttacatcaagacatctcccaggtaataagtctacagattacaaatcattttcatagaagatatttttgtacaaattttacatgtattcaggagcgggacattaatcaatccctgtttctattttaataggggggacaaggtaggggagagggaaaaacagttttggatataactatttggaaggagagtagacatgaagagggcaaaccctagcttttcattatctacaatcaatagtttgtttttcttttttaaaaaagaaagaaaaaccctttcaatcttcaatactctttaaaagcccacttcttagctactggccaatccacaccaattatttaaattcacttggtacacacctttgtccactgggtaaattatattcattatgcccactgctgcagcacgcataaaccaacacccctgcatggctgaacagggcctaatctaggactgatgggagaagggcttgcaaaccaagatcaaggtgtttctccgctaatactgtctaccaagctgatgtcgacgcggccgcgaatttagtagtagtaggc

SEQ ID NO: 416472 - DNA, 3857 bp, Homo sapiens
atagaattacagaaccacaagggaccttagagaaataatgcacttattttgcaaatgagaaagctgaggcctagagagggaaatgagttacccaaaatcaaatagctagacctgggtctagactctttccataaattatatgtcaaatttctttggtataactttagttattaaaatctttttgaactcggaaggtgaaaaacttgcttcttcagtgaccaaatcatggaaaaatccctggaatcttcttgtttccagtttcaggcagtcctacattacagttcctttttgagtaaaaaatgcgtggccacagtccaaagttaatgtgtgtccaaaaggataagtggaccaaatagcaatttataattacatactaaactcagagccgcacagaggctgaaaacaaaaagcttgagtatatttggtttgatcatattaattgaaaaatttcagtctgcagcacacttgtcttcaaaaaatgttgatttgaaaagtactgtaaatctcagttttccacttcctttctagatttgtgacattatttccaaatgggaacaggcttccaaagaacagcagcctggaaaatgtgaaggtacaaggactgttcgtctgacatacaaaaacagactatatttctcagtgcaagctcgtggagagactgatagagaaaagttgctgttaatgtatcagacaaatgatcaaatcataaatggactttttcctctgaacaaagatctggcattagaaatggcagctcttttatctcaggtagagattggagattttgaaagacctttctcaactccagcagggcatgttaccaatcagtgcaaagtgaatcaaactctaaagcaagtcatagagaaattttatcctaaaaggtatagagatggctgttctgaagagcagttaaggcagctttgccagcgactttcaaccagatggatggccctccggggacacagtgctgctgactgtgtgcgcatttatttgacagtagccaggaagtggccattctttggtgccaagttgtttcttgcaaaacccataactccatcatcacttggaagtactttcttgtggctggctgtacatgaggatggtttaagcctcttagaatacaactccatgaggttaatagtcagctatgtgtacaagagtctaatgacctttggaggctatcaagatgattttatggtagtcattaacaatacacattcaaaggacaaaccaacagagaaattactttttgccatggcaaaacccaagattcttgaaatcactcttttgatcgccagttacataaacaacttccatcagcaaaaggcagcatttcaccacctctctgctccagcactgctctcagcccagacccggggaccccaagccagaatgatgggaagccagcctcttctgtcaagcagcagaccgaccaaaggccccaccttactctgaaagctggggagcctgaacattcactccttgtcctccatgctgtggctgtatcagctccctacaagttcgtttacacctggcagcacggcagccacacaccggtattccaaaccttaacaatgaagggggttagtctcttttatttgattcttaaatattcaaataaatattaacagtaaaacataaacacaaaatttgccaacacactaattttcttatagagtaaatgagtaagaattcatcattttttccatctcccttctcccttgtcatcagacacattgtgcaatgtggcttttcttttcttttctttttttcccctttttaatattctggcaatctttagaaagggagattccaaactcccatttggtaaaccagttgattatttggaaatgttcactgccaaaatagtaagtgctataactaaatgcgcttttaattaatgatatagtgtttggaaaggagtagaacatgcagcataagaaactgctgcagagtggtgcgaggagtacattttcagagcaggtgcagtacatcttccggctctatgaatcattatgtgagaaagcaggataacattaggtaacctgagcctcctgtgtggtattagaaagtataccgtcaccttttcacatcactggagtgtaaaatttaaaacaagatggtgattcctgacattccttggctgtcagtgctgcccagattcagaagaatattgcccacatttcactgtatttggtgctgggtcattttgaccttgctttgttaataatatctttaaaaacaaagacaatccttaaagctttgctcctcacacattaccttctaattatagtttgaaaatagattccctacacatacatacatatgtatgcacagatagggtcttgctatgttgcccaggctggtcttgaactcctggcctcaagcaatcctctctcctcagcctcccaaagtgctgggattacaagtgtgagccaccacacctggctccagaaattttattttatttttttgaggcagggtctcactctggttgcccaggctggagtgcagtggtgccatcatagctcactgtagcctcgaccttccgggatcaagcaatcccacttcagcctcttgaatagctgggactagaagcatgcaccaccatgcccatctaatatttgtatttttagtagagacaggatctccctatgttgtccagcctagtctcaaactcctgggttcaagcaatcctcccacctcggcctcccaaagtgctgggattgcaggcatgagccaccgtgcccagcctcaaaaatattttttaaaagaaaagagaaaataattcttctgtcaaaggaggttaaattttagttgatagagtacttaaatgcattactttattaggttatgtaagtggtcagtgcattccagtatgtgtcacaacagtgtagttcatattcatgataaaaatgaaactgtgataagacatgaaaattatattattaaaatgttcaattgtaatggtaatcatgagtatacttaattttatttatgtatagaatatttgtatttattttttggacatatatttatcactttgtcattttttttaaccaatttgagaaatgttagctgctgaattaatttgttgcccgagccttcatattttcttctttgctgccttctccctgtggcaatgtactgttctcacattaagccttttaaaaatgttccatactgtattagcatccttagaagggacagaactaagaaatacattgctcaaataatattttactttattgataatgacaaaaagaatattttttaaaccccatcaaaatagatttcaattgactgtttcccctacatcttttgagccacagtcgcccatcgaataagcaaatttgtttttgagaataaactggtaaccagtttgtgatgactctcagaagccttttggctgggttacagaagagtttctaagttcctagagagccatttaataattagttggtgagccagaggcttgacagagctgttacttatgtgtgagggctttattctcaggcagtagtttattcatcatttggtaagcccctccccacactcctctaatttaaacaagtagtgaaggcttatcttaaactgtgtagtaccttagacttggcatttatttttgatagagcagagataaaatattttgatggaaggaaatcaattttctgtaactgatgatgtgaaaattttattttctgggaaattatatagccattcaaaaattcaaagtatgttattatgattggttacaagagaataatgttacatgtttaattgtaatatttgtctcctatcattttcttccctttcagtcataataaatgatttacaaaacccaaaaaaaaaaatat

SEQ ID NO: 416473 - DNA, 3803 bp, Homo sapiens
atagaattacagaaccacaagggaccttagagaaataatgcacttattttgcaaatgagaaagctgaggcctagagagggaaatgagttacccaaaatcaaatagctagacctgggtctagactctttccataaattatatgtcaaatttctttggtataactttagttattaaaatctttttgaactcggaaggtgaaaaacttgcttcttcagtgaccaaatcatggaaaaatccctggaatcttcttgtttccagtttcaggcagtcctacattacagttcctttttgagtaaaaaatgcgtggccacagtccaaagttaatgtgtgtccaaaaggataagtggaccaaatagcaatttataattacatactaaactcagagccgcacagaggctgaaaacaaaaagcttgagtatatttggtttgatcatattaattgaaaaatttcagtctgcagcacacttgtcttcaaaaaatgttgatttgaaaagtactgtaaatctcagttttccacttcctttctagatttgtgacattatttccaaatgggaacaggcttccaaagaacagcagcctggaaaatgtgaaggtacaaggactgttcgtctgacatacaaaaacagactatatttctcagtgcaagctcgtggagagactgatagagaaaagttgctgttaatgtatcagacaaatgatcaaatcataaatggactttttcctctgaacaaagatctggcattagaaatggcagctcttttatctcaggtagagattggagattttgaaagacctttctcaactccagcagggcatgttaccaatcagtgcaaagtgaatcaaactctaaagcaagtcatagagaaattttatcctaaaaggtatagagatggctgttctgaagagcagttaaggcagctttgccagcgactttcaaccagatggatggccctccggggacacagtgctgctgactgtgtgcgcatttatttgacagtagccaggaagtggccattctttggtgccaagttgtttcttgcaaaacccataactccatcatcacttggaagtactttcttgtggctggctgtacatgaggatggtttaagcctcttagaatacaactccatgaggttaatagtcagctatgtgtacaagagtctaatgacctttggaggctatcaagatgattttatggtagtcattaacaatacacattcaaaggacaaaccaacagagaaattactttttgccatggcaaaacccaagattcttgaaatcactcttttgatcgccagttacataaacaacttccatcagcaaaaggcagcatttcaccacctctctgctccagcactgctctcagcccagacccggggaccccaagccagaatgatgggaagccagcctcttctgtcaagcagcagaccgaccaaaggccccaccttactctgaaagctggggagcctgaacattcactccttgtcctccatgctgtggctgtatcagctccctacaagttcgtttacacctggcagcacggcagccacacaccggtattccaaaccttaacaatgaagggggttagtctcttttatttgattcttaaatattcaaataaatattaacagtaaaacataaacacaaaatttgccaacacactaattttcttatagagtaaatgagtaagaattcatcattttttccatctcccttctcccttgtcatcagacacattgtgcaatgtggcttttcttttcttttctttttttcccctttttaatattctggcaatctttagaaagggagattccaaactcccatttggtaaaccagttgattatttggaaatgttcactgccaaaatagtaagtgctataactaaatgcgcttttaattaatgatatagtgtttggaaaggagtagaacatgcagcataagaaactgctgcagagtggtgcgaggagtacattttcagagcaggtgcagtacatcttccggctctatgaatcattatgtgagaaagcaggataacattaggtaacctgagcctcctgtgtggtattagaaagtataccgtcaccttttcacatcactggagtgtaaaatttaaaacaagatggtgattcctgacattccttggctgtcagtgctgcccagattcagaagaatattgcccacatttcactgtatttggtgctgggtcattttgaccttgctttgttaataatatctttaaaaacaaagacaatccttaaagctttgctcctcacacattaccttctaattatagtttgaaaatagattccctacacatacatacatatgtatgcacagatagggtcttgctatgttgcccaggctggtcttgaactcctggcctcaagcaatcctctctcctcagcctcccaaagtgctgggattacaagtgtgagccaccacacctggctccagaaattttattttatttttttgaggcagggtctcactctggttgcccaggctggagtgcagtggtgccatcatagctcactgtagcctcgaccttccgggatcaagcaatcccacttcagcctcttgaatagctgggactagaagcatgcaccaccatgcccatctaatatttgtatttttagtagagacaggatctccctatgttgtccagcctagtctcaaactcctgggttcaagcaatcctcccacctcggcctcccaaagtgctgggattgcaggcatgagccaccgtgcccagcctcaaaaatattttttaaaagaaaagagaaaataattcttctgtcaaaggaggttaaattttagttgatagagtacttaaatgcattactttattaggttatgtaagtggtcagtgcattccagtatgtgtcacaacagtgtagttcatattcatgataaaaatgaaactgtgataagacatgaaaattatattattaaaatgttcaattgtaatggtaatcatgagtatacttaattttatttatgtatagaatatttgtatttattttttggacatatatttatcactttgtcattttttttaaccaatttgagaaatgttagctgctgaattaatttgttgcccgagccttcatattttcttctttgctgccttctccctgtggcaatgtactgttctcacattaagccttttaaaaatgttccatactgtattagcatccttagaagggacagaactaagaaatacattgctcaaataatattttactttattgataatgacaaaaagaatattttttaaaccccatctcgaataagcaaatttgtttttgagaataaactggtaaccagtttgtgatgactctcagaagccttttggctgggttacagaagagtttctaagttcctagagagccatttaataattagttggtgagccagaggcttgacagagctgttacttatgtgtgagggctttattctcaggcagtagtttattcatcatttggtaagcccctccccacactcctctaatttaaacaagtagtgaaggcttatcttaaactgtgtagtaccttagacttggcatttatttttgatagagcagagataaaatattttgatggaaggaaatcaattttctgtaactgatgatgtgaaaattttattttctgggaaattatatagccattcaaaaattcaaagtatgttattatgattggttacaagagaataatgttacatgtttaattgtaatatttgtctcctatcattttcttccctttcagtcataataaatgatttacaaaacccaaaaaaaaaaatat

SEQ ID NO: 416474 - DNA, 3618 bp, Homo sapiens
atagaattacagaaccacaagggaccttagagaaataatgcacttattttgcaaatgagaaagctgaggcctagagagggaaatgagttacccaaaatcaaatagctagacctgggtctagactctttccataaattatatgtcaaatttctttggtataactttagttattaaaatctttttgaactcggaaggtgaaaaacttgcttcttcagtgaccaaatcatggaaaaatccctggaatcttcttgtttccagtttcaggcagtcctacattacagttcctttttgagtaaaaaatgcgtggccacagtccaaagttaatgtgtgtccaaaaggataagtggaccaaatagcaatttataattacatactaaactcagagccgcacagaggctgaaaacaaaaagcttgagtatatttggtttgatcatattaattgaaaaatttcagtctgcagcacacttgtcttcaaaaaatgttgatttgaaaagtactgtaaatctcagttttccacttcctttctagatttgtgacattatttccaaatgggaacaggcttccaaagaacagcagcctggaaaatgtgaaggtacaaggactgttcgtctgacatacaaaaacagactatatttctcagtgcaagctcgtggagagactgatagagaaaagttgctgttaatgtatcagacaaatgatcaaatcataaatggactttttcctctgaacaaagatctggcattagaaatggcagctcttttatctcaggtagagattggagattttgaaagacctttctcaactccagcagggcatgttaccaatcagtgcaaagtgaatcaaactctaaagcaagtcatagagaaattttatcctaaaaggtatagagatggctgttctgaagagcagttaaggcagctttgccagcgactttcaaccagatggatggccctccggggacacagtgctgctgactgtgtgcgcatttatttgacagtagccaggaagtggccattctttggtgccaagttgtttcttgcaaaacccataactccatcatcacttggaagtactttcttgtggctggctgtacatgaggatggtttaagcctcttagaatacaactccatgaggttaatagtcagctatgtgtacaagagtctaatgacctttggaggctatcaagatgattttatggtagtcattaacaatacacattcaaaggacaaaccaacagagaaattactttttgccatggcaaaacccaagattcttgaaatcactcttttgatcgccagttacataaacaacttccatcagcaaaaggcagcatttcaccacctctctgctccagcactgctctcagcccagacccggggaccccaagccagaatgatgggaagccagcctcttctgtcaagcagcagaccgaccaaaggccccaccttactctgaaagctggggagcctgaacattcactccttgtcctccatgctgtggctgtatcagctccctacaagttcgtttacacctggcagcacggcagccacacaccggtattccaaaccttaacaatgaagggggttagtctcttttatttgattcttaaatattcaaataaatattaacagtaaaacataaacacaaaatttgccaacacactaattttcttatagagtaaatgagtaagaattcatcattttttccatctcccttctcccttgtcatcagacacattgtgcaatgtggcttttcttttcttttctttttttcccctttttaatattctggcaatctttagaaagggagattccaaactcccatttggtaaaccagttgattatttggaaatgttcactgccaaaatagtaagtgctataactaaatgcgcttttaattaatgatatagtgtttggaaaggagtagaacatgcagcataagaaactgctgcagagtggtgcgaggagtacattttcagagcaggtgcagtacatcttccggctctatgaatcattatgtgagaaagcaggataacattaggtaacctgagcctcctgtgtggtattagaaagtataccgtcaccttttcacatcactggagtgtaaaatttaaaacaagatggtgattcctgacattccttggctgtcagtgctgcccagattcagaagaatattgcccacatttcactgtatttggtgctgggtcattttgaccttgctttgttaataatatctttaaaaacaaagacaatccttaaagctttgctcctcacacattaccttctaattatagtttgaaaatagattccctacacatacatacatatgtatgcacagatagggtcttgctatgttgcccaggctggtcttgaactcctggcctcaagcaatcctctctcctcagcctcccaaagtgctgggattacaagtgtgagccaccacacctggctccagaaattttattttatttttttgaggcagggtctcactctggttgcccaggctggagtgcagtggtgccatcatagctcactgtagcctcgaccttccgggatcaagcaatcccacttcagcctcttgaatagctgggactagaagcatgcaccaccatgcccatctaatatttgtatttttagtagagacaggatctccctatgttgtccagcctagtctcaaactcctgggttcaagcaatcctcccacctcggcctcccaaagtgctgggattgcaggcatgagccaccgtgcccagcctcaaaaatattttttaaaagaaaagagaaaataattcttctgtcaaaggaggttaaattttagttgatagagtacttaaatgcattactttattaggttatgtaagtggtcagtgcattccagtatgtgtcacaacagtgtagttcatattcatgataaaaatgaaactgtgataagacatgaaaattatattattaaaatgttcaattgtaatggtaatcatgagtatacttaattttatttatgtatagaatatttgtatttattttttggacatatatttatcactttgtcattttttttaaccaatttgagaaatgttagctgctgaattaatttgttgcccgagccttcatattttcttctttgctgccttctccctgtggcaatgtactgttctcacattaagccttttaaaaatgttccatactgtattagcatccttagaagggacagaactaagaaatacattgctcaaataatattttactttattgataatgacaaaaagaatattttttaaaccccatcaaaatagatttcaattgactgtttccccacactcctctaatttaaacaagtagtgaaggcttatcttaaactgtgtagtaccttagacttggcatttatttttgatagagcagagataaaatattttgatggaaggaaatcaattttctgtaactgatgatgtgaaaattttattttctgggaaattatatagccattcaaaaattcaaagtatgttattatgattggttacaagagaataatgttacatgtttaattgtaatatttgtctcctatcattttcttccctttcagtcataataaatgatttacaaaacccaaaaaaaaaaatat

SEQ ID NO: 416475 - DNA, 1831 bp, Homo sapiens
atagaattacagaaccacaagggaccttagagaaataatgcacttattttgcaaatgagaaagctgaggcctagagagggaaatgagttacccaaaatcaaatagctagacctgggtctagactctttccataaattatatgtcaaatttctttggtataactttagttattaaaatctttttgaactcggaaggtgaaaaacttgcttcttcagtgaccaaatcatggaaaaatccctggaatcttcttgtttccagtttcaggcagtcctacattacagttcctttttgagtaaaaaatgcgtggccacagtccaaagttaatgtgtgtccaaaaggataagtggaccaaatagcaatttataattacatactaaactcagagccgcacagaggctgaaaacaaaaagcttgagtatatttggtttgatcatattaattgaaaaatttcagtctgcagcacacttgtcttcaaaaaatgttgatttgaaaagtactgtaaatctcagttttccacttcctttctagatttgtgacattatttccaaatgggaacaggcttccaaagaacagcagcctggaaaatgtgaaggtacaaggactgttcgtctgacatacaaaaacagactatatttctcagtgcaagctcgtggagagactgatagagaaaagttgctgttaatgtatcagacaaatgatcaaatcataaatggactttttcctctgaacaaagatctggcattagaaatggcagctcttttatctcaggtagagattggagattttgaaagacctttctcaactccagcagggcatgttaccaatcagtgcaaagtgaatcaaactctaaagcaagtcatagagaaattttatcctaaaaggtatagagatggctgttctgaagagcagttaaggcagctttgccagcgactttcaaccagatggatggccctccggggacacagtgctgctgactgtgtgcgcatttatttgacagtagccaggaagtggccattctttggtgccaagttgtttcttgcaaaacccataactccatcatcacttggaagtactttcttgtggctggctgtacatgaggatggtttaagcctcttagaatacaactccatgaggttaatagtcagctatgtgtacaagagtctaatgacctttggaggctatcaagatgattttatggtagtcattaacaatacacattcaaaggacaaaccaacagagaaattactttttgccatggcaaaacccaagattcttgaaatcactcttttgatcgccagttacataaacaacttccatcagcaaaaggcagcatttcaccacctctctgctccagcactgctctcagcccagacccggggaccccaagccagaatgatgggaagccagcctcttctgtcaagcagcagaccgaccaaaggccccaccttactctgaaagctggggagcctgaacattcactccttgtcctccatgctgtggctgtatcagctccctacaagttcgtttacacctggcagcacggcagccacacaccggtattccaaaccttaacaatgaagggggttagtctcttttatttgattcttaaatattcaaataaatattaacagtaaaacataaacacaaaatttgccaacacactaattttcttatagagtaaatgagtaagaattcatcattttttccatctcccttctcccttgtcatcagacacattgtgcaatgtggcttttcttttctttttcttgccttaatgcattggctagaacttttagtacaatgctggatcagcggatcgggtaccgagctc

SEQ ID NO: 416476 - DNA, 467 bp, Homo sapiens
  misc_feature (413)..(413): n is a, c, g, or t
  misc_feature (444)..(444): n is a, c, g, or t
  misc_feature (464)..(464): n is a, c, g, or t
gtggaagcaaacagcctgcgagcagagcctcctgaggtgtatttcgggtcttgctggggctgagagagaccacagccctttggggggtacaaacaagagttcagttgctgtgaattctgccactgtgcccagctctgaagcctcagctcttgccaaacagacccgagacccatgtcagccccactggatgccgccctccacgcccttcaggaggagcaggccagactcaagatgaggctgtgggacctgcagcagctgagaaaggagctcggggactcccccaaagacaaggtcccattttcagtgcccaagattccccctggtattccgaggacacacccagcaggacccggaagtgcctaagtctttagtttccaatttgcggatccactgccctctgcttgcgggctctnctctgatcacctttgatgaccccaaaggtangctcatggggagcctcatgngtg

SEQ ID NO: 416477 - DNA, 324 bp, Homo sapiens
aggtaaaataacttgtctgaagttacacagctaagaagtgttattgccaggatagagccccaggcccggctctcagccatgctgctgtctcagtgtagcttgatgtaggtggcttctccctgcccatctcttccccctgtgggtccctgcttggcccacctcacctgtcagccagtggattcaactctgcatcaggcccagcacagagaaggcaaagataaagccttctaaacaaagtaacatcagcaggaacgatccccttctttgcatttgggtcaagtagttcatgagatagagcagaaagagcatgggcttggctacctg

SEQ ID NO: 416478 - DNA, 3399 bp, Homo sapiens
  misc_feature (2441)..(2441): n is a, c, g, or t
gcctgggtgacagagcgagactgtctcaataataataatagtaataatcatgctgcctgtgtcccctgatgagacagcactggccgcaggtggccgctaacctctcgaaatagggatggcccgaattgagacatatgcaagtcaacactacaccgggtttcagaaacacatacgattttcaaaagaattaaaatatcgcatttagtttttctattgattgcatgttgaaatcttactttggatatattggattaaataaagtatatcattaaaatttttaagcttatgtgcctatgagaaacttccaaattacacagttggatggcgttatatttctcttggacagcagtggtctgaaagatgacaaaaatcacgatacgtttgaatcacgccatgtctttagggaaaagaagaaagaagagtttcctttcgtatcgcttaggggttcctcgcaagaaccatctgacagagaaaagccctggctcccgccccagtggcttctaattctggtccccgcgcccagaaagccgggaacgggcaagcctggaaaggcgttttgaaaggaaacaggatcccccgagtataggatgcgtttctgcctcacaaaagtcccttgggggtggggggacggcagcggctgaggcgcaggaaagaggagagcacacggggagtggcccttggaaccaggcgcgcaaaacctcagcccctaggctccatttccaggttcgcgggtgacctccccaagatggccgccgcctgggggcgggcctccacgctgcacgggtgttgattgggtgagacgactcaatggtgagcaatgattggttcacacggcgcaagctgggcggaaccggaagatggtgtgagccacgggctgccgggggcctggggctcggcgtcggtccccgggggatgtggagagctggcagcatgtcggccgagctgggagtcgggtgcgcattgcgggcggtgaacgagcgcgtgcagcaggctgtggcgcggcggccgcgggatctcccagccatccagccccggctagtggcggtcagcaaaaccaaacctgcagacatggtgatcgaggcctatggacatgggcagcgcacttttggcgagaactacgttcaggaactgctagaaaaagcatcaaatcccaaaattctgtctttgtgtcctgagatcaaatggcacttcattggccacctacagaaacaaaatgtcaacaaattgatggctgtccccaatctcttcatgctggaaacagtggattctgtgaagttggcagacaaagtgaacagttcctggcagagaaaaggttctcctgaaaggttaaaggttatggtccagattaacaccagcggagaagagagtaaacatggccttccaccttcagagaccatagccatcgtggagcacataaacgccaagtgtcctaacctggagtttgtggggctgatgaccataggaagctttgggcatgatcttagtcaaggaccaaatccagacttccagctgttattgtccctccgggaggagctgtgtaaaaagctgaacatccctgctgaccaggttgagctgagcatgggcatgtccgcggatttccagcatgcggttgaagtaggatctacaaatgtccgaataggaagcacgattttggagagcgggattactcaaagaaacccaccccggacaagtgcgcagcagacgtgaaggccccgctggaggtggcacaggagcactgagccagggaatactgagagcactaactatgcactaacctagattttcatttcgatattccctgtgtcccagcgcagtcctgctctcctgtgacctgtggagagcactaatgatcacgtgtgttgatggaaaccatctgtgcttagtctctgacataggaagcttgcttcaggcaatggctttggattgagtttgagaaattcaaacatttctgcagaacagataccaaatcaatagctaggaatcatgttcaatattgaattctgcccaggagcatgaactgatccatgaatgccttttccaggttaaaatttggtcactgatgcctataatcgtggaagtcagagggattcccctttttcatctcattttaataggaaaattccttatggttaacatctccctacaaactcctactacgtcgtctaaattgctgctctggaataaggtgatttctgcccccagattcttccctagccggtagatacgtgaagatattcccaactgtggaatggcagtgtaggtagcttcaggaaatggctcaggttaattctcaaaacacaaattgttgctggccaggcatggtgactcatgcctgtaatcccagcaatttgggagacagaggcggaaggatcacctgagcctaggagttcaagaccagcctcagcaacagcaggagccccaccccccgtctctacaaaaanatttaaaaattaactgggcatggtggctgaggtggaagaatggaagaatcacttgagcccaggagtttgaggctgcagtgagctatgattgcaccactgtactcctgccttaaaaaaaaaaaaaaaatcccaatagtccatgaaggctttgatctcttgggaagttcttcatagatgctgtcacatttcttaaagcaaccttttaatatgcagataataccccccaacttttttagagacagcctgtctcttaaaaaaaaaattaatttggtagtgagagcttgtgtcactgccactctgttttatccctgaaattaaaggataacataaggaggacttgggcctttctgacatcatcctgaagagacaggactttgcgtttttcctctgggacctacagtgatgagaatttaatgattatctcctccactataatcctctttagggtgattttttaaatcaaaacccagtgaatctcattactcctaagaaacgaaagattccttcaaagccttttcaggcacatggtttcaacaaagcctggctttgacattccttgtcctgaggagcactttccaggcatagttacagcttccccactgtatttacaagccagaattgtgcaactcttctggatcattaataaagtagcaagatcctcaaaaaacccaaaaacaccattctctaatagtcatgacaaatggcttcagtatggcttgttttttattttccagatggctttttctcttattttttgaagccccagtctttgattttacaggtaactttcaaaacatcatgatgctgccaaatgtacttttgtaaacttaaacattatgattcctgtattatttcagtgagagctacagtgtgatatttcagagtctattaaataaaaatgtgagtttgaattacaccatctgtgccaattacaaagcaattaaaagatttatttttt

SEQ ID NO: 416479 - DNA, 3280 bp, Homo sapiens
  misc_feature (2322)..(2322): n is a, c, g, or t
gcctgggtgacagagcgagactgtctcaataataataatagtaataatcatgctgcctgtgtcccctgatgagacagcactggccgcaggtggccgctaacctctcgaaatagggatggcccgaattgagacatatgcaagtcaacactacaccgggtttcagaaacacatacgattttcaaaagaattaaaatatcgcatttagtttttctattgattgcatgttgaaatcttactttggatatattggattaaataaagtatatcattaaaatttttaagcttatgtgcctatgagaaacttccaaattacacagttggatggcgttatatttctcttggacagcagtggtctgaaagatgacaaaaatcacgatacgtttgaatcacgccatgtctttagggaaaagaagaaagaagagtttcctttcgtatcgcttaggggttcctcgcaagaaccatctgacagagaaaagccctggctcccgccccagtggcttctaattctggtccccgcgcccagaaagccgggaacgggcaagcctggaaaggcgttttgaaaggaaacaggatcccccgagtataggatgcgtttctgcctcacaaaagtcccttgggggtggggggacggcagcggctgaggcgcaggaaagaggagagcacacggggagtggcccttggaaccaggcgcgcaaaacctcagcccctaggctccatttccaggttcgcgggtgacctccccaagatggccgccgcctgggggcgggcctccacgctgcacgggtgttgattgggtgagacgactcaatggtgagcaatgattggttcacacggcgcaagctgggcggaaccggaagatggtgtgagccacgggctgccgggggcctggggctcggcgtcggtccccgggggatgtggagagctggcagcatgtcggccgagctgggagtcgggtgcgcattgcgggcggtgaacgagccgcacttttggcgagaactacgttcaggaactgctagaaaaagcatcaaatcccaaaattctgtctttgtgtcctgagatcaaatggcacttcattggccacctacagaaacaaaatgtcaacaaattgatggctgtccccaatctcttcatgctggaaacagtggattctgtgaagttggcagacaaagtgaacagttcctggcagagaaaaggttctcctgaaaggttaaaggttatggtccagattaacaccagcggagaagagagtaaacatggccttccaccttcagagaccatagccatcgtggagcacataaacgccaagtgtcctaacctggagtttgtggggctgatgaccataggaagctttgggcatgatcttagtcaaggaccaaatccagacttccagctgttattgtccctccgggaggagctgtgtaaaaagctgaacatccctgctgaccaggttgagctgagcatgggcatgtccgcggatttccagcatgcggttgaagtaggatctacaaatgtccgaataggaagcacgattttggagagcgggattactcaaagaaacccaccccggacaagtgcgcagcagacgtgaaggccccgctggaggtggcacaggagcactgagccagggaatactgagagcactaactatgcactaacctagattttcatttcgatattccctgtgtcccagcgcagtcctgctctcctgtgacctgtggagagcactaatgatcacgtgtgttgatggaaaccatctgtgcttagtctctgacataggaagcttgcttcaggcaatggctttggattgagtttgagaaattcaaacatttctgcagaacagataccaaatcaatagctaggaatcatgttcaatattgaattctgcccaggagcatgaactgatccatgaatgccttttccaggttaaaatttggtcactgatgcctataatcgtggaagtcagagggattcccctttttcatctcattttaataggaaaattccttatggttaacatctccctacaaactcctactacgtcgtctaaattgctgctctggaataaggtgatttctgcccccagattcttccctagccggtagatacgtgaagatattcccaactgtggaatggcagtgtaggtagcttcaggaaatggctcaggttaattctcaaaacacaaattgttgctggccaggcatggtgactcatgcctgtaatcccagcaatttgggagacagaggcggaaggatcacctgagcctaggagttcaagaccagcctcagcaacagcaggagccccaccccccgtctctacaaaaanatttaaaaattaactgggcatggtggctgaggtggaagaatggaagaatcacttgagcccaggagtttgaggctgcagtgagctatgattgcaccactgtactcctgccttaaaaaaaaaaaaaaaatcccaatagtccatgaaggctttgatctcttgggaagttcttcatagatgctgtcacatttcttaaagcaaccttttaatatgcagataataccccccaacttttttagagacagcctgtctcttaaaaaaaaaattaatttggtagtgagagcttgtgtcactgccactctgttttatccctgaaattaaaggataacataaggaggacttgggcctttctgacatcatcctgaagagacaggactttgcgtttttcctctgggacctacagtgatgagaatttaatgattatctcctccactataatcctctttagggtgattttttaaatcaaaacccagtgaatctcattactcctaagaaacgaaagattccttcaaagccttttcaggcacatggtttcaacaaagcctggctttgacattccttgtcctgaggagcactttccaggcatagttacagcttccccactgtatttacaagccagaattgtgcaactcttctggatcattaataaagtagcaagatcctcaaaaaacccaaaaacaccattctctaatagtcatgacaaatggcttcagtatggcttgttttttattttccagatggctttttctcttattttttgaagccccagtctttgattttacaggtaactttcaaaacatcatgatgctgccaaatgtacttttgtaaacttaaacattatgattcctgtattatttcagtgagagctacagtgtgatatttcagagtctattaaataaaaatgtgagtttgaattacaccatctgtgccaattacaaagcaattaaaagatttatttttt

SEQ ID NO: 416480 - DNA, 2968 bp, Homo sapiens
  misc_feature (2010)..(2010): n is a, c, g, or t
gcctgggtgacagagcgagactgtctcaataataataatagtaataatcatgctgcctgtgtcccctgatgagacagcactggccgcaggtggccgctaacctctcgaaatagggatggcccgaattgagacatatgcaagtcaacactacaccgggtttcagaaacacatacgattttcaaaagaattaaaatatcgcatttagtttttctattgattgcatgttgaaatcttactttggatatattggattaaataaagtatatcattaaaatttttaagcttatgtgcctatgagaaacttccaaattacacagttggatggcgttatatttctcttggacagcagtggtctgaaagatgacaaaaatcacgatacgtttgaatcacgccatgtctttagggaaaagaagaaagaagagtttcctttcgtatcgcttaggggttcctcgcaagaaccatctgacagagaaaagccctggctcccgccccagtggcttctaattctggtccccgcgcccagaaagccgggaacgggcaagcctggaaaggcgttttgaaaggaaacaggatcccccgagtataggatgcgtttctgcctcacaaaagtcccttgggggtggggggacggcagcggctgaggcgcaggaaagaggagagcacacggggagtggcccttggaaccaggcgcgcaaaacctcagcccctaggctccatttccaggttcgcgggtgacctccccaagatggccgccgcctgggggcgggcctccacgctgcacgggtgttgattgggtgagacgactcaatggtgagcaatgattggttcacacggcgcaagctgggcggaaccggaagatggtgtgagccacgggctgccgggggcctggggctcggcgtcggtccccgggggatgtggagagctggcagcatgtcggccgagctgggagtcgggtgcgcattgcgggcggtgaacgagcgcgtgcagcaggctgtggcgcggcggccgcgggatctcccagccatccagccccggctagtggcggtcagcaaaaccaaacctgcagacatggtgatcgaggcctatggacatgggcagcgcacttttggcgagaactacgttcaggaactgctagaaaaagcatcaaatcccaaaattctgtctttgtgtcctgagatcaaatggcacttcattggccacctacagaaacaaaatgtcaacaaattgatggctgtccccaatctcttcatgctggaaacagtggattctgtgaagttggcagacaaagtgaacagttcctggcagagaaaaggttctcctgaaaggttaaaggttatggtccagattaacaccagcggagaagagagtaaacatggccttccaccttcagagaccatagccatcgtggagcactaatgatcacgtgtgttgatggaaaccatctgtgcttagtctctgacataggaagcttgcttcaggcaatggctttggattgagtttgagaaattcaaacatttctgcagaacagataccaaatcaatagctaggaatcatgttcaatattgaattctgcccaggagcatgaactgatccatgaatgccttttccaggttaaaatttggtcactgatgcctataatcgtggaagtcagagggattcccctttttcatctcattttaataggaaaattccttatggttaacatctccctacaaactcctactacgtcgtctaaattgctgctctggaataaggtgatttctgcccccagattcttccctagccggtagatacgtgaagatattcccaactgtggaatggcagtgtaggtagcttcaggaaatggctcaggttaattctcaaaacacaaattgttgctggccaggcatggtgactcatgcctgtaatcccagcaatttgggagacagaggcggaaggatcacctgagcctaggagttcaagaccagcctcagcaacagcaggagccccaccccccgtctctacaaaaanatttaaaaattaactgggcatggtggctgaggtggaagaatggaagaatcacttgagcccaggagtttgaggctgcagtgagctatgattgcaccactgtactcctgccttaaaaaaaaaaaaaaaatcccaatagtccatgaaggctttgatctcttgggaagttcttcatagatgctgtcacatttcttaaagcaaccttttaatatgcagataataccccccaacttttttagagacagcctgtctcttaaaaaaaaaattaatttggtagtgagagcttgtgtcactgccactctgttttatccctgaaattaaaggataacataaggaggacttgggcctttctgacatcatcctgaagagacaggactttgcgtttttcctctgggacctacagtgatgagaatttaatgattatctcctccactataatcctctttagggtgattttttaaatcaaaacccagtgaatctcattactcctaagaaacgaaagattccttcaaagccttttcaggcacatggtttcaacaaagcctggctttgacattccttgtcctgaggagcactttccaggcatagttacagcttccccactgtatttacaagccagaattgtgcaactcttctggatcattaataaagtagcaagatcctcaaaaaacccaaaaacaccattctctaatagtcatgacaaatggcttcagtatggcttgttttttattttccagatggctttttctcttattttttgaagccccagtctttgattttacaggtaactttcaaaacatcatgatgctgccaaatgtacttttgtaaacttaaacattatgattcctgtattatttcagtgagagctacagtgtgatatttcagagtctattaaataaaaatgtgagtttgaattacaccatctgtgccaattacaaagcaattaaaagatttatttttt

SEQ ID NO: 416481 - DNA, 1466 bp, Homo sapiens
gcctgggtgacagagcgagactgtctcaataataataatagtaataatcatgctgcctgtgtcccctgatgagacagcactggccgcaggtggccgctaacctctcgaaatagggatggcccgaattgagacatatgcaagtcaacactacaccgggtttcagaaacacatacgattttcaaaagaattaaaatatcgcatttagtttttctattgattgcatgttgaaatcttactttggatatattggattaaataaagtatatcattaaaatttttaagcttatgtgcctatgagaaacttccaaattacacagttggatggcgttatatttctcttggacagcagtggtctgaaagatgacaaaaatcacgatacgtttgaatcacgccatgtctttagggaaaagaagaaagaagagtttcctttcgtatcgcttaggggttcctcgcaagaaccatctgacagagaaaagccctggctcccgccccagtggcttctaattctggtccccgcgcccagaaagccgggaacgggcaagcctggaaaggcgttttgaaaggaaacaggatcccccgagtataggatgcgtttctgcctcacaaaagtcccttgggggtggggggacggcagcggctgaggcgcaggaaagaggagagcacacggggagtggcccttggaaccaggcgcgcaaaacctcagcccctaggctccatttccaggttcgcgggtgacctccccaagatggccgccgcctgggggcgggcctccacgctgcacgggtgttgattgggtgagacgactcaatggtgagcaatgattggttcacacggcgcaagctgggcggaaccggaagatggtgtgagccacgggctgccgggggcctggggctcggcgtcggtccccgggggatgtggagagctggcagcatgtcggccgagctgggagtcgggtgcgcattgcgggcggtgaacgagcgcgtgcagcaggctgtggcgcggcggccgcgggatctcccagccatccagccccggctagtggcggtcagcaaaaccaaacctgcagacatggtgatcgaggcctatggacatgggcagcgcacttttggcgagaactacgttcaggaactgctagaaaaagcatcaaatcccaaaattctgtctttgtgtcctgagatcaaatggcacttcattggccacctacagaaacaaaatgtcaacaaattgatgggaaagtctgagttcttaataaaaagagaaaacatcatgccaagaacagaatgaattcaccattttctgggttatatatacttggaaacctacccaacctcatgtttattattatttggtggtctttcagaaaaattataaagaattgtagcccataaatttttttaactagcaaaagagacatttctgttctttttcctttaaataaaaggctacagtaaataaaatacaataca

SEQ ID NO: 416482 - DNA, 1592 bp, Homo sapiens
gcctgggtgacagagcgagactgtctcaataataataatagtaataatcatgctgcctgtgtcccctgatgagacagcactggccgcaggtggccgctaacctctcgaaatagggatggcccgaattgagacatatgcaagtcaacactacaccgggtttcagaaacacatacgattttcaaaagaattaaaatatcgcatttagtttttctattgattgcatgttgaaatcttactttggatatattggattaaataaagtatatcattaaaatttttaagcttatgtgcctatgagaaacttccaaattacacagttggatggcgttatatttctcttggacagcagtggtctgaaagatgacaaaaatcacgatacgtttgaatcacgccatgtctttagggaaaagaagaaagaagagtttcctttcgtatcgcttaggggttcctcgcaagaaccatctgacagagaaaagccctggctcccgccccagtggcttctaattctggtccccgcgcccagaaagccgggaacgggcaagcctggaaaggcgttttgaaaggaaacaggatcccccgagtataggatgcgtttctgcctcacaaaagtcccttgggggtggggggacggcagcggctgaggcgcaggaaagaggagagcacacggggagtggcccttggaaccaggcgcgcaaaacctcagcccctaggctccatttccaggttcgcgggtgacctccccaagatggccgccgcctgggggcgggcctccacgctgcacgggtgttgattgggtgagacgactcaatggtgagcaatgattggttcacacggcgcaagctgggcggaaccggaagatggtgtgagccacgggctgccgggggcctggggctcggcgtcggtccccgggggatgtggagagctggcagcatgtcggccgagctgggagtcgggtgcgcattgcgggcggtgaacgagcgcgtgcagcaggctgtggcgcggcggccgcgggatctcccagccatccagccccggctagtggcggtcagcaaaaccaaacctgcagacatggtgatcgaggcctatggacatgggcagcgcacttttggcgagaactacgttcaggaactgctagaaaaagcatcaaatcccaaaattctgtctttgtgtcctgagatcaaatggcacttcattggccacctacagaaacaaaatgtcaacaaattgatgggtaagataaaattaaatatgaaaacaaaattgttctgtcattgtattgcttctactaccctttgtggaagagagagcaacttttagaatagccccaattcaccatttgtttttggaatttctttaggaaagtctgagttcttaataaaaagagaaaacatcatgccaagaacagaatgaattcaccattttctgggttatatatacttggaaacctacccaacctcatgtttattattatttggtggtctttcagaaaaattataaagaattgtagcccataaatttttttaactagcaaaagagacatttctgttctttttcctttaaataaaaggctacagtaaataaaatacaataca

SEQ ID NO: 416483 - DNA, 2141 bp, Homo sapiens
acgtccacccgcgaatccctgcttaaaggccttgctttcttgtctaacgccgcaaccagtcctctgagttgccaacgtctttcttcttgtctcgacgccccgtcgtccggccacagcgattctctgcttagcaggatcggtccacagcgggacgtgagtccttttcctcctcgcggcttaccgcctctctccgcctagtgccaggtgctaataaagttgttgtttcaaatgcggccaggaacatcgcgagcggggaccaatcagagagtagctttgcctctataacggcgcgagagtgagacgtcatcggtgagcgactaacgctagaaacagtggtgcgcggagaggagaggcctcgggatgtctctggcagatgagctcttagctgatctcgaagaggcagcagaagaggaggaaggaggaagctatggggaggaagaagaggagccagcgatcgaggatgtgcaggaggagacacagctggatctttccggggattcagtcaagaccatcgccaagctatgggatagtaagatgtttgctgagattatgatgaagattgaggagtatatcagcaagcaagccaaagcttcagaagtgatgggaccagtggaggccgcgcctgaataccgcgtcatcgtggatgccaacaacctgaccgtggagatcgaaaacgagctgaacatcatccataagttcatccgggataagtactcaaagagattccctgaactggagtccttggtccccaatgcactggattacatccgcacggtcaaggagctgggcaacagcctggacaagtgcaagaacaatgagaacctgcagcagatcctcaccaatgccaccatcatggtcgtcagcgtcaccgcctccaccacccaggggcagcagctgtcggaggaggagctggagcggctggaggaggcctgcgacatggcgctggagctgaacgcctccaagcaccgcatctacgagtatgtggagtcccggatgtccttcatcgcacccaacctgtccatcattatcggggcatccacggccgccaagatcatgggtgtggccggcggcctgaccaacctctccaagatgcccgcctgcaacatcatgctgctcggggcccagcgcaagacgctgtcgggcttctcgtctacctcagtgctgccccacaccggctacatctaccacagtgacatcgtgcagtccctgccaccggatctgcggcggaaagcggcccggctggtggccgccaagtgcacactggcagcccgtgtggacagtttccacgagagcacagaagggaaggtgggctacgaactgaaggatgagatcgagcgcaaattcgacaagtggcaggagccgccgcctgtgaagcaggtgaagccgctgcctgcgcccctggatggacagcggaagaagcgaggcggccgcaggtaccgcaagatgaaggagcggctggggctgacggagatccggaagcaggccaaccgtatgagcttcggagagatcgaggaggacgcctaccaggaggacctgggattcagcctgggccacctgggcaagtcgggcagtgggcgtgtgcggcagacacaggtaaacgaggccaccaaggccaggatctccaagacgctgcagcggaccctgcagaagcagagcgtcgtatatggcgggaagtccaccatccgcgaccgctcctcgggcacggcctccagcgtggccttcaccccactccagggcctggagattgtgaacccacaggcggcagagaagaaggtggctgaggccaaccagaagtatttctccagcatggctgagttcctcaaggtcaagggcgagaagagtggccttatgtccacctgaatgactgcgtgtgtccaaggtggcttcccactgaagggacacagaggtccagtccttctgaagggctaggatcgggttctggcagggagaacctgccctgccactggccccattgctgggactgcccagggaggaggccttggaagagtccggcctggcctcccccaggaccgagatcaccgcccagtatgggctagagcaggtcttcatcatgccttgtcttttttaactgagaaaggagattttttgaaaagagtacaattaaaaggacattgtcaaga

SEQ ID NO: 416484 - DNA, 1020 bp, Homo sapiens
  misc_feature (911)..(913): n is a, c, g, or t
  misc_feature (920)..(920): n is a, c, g, or t
aagttaggctaggtacgaggctggtgtctaatcggccgagggacctaacgctagaaacagtggtgcgcggagaggagaggcctcgggatgtctctggcagatgagctcttagctgatctcgaagaggcagcagaagaggaggaaggaggaagctatggggaggaagaagaggagccagcgatcgaggatgtgcaggaggagacacagctggatctttccggggattcagtcaagaccatcgccaagctatgggatagtaagatgtttgctgagattatgatgaagattgaggagtatatcagcaagcaagccaaagcttcagaagtgatgggaccagtggaggccgcgcctgaataccgcgtcatcgtggatgccaacaacctgaccgtggagatcgaaaacgagctgaacatcatccataagttcatccgggataagtactcaaagagattccctgaactggagtccttggtccccaatgcactggattacatccgcacggtcaaggagctgggcaacagcctggacaagtgcaagaacaatgagaacctgcagcagatcctcaccaatgccaccatcatggtcgtcagcgtcaccgcctccaccacccaggggcagcagctgtcggaggaggagctggagcggctggaggaggcctgcgacatggcgctggagctgaacgcctccaagcaccgcatctacgagtatgtggagtcccggatgtccttcatcgcacccaacctgtccatcattatcggggcatccacggccgccaagatcatgggtgtggccggcggcctgaccaacctctccaagatgcccgcctgcaacatcatgctgctcggggcccagcgcaagacgctgtcgggcttctcgtctacctcagtgctgccccccgggtttcccggggnnntgggccngcccgattttgggaagccccgtgggccctcaactcgccgtgggttcccacaggggggggccaggacagcacaaggccggcagaatcgcctaacgagtgag

SEQ ID NO: 416485 - DNA, 2331 bp, Homo sapiens
acgtccacccgcgaatccctgcttaaaggccttgctttcttgtctaacgccgcaaccagtcctctgagttgccaacgtctttcttcttgtctcgacgccccgtcgtccggccacagcgattctctgcttagcaggatcggtccacagcgggacgtgagtccttttcctcctcgcggcttaccgcctctctccgcctagtgccaggtgctaataaagttgttgtttcaaatgcggccaggaacatcgcgagcggggaccaatcagagagtagctttgcctctataacggcgcgagagtgagacgtcatcggtgagcgactaacgctagaaacagtggtgcgcggagaggagaggcctcgggatgtctctggcagatgagctcttagctgatctcgaagaggcagcagaagaggaggaaggaggaagctatggggaggaagaagaggagccagcgatcgaggatgtgcaggaggagacacagctggatctttccggggattcagtcaagaccatcgccaagctatgggatagtaagatgtttgctgagattatgatgaagattgaggagtatatcagcaagcaagccaaagcttcagaagtgatgggaccagtggaggccgcgcctgaataccgcgtcatcgtggatgccaacaacctgaccgtggagatcgaaaacgagctgaacatcatccataagttcatccgggataagtactcaaagagattccctgaactggagtccttggtccccaatgcactggattacatccgcacggtcaaggagctgggcaacagcctggacaagtgcaagaacaatgagaacctgcagcagatcctcaccaatgccaccatcatggtcgtcagcgtcaccgcctccaccacccaggggcagcagctgtcggaggaggagctggagcggctggaggaggcctgcgacatggcgctggagctgaacgcctccaagcaccgcatctacgagtatgtggagtcccggatgtccttcatcgcacccaacctgtccatcattatcggggcatccacggccgccaagatcatgggtgtggccggcggcctgaccaacctctccaagatgcccgcctgcaacatcatgctgctcggggcccagcgcaagacgctgtcgggcttctcgtctacctcagtgctgccccacaccggctacatctaccacagtgacatcgtgcagtccctgccaccggatctgcggcggaaagcggcccggctggtggccgccaagtgcacactggcagcccgtgtggacagtttccacgagagcacagaagggaaggtgggctacgaactgaaggatgagatcgagcgcaaattcgacaagtggcaggagccgccgcctgtgaagcaggtgaagccgctgcctgcgcccctggatggacagcggaagaagcgaggcggccgcaggtgaggggccctgggggtccggtaggcatgggggtcatggaggggagaagccggcgtcctcctcccagccgactccctggcgccgcccacccacccgtccccaggtaccgcaagatgaaggagcggctggggctgacggagatccggaagcaggccaaccgtatgagcttcggagagatcgaggaggacgcctaccaggaggacctgggattcagcctgggccacctgggcaagtcgggcagtgggcgtgtgcggcagacacaggtaaacgaggccaccaaggccaggatctccaagacgctgcaggtatgggccagacccaggtggggctggggaccgagggacacaaggtggggggagcccagatcgcagcctccctgtcctccccacagcggaccctgcagaagcagagcgtcgtatatggcgggaagtccaccatccgcgaccgctcctcgggcacggcctccagcgtggccttcaccccactccagggcctggagattgtgaacccacaggcggcagagaagaaggtggctgaggccaaccagaagtatttctccagcatggctgagttcctcaaggtcaagggcgagaagagtggccttatgtccacctgaatgactgcgtgtgtccaaggtggcttcccactgaagggacacagaggtccagtccttctgaagggctaggatcgggttctggcagggagaacctgccctgccactggccccattgctgggactgcccagggaggaggccttggaagagtccggcctggcctcccccaggaccgagatcaccgcccagtatgggctagagcaggtcttcatcatgccttgtcttttttaactgagaaaggagattttttgaaaagagtacaattaaaaggacattgtcaaga

SEQ ID NO: 416486 - DNA, 1692 bp, Homo sapiens
acgtccacccgcgaatccctgcttaaaggccttgctttcttgtctaacgccgcaaccagtcctctgagttgccaacgtctttcttcttgtctcgacgccccgtcgtccggccacagcgattctctgcttagcaggatcggtccacagcgggacgtgagtccttttcctcctcgcggcttaccgcctctctccgcctagtgccaggtgctaataaagttgttgtttcaaatgcggccaggaacatcgcgagcggggaccaatcagagagtagctttgcctctataacggcgcgagagtgagacgtcatcggtgagcgactaacgctagaaacagtggtgcgcggagaggagaggcctcgggatgtctctggcagatgagctcttagctgatctcgaagaggcagcagaagaggaggaaggaggaagctatggggaggaagaagaggagccagcgatcgaggatgtgcaggaggagacacagctggatctttccggggattcagtcaagaccatcgccaagctatgggatagtaagatgtttgctgagattatgatgaagattgaggagtatatcagcaagcaagccaaagcttcagaagtgatgggaccagtggaggccgcgcctgaataccgcgtcatcgtggatgccaacaacctgaccgtggagatcgaaaacgagctgaacatcatccataagttcatccgggataagtactcaaagagattccctgaactggagtccttggtccccaatgcactggattacatccgcacggtcaaggagctgggcaacagcctggacaagtgcaagaacaatgagaacctgcagcagatcctcaccaatgccaccatcatggtcgtcagcgtcaccgcctccaccacccaggggcagcagctgtcggaggaggagctggagcggctggaggaggcctgcgacatggcgctggagctgaacgcctccaagcaccgcatctacgagtatgtggagtcccggatgtccttcatcgcacccaacctgtccatcattatcggggcatccacggccgccaagatcatgggtgtggccggcggcctgaccaacctctccaagatgcccgcctgcaacatcatgctgctcggggcccagcgcaagacgctgtcgggcttctcgtctacctcagtgctgccccacaccggctacatctaccacagtgacatcgtgcagtccctgccaccggatctgcggcggaaagcggcccggctggtggccgccaagtgcacactggcagcccgtgtggacagtttccacgagagcacagaagggaaggtgggctacgaactgaaggatgagatcgagcgcaaattcgacaagtggcaggagccgccgcctgtgaagcaggtgaagccgctgcctgcgcccctggatggacagcggaagaagcgaggcggccgcaggtaccgcaagatgaaggagcggctggggctgacggagatccggaagcaggccaaccgtatgagcttcggagagatcggggaggacgcctacaggagactggattcagcctgggcctgggcagtgggcaggggctgtgcgccacccccggtaacaggcccaggcggttccagacgtgggggcctcaacaacgtgtttgggggaaccccccggacgctcgaggccgggccccccgcggtgtcccgggaaaagggggcccat

SEQ ID NO: 416487 - DNA, 1833 bp, Homo sapiens
ggctagtagaggccggggttaatcggacgaggcggagaggagaggcctcgggatgtctctggcagatgagctcttagctgatctcgaagaggcagcagaagaggaggaaggaggaagctatggggaggaagaagaggagccagcgatcgaggatgtgcaggaggagacacagctggatctttccggggattcagtcaagaccatcgccaagctatgggatagtaagatgtttgctgagattatgatgaagattgaggagtatatcagcaagcaagccaaagcttcagaagtgatgggaccagtggaggccgcgcctgaataccgcgtcatcgtggatgccaacaacctgaccgtggagatcgaaaacgagctgaacatcatccataagttcatccgggataagtactcaaagagattccctgaactggagtccttggtccccaatgcactggattacatccgcacggtcaaggagctgggcaacagcctggacaagtgcaagaacaatgagaacctgcagcagatcctcaccaatgccaccatcatggtcgtcagcgtcaccgcctccaccacccaggggcagcagctgtcggaggaggagctggagcggctggaggaggcctgcgacatggcgctggagctgaacgcctccaagcaccgcatctacgagtatgtggagtcccggatgtccttcatcgcacccaacctgtccatcattatcggggcatccacggccgccaagatcatgggtgtggccggcggcctgaccaacctctccaagatgcccgcctgcaacatcatgctgctcggggcccagcgcaagacgctgtcgggcttctcgtctacctcagtgctgccccacaccggctacatctaccacagtgacatcgtgcagtccctgccaccggatctgcggcggaaagcggcccggctggtggccgccaagtgcacactggcagcccgtgtggacagtttccacgagagcacagaagggaaggtgggctacgaactgaaggatgagatcgagcgcaaattcgacaagtggcaggagccgccgcctgtgaagcaggtgaagccgctgcctgcgcccctggatggacagcggaagaagcgaggcggccgcaggtaccgcaagatgaaggagcggctggggctgacggagatccggaagcaggccaaccgtatgagcttcggagagatcgaggaggacgcctaccaggaggacctgggattcagcctgggccacctgggcaagtcgggcagtgggcgtgtgcggcagacacaggtaaacgaggccaccaaggccaggatctccaagacgctgcagcggaccctgcagaagcagagcgtcgtatatggcgggaagtccaccatccgcgaccgctcctcgggcacggcctccagcgtggccttcaccccactccagggcctggagattgtgaacccacaggcggcagagaagaaggtggctgaggccaaccagaagtatttctccagcatggctgagttcctcaaggtcaagggcgagaagagtggccttatgtccacctgaatgactgcgtgtgtccaaggtggcttcccactgaagggacacagaggtccagtccttctgaagggctaggatcgggttctggcagggagaacctgccctgccactggccccattgctgggactgcccagggaggaggccttggaagagtccggcctggcctcccccaggaccgagatcaccgcccagtatgggctagagcaggtcttcatcatgccttgtcttttttaactgagaaaggagattttttgaaaagagtacaattaaaaggacattgtcaaga

SEQ ID NO: 416488 - DNA, 2164 bp, Homo sapiens
acgtccacccgcgaatccctgcttaaaggccttgctttcttgtctaacgccgcaaccagtcctctgagttgccaacgtctttcttcttgtctcgacgccccgtcgtccggccacagcgattctctgcttagcaggatcggtccacagcgggacgtgagtccttttcctcctcgcggcttaccgcctctctccgcctagtgccaggtgctaataaagttgttgtttcaaatgcggccaggaacatcgcgagcggggaccaatcagagagtagctttgcctctataacggcgcgagagtgagacgtcatcggtgagcgactaacgctagaaacagtggtgcgcggagaggagagggaacgctgctgtccctccccaggcctcgggatgtctctggcagatgagctcttagctgatctcgaagaggcagcagaagaggaggaaggaggaagctatggggaggaagaagaggagccagcgatcgaggatgtgcaggaggagacacagctggatctttccggggattcagtcaagaccatcgccaagctatgggatagtaagatgtttgctgagattatgatgaagattgaggagtatatcagcaagcaagccaaagcttcagaagtgatgggaccagtggaggccgcgcctgaataccgcgtcatcgtggatgccaacaacctgaccgtggagatcgaaaacgagctgaacatcatccataagttcatccgggataagtactcaaagagattccctgaactggagtccttggtccccaatgcactggattacatccgcacggtcaaggagctgggcaacagcctggacaagtgcaagaacaatgagaacctgcagcagatcctcaccaatgccaccatcatggtcgtcagcgtcaccgcctccaccacccaggggcagcagctgtcggaggaggagctggagcggctggaggaggcctgcgacatggcgctggagctgaacgcctccaagcaccgcatctacgagtatgtggagtcccggatgtccttcatcgcacccaacctgtccatcattatcggggcatccacggccgccaagatcatgggtgtggccggcggcctgaccaacctctccaagatgcccgcctgcaacatcatgctgctcggggcccagcgcaagacgctgtcgggcttctcgtctacctcagtgctgccccacaccggctacatctaccacagtgacatcgtgcagtccctgccaccggatctgcggcggaaagcggcccggctggtggccgccaagtgcacactggcagcccgtgtggacagtttccacgagagcacagaagggaaggtgggctacgaactgaaggatgagatcgagcgcaaattcgacaagtggcaggagccgccgcctgtgaagcaggtgaagccgctgcctgcgcccctggatggacagcggaagaagcgaggcggccgcaggtaccgcaagatgaaggagcggctggggctgacggagatccggaagcaggccaaccgtatgagcttcggagagatcgaggaggacgcctaccaggaggacctgggattcagcctgggccacctgggcaagtcgggcagtgggcgtgtgcggcagacacaggtaaacgaggccaccaaggccaggatctccaagacgctgcagcggaccctgcagaagcagagcgtcgtatatggcgggaagtccaccatccgcgaccgctcctcgggcacggcctccagcgtggccttcaccccactccagggcctggagattgtgaacccacaggcggcagagaagaaggtggctgaggccaaccagaagtatttctccagcatggctgagttcctcaaggtcaagggcgagaagagtggccttatgtccacctgaatgactgcgtgtgtccaaggtggcttcccactgaagggacacagaggtccagtccttctgaagggctaggatcgggttctggcagggagaacctgccctgccactggccccattgctgggactgcccagggaggaggccttggaagagtccggcctggcctcccccaggaccgagatcaccgcccagtatgggctagagcaggtcttcatcatgccttgtcttttttaactgagaaaggagattttttgaaaagagtacaattaaaaggacattgtcaaga

SEQ ID NO: 416489 - DNA, 1845 bp, Homo sapiens
aggaccgggtggttgaatcggagagggctagaaacagtggtgcgcggagaggagaggcctcgggatgtctctggcagatgagctcttagctgatctcgaagaggcagcagaagaggaggaaggaggaagctatggggaggaagaagaggagccagcgatcgaggatgtgcaggaggagacacagctggatctttccggggattcagtcaagaccatcgccaagctatgggatagtaagatgtttgctgagattatgatgaagattgaggagtatatcagcaagcaagccaaagcttcagaagtgatgggaccagtggaggccgcgcctgaataccgcgtcatcgtggatgccaacaacctgaccgtggagatcgaaaacgagctgaacatcatccataagttcatccgggataagtactcaaagagattccctgaactggagtccttggtccccaatgcactggattacatccgcacggtcaaggagctgggcaacagcctggacaagtgcaagaacaatgagaacctgcagcagatcctcaccaatgccaccatcatggtcgtcagcgtcaccgcctccaccacccaggggcagcagctgtcggaggaggagctggagcggctggaggaggcctgcgacatggcgctggagctgaacgcctccaagcaccgcatctacgagtatgtggagtcccggatgtccttcatcgcacccaacctgtccatcattatcggggcatccacggccgccaagatcatgggtgtggccggcggcctgaccaacctctccaagatgcccgcctgcaacatcatgctgctcggggcccagcgcaagacgctgtcgggcttctcgtctacctcagtgctgccccacaccggctacatctaccacagtgacatcgtgcagtccctgccaccggatctgcggcggaaagcggcccggctggtggccgccaagtgcacactggcagcccgtgtggacagtttccacgagagcacagaagggaaggtgggctacgaactgaaggatgagatcgagcgcaaattcgacaagtggcaggagccgccgcctgtgaagcaggtgaagccgctgcctgcgcccctggatggacagcggaagaagcgaggcggccgcaggtaccgcaagatgaaggagcggctggggctgacggagatccggaagcaggccaaccgtatgagcttcggagagatcgaggaggacgcctaccaggaggacctgggattcagcctgggccacctgggcaagtcgggcagtgggcgtgtgcggcagacacaggtaaacgaggccaccaaggccaggatctccaagacgctgcagcggaccctgcagaagcagagcgtcgtatatggcgggaagtccaccatccgcgaccgctcctcgggcacggcctccagcgtggccttcaccccactccagggcctggagattgtgaacccacaggcggcagagaagaaggtggctgaggccaaccagaagtatttctccagcatggctgagttcctcaaggtcaagggcgagaagagtggccttatgtccacctgaatgactgcgtgtgtccaaggtggcttcccactgaagggacacagaggtccagtccttctgaagggctaggatcgggttctggcagggagaacctgccctgccactggccccattgctgggactgcccagggaggaggccttggaagagtccggcctggcctcccccaggaccgagatcaccgcccagtatgggctagagcaggtcttcatcatgccttgtcttttttaactgagaaaggagattttttgaaaagagtacaattaaaaggacattgtcaaga

SEQ ID NO: 416490 - DNA, 1857 bp, Homo sapiens
tgatggagaccacggggagcgggaggctgggctcctgggtctgggagaagaagtgtgtgaggaaaaaggcctcgggatgtctctggcagatgagctcttagctgatctcgaagaggcagcagaagaggaggaaggaggaagctatggggaggaagaagaggagccagcgatcgaggatgtgcaggaggagacacagctggatctttccggggattcagtcaagaccatcgccaagctatgggatagtaagatgtttgctgagattatgatgaagattgaggagtatatcagcaagcaagccaaagcttcagaagtgatgggaccagtggaggccgcgcctgaataccgcgtcatcgtggatgccaacaacctgaccgtggagatcgaaaacgagctgaacatcatccataagttcatccgggataagtactcaaagagattccctgaactggagtccttggtccccaatgcactggattacatccgcacggtcaaggagctgggcaacagcctggacaagtgcaagaacaatgagaacctgcagcagatcctcaccaatgccaccatcatggtcgtcagcgtcaccgcctccaccacccaggggcagcagctgtcggaggaggagctggagcggctggaggaggcctgcgacatggcgctggagctgaacgcctccaagcaccgcatctacgagtatgtggagtcccggatgtccttcatcgcacccaacctgtccatcattatcggggcatccacggccgccaagatcatgggtgtggccggcggcctgaccaacctctccaagatgcccgcctgcaacatcatgctgctcggggcccagcgcaagacgctgtcgggcttctcgtctacctcagtgctgccccacaccggctacatctaccacagtgacatcgtgcagtccctgccaccggatctgcggcggaaagcggcccggctggtggccgccaagtgcacactggcagcccgtgtggacagtttccacgagagcacagaagggaaggtgggctacgaactgaaggatgagatcgagcgcaaattcgacaagtggcaggagccgccgcctgtgaagcaggtgaagccgctgcctgcgcccctggatggacagcggaagaagcgaggcggccgcaggtaccgcaagatgaaggagcggctggggctgacggagatccggaagcaggccaaccgtatgagcttcggagagatcgaggaggacgcctaccaggaggacctgggattcagcctgggccacctgggcaagtcgggcagtgggcgtgtgcggcagacacaggtaaacgaggccaccaaggccaggatctccaagacgctgcagcggaccctgcagaagcagagcgtcgtatatggcgggaagtccaccatccgcgaccgctcctcgggcacggcctccagcgtggccttcaccccactccagggcctggagattgtgaacccacaggcggcagagaagaaggtggctgaggccaaccagaagtatttctccagcatggctgagttcctcaaggtcaagggcgagaagagtggccttatgtccacctgaatgactgcgtgtgtccaaggtggcttcccactgaagggacacagaggtccagtccttctgaagggctaggatcgggttctggcagggagaacctgccctgccactggccccattgctgggactgcccagggaggaggccttggaagagtccggcctggcctcccccaggaccgagatcaccgcccagtatgggctagagcaggtcttcatcatgccttgtcttttttaactgagaaaggagattttttgaaaagagtacaattaaaaggacattgtcaaga

SEQ ID NO: 416491 - DNA, 2169 bp, Homo sapiens
acgtccacccgcgaatccctgcttaaaggccttgctttcttgtctaacgccgcaaccagtcctctgagttgccaacgtctttcttcttgtctcgacgccccgtcgtccggccacagcgattctctgcttagcaggatcggtccacagcgggacgtgagtccttttcctcctcgcggcttaccgcctctctccgcctagtgccaggtgctaataaagttgttgtttcaaatgcggccaggaacatcgcgagcggggaccaatcagagagtagctttgcctctataacggcgcgagagtgagacgtcatcggtgagcgactaacgctagaaacagtggtgcgcggagaggagaggcctcgggatgtctctggcagatgagctcttagctgatctcgaagaggcagcagaagaggaggaaggaggaagctatggggaggaagaagaggagccagcgatcgaggatgtgcaggaggagacacagctggatctttccggggattcagtcaagaccatcgccaagctatgggatagtaagatgtttgctgagattatgatgaagattgaggagtatatcagcaagcaagccaaagcttcagaagtgatgggaccagtggaggccgcgcctgaataccgcgtcatcgtggatgccaacaacctgaccgtggagatcgaaaacgagctgaacatcatccataagttcatccgggataagtactcaaagagattccctgaactggagtccttggtccccaatgcactggattacatccgcacggtcaaggagctgggcaacagcctggacaagtgcaagaacaatgagaacctgcagcagatcctcaccaatgccaccatcatggtcgtcagcgtcaccgcctccaccacccaggggcagcagctgtcggaggaggagctggagcggctggaggaggcctgcgacatggcgctggagctgaacgcctccaagcaccgcatctacgagtatgtggagtcccggatgtccttcatcgcacccaacctgtccatcattatcggggcatccacggccgccaagatcatgggtgtggccggcggcctgaccaacctctccaagatgcccgcctgcaacatcatgctgctcggggcccagcgcaagacgctgtcgggcttctcgtctacctcagtgctgccccacaccggctacatctaccacagtgacatcgtgcagtccctgccaccgattccacccccgttttccgttgctccaggatctgcggcggaaagcggcccggctggtggccgccaagtgcacactggcagcccgtgtggacagtttccacgagagcacagaagggaaggtgggctacgaactgaaggatgagatcgagcgcaaattcgacaagtggcaggagccgccgcctgtgaagcaggtgaagccgctgcctgcgcccctggatggacagcggaagaagcgaggcggccgcaggtaccgcaagatgaaggagcggctggggctgacggagatccggaagcaggccaaccgtatgagcttcggagagatcgaggaggacgcctaccaggaggacctgggattcagcctgggccacctgggcaagtcgggcagtgggcgtgtgcggcagacacaggtaaacgaggccaccaaggccaggatctccaagacgctgcagcggaccctgcagaagcagagcgtcgtatatggcgggaagtccaccatccgcgaccgctcctcgggcacggcctccagcgtggccttcaccccactccagggcctggagattgtgaacccacaggcggcagagaagaaggtggctgaggccaaccagaagtatttctccagcatggctgagttcctcaaggtcaagggcgagaagagtggccttatgtccacctgaatgactgcgtgtgtccaaggtggcttcccactgaagggacacagaggtccagtccttctgaagggctaggatcgggttctggcagggagaacctgccctgccactggccccattgctgggactgcccagggaggaggccttggaagagtccggcctggcctcccccaggaccgagatcaccgcccagtatgggctagagcaggtcttcatcatgccttgtcttttttaactgagaaaggagattttttgaaaagagtacaattaaaaggacattgtcaaga

SEQ ID NO: 416492 - DNA, 2536 bp, Homo sapiens
acgtccacccgcgaatccctgcttaaaggccttgctttcttgtctaacgccgcaaccagtcctctgagttgccaacgtctttcttcttgtctcgacgccccgtcgtccggccacagcgattctctgcttagcaggatcggtccacagcgggacgtgagtccttttcctcctcgcggcttaccgcctctctccgcctagtgccaggtgctaataaagttgttgtttcaaatgcggccaggaacatcgcgagcggggaccaatcagagagtagctttgcctctataacggcgcgagagtgagacgtcatcggtgagcgactaacgctagaaacagtggtgcgcggagaggagaggcctcgggatgtctctggcagatgagctcttagctgatctcgaagaggcagcagaagaggaggaaggaggaagctatggggaggaagaagaggagccagcgatcgaggatgtgcaggaggagacacagctggatctttccggggattcagtcaagaccatcgccaagctatgggatagtaagatgtttgctgagattatgatgaagattgaggagtatatcagcaagcaagccaaagcttcagaagtgatgggaccagtggaggccgcgcctgaataccgcgtcatcgtggatgccaacaacctgaccgtggagatcgaaaacgagctgagtgagtgctggggggcaggcggagacagccccgtgtgacgtccctcacgccccctctcccttccccactggcctttcccagggtcctgcccctaagcccaagctcagatcgaggttgacctgctgtcacagagtggctgaaataagaaggaagtgcgttctctcgcgtatgagtctgaggagcactcggggatggtgtggccgcttggctgcctgtagggccccggctctttccatcctgttggtcggccacctgcctcacggtgcgaggtgactgccccacctccagccatcacctccgcattcccaccagcaaggcgcttcttttctttaagaacatgtcactgcagctcacgttttacagaccagaactaattcccctggtcacacctagcgacatcatccataagttcatccgggataagtactcaaagagattccctgaactggagtccttggtccccaatgcactggattacatccgcacggtcaaggagctgggcaacagcctggacaagtgcaagaacaatgagaacctgcagcagatcctcaccaatgccaccatcatggtcgtcagcgtcaccgcctccaccacccaggggcagcagctgtcggaggaggagctggagcggctggaggaggcctgcgacatggcgctggagctgaacgcctccaagcaccgcatctacgagtatgtggagtcccggatgtccttcatcgcacccaacctgtccatcattatcggggcatccacggccgccaagatcatgggtgtggccggcggcctgaccaacctctccaagatgcccgcctgcaacatcatgctgctcggggcccagcgcaagacgctgtcgggcttctcgtctacctcagtgctgccccacaccggctacatctaccacagtgacatcgtgcagtccctgccaccggatctgcggcggaaagcggcccggctggtggccgccaagtgcacactggcagcccgtgtggacagtttccacgagagcacagaagggaaggtgggctacgaactgaaggatgagatcgagcgcaaattcgacaagtggcaggagccgccgcctgtgaagcaggtgaagccgctgcctgcgcccctggatggacagcggaagaagcgaggcggccgcaggtaccgcaagatgaaggagcggctggggctgacggagatccggaagcaggccaaccgtatgagcttcggagagatcgaggaggacgcctaccaggaggacctgggattcagcctgggccacctgggcaagtcgggcagtgggcgtgtgcggcagacacaggtaaacgaggccaccaaggccaggatctccaagacgctgcagcggaccctgcagaagcagagcgtcgtatatggcgggaagtccaccatccgcgaccgctcctcgggcacggcctccagcgtggccttcaccccactccagggcctggagattgtgaacccacaggcggcagagaagaaggtggctgaggccaaccagaagtatttctccagcatggctgagttcctcaaggtcaagggcgagaagagtggccttatgtccacctgaatgactgcgtgtgtccaaggtggcttcccactgaagggacacagaggtccagtccttctgaagggctaggatcgggttctggcagggagaacctgccctgccactggccccattgctgggactgcccagggaggaggccttggaagagtccggcctggcctcccccaggaccgagatcaccgcccagtatgggctagagcaggtcttcatcatgccttgtcttttttaactgagaaaggagattttttgaaaagagtacaattaaaaggacattgtcaaga

SEQ ID NO: 416493 - DNA, 1293 bp, Homo sapiens
  misc_feature (1184)..(1186): n is a, c, g, or t
  misc_feature (1193)..(1193): n is a, c, g, or t
acgtccacccgcgaatccctgcttaaaggccttgctttcttgtctaacgccgcaaccagtcctctgagttgccaacgtctttcttcttgtctcgacgccccgtcgtccggccacagcgattctctgcttagcaggatcggtccacagcgggacgtgagtccttttcctcctcgcggcttaccgcctctctccgcctagtgccaggtgctaataaagttgttgtttcaaatgcggccaggaacatcgcgagcggggaccaatcagagagtagctttgcctctataacggcgcgagagtgagacgtcatcggtgagcgactaacgctagaaacagtggtgcgcggagaggagaggcctcgggatgtctctggcagatgagctcttagctgatctcgaagaggcagcagaagaggaggaaggaggaagctatggggaggaagaagaggagccagcgatcgaggatgtgcaggaggagacacagctggatctttccggggattcagtcaagaccatcgccaagctatgggatagtaagatgtttgctgagattatgatgaagattgaggagtatatcagcaagcaagccaaagcttcagaagtgatgggaccagtggaggccgcgcctgaataccgcgtcatcgtggatgccaacaacctgaccgtggagatcgaaaacgagctgaacatcatccataagttcatccgggataagtactcaaagagattccctgaactggagtccttggtccccaatgcactggattacatccgcacggtcaaggagctgggcaacagcctggacaagtgcaagaacaatgagaacctgcagcagatcctcaccaatgccaccatcatggtcgtcagcgtcaccgcctccaccacccaggggcagcagctgtcggaggaggagctggagcggctggaggaggcctgcgacatggcgctggagctgaacgcctccaagcaccgcatctacgagtatgtggagtcccggatgtccttcatcgcacccaacctgtccatcattatcggggcatccacggccgccaagatcatgggtgtggccggcggcctgaccaacctctccaagatgcccgcctgcaacatcatgctgctcggggcccagcgcaagacgctgtcgggcttctcgtctacctcagtgctgccccccgggtttcccggggnnntgggccngcccgattttgggaagccccgtgggccctcaactcgccgtgggttcccacaggggggggccaggacagcacaaggccggcagaatcgcctaacgagtgag

SEQ ID NO: 416494 - DNA, 2065 bp, Homo sapiens
acgtccacccgcgaatccctgcttaaaggccttgctttcttgtctaacgccgcaaccagtcctctgagttgccaacgtctttcttcttgtctcgacgccccgtcgtccggccacagcgattctctgcttagcaggatcggtccacagcgggacgtgagtccttttcctcctcgcggcttaccgcctctctccgcctagtgccaggtgctaataaagttgttgtttcaaatgcggccaggaacatcgcgagcggggaccaatcagagagtagctttgcctctataacggcgcgagagtgagacgtcatcggtgagcgactaacgctagaaacagtggtgcgcggagaggagaggcctcgggatgtctctggcagatgagctcttagctgatctcgaagaggcagcagaagaggaggaaggaggaagctatggggaggaagaagaggagccagcgatcgaggatgtgcaggaggagacacagctggatctttccggggattcagtcaagaccatcgccaagctatgggatagtaagatgtttgctgagattatgatgaagattgaggagtatatcagcaagcaagccaaagcttcagaagtgatgggaccagtggaggccgcgcctgaataccgcgtcatcgtggatgccaacaacctgaccgtggagatcgaaaacgagctgaacatcatccataagttcatccgggataagtactcaaagagattccctgaactggagtccttggtccccaatgcactggattacatccgcacggtcaaggagctgggcaacagcctggacaagtgcaagaacaatgagaacctgcagcagatcctcaccaatgccaccatcatggtcgtcagcgtcaccgcctccaccacccaggggcagcagctgtcggaggaggagctggagcggctggaggaggcctgcgacatggcgctggagctgaacgcctccaagcaccgcatctacgagtatgtggagtcccggatgtccttcatcgcacccaacctgtccatcattatcggggcatccacggccgccaagatcatgggctgtcgggcttctcgtctacctcagtgctgccccacaccggctacatctaccacagtgacatcgtgcagtccctgccaccggatctgcggcggaaagcggcccggctggtggccgccaagtgcacactggcagcccgtgtggacagtttccacgagagcacagaagggaaggtgggctacgaactgaaggatgagatcgagcgcaaattcgacaagtggcaggagccgccgcctgtgaagcaggtgaagccgctgcctgcgcccctggatggacagcggaagaagcgaggcggccgcaggtaccgcaagatgaaggagcggctggggctgacggagatccggaagcaggccaaccgtatgagcttcggagagatcgaggaggacgcctaccaggaggacctgggattcagcctgggccacctgggcaagtcgggcagtgggcgtgtgcggcagacacaggtaaacgaggccaccaaggccaggatctccaagacgctgcagcggaccctgcagaagcagagcgtcgtatatggcgggaagtccaccatccgcgaccgctcctcgggcacggcctccagcgtggccttcaccccactccagggcctggagattgtgaacccacaggcggcagagaagaaggtggctgaggccaaccagaagtatttctccagcatggctgagttcctcaaggtcaagggcgagaagagtggccttatgtccacctgaatgactgcgtgtgtccaaggtggcttcccactgaagggacacagaggtccagtccttctgaagggctaggatcgggttctggcagggagaacctgccctgccactggccccattgctgggactgcccagggaggaggccttggaagagtccggcctggcctcccccaggaccgagatcaccgcccagtatgggctagagcaggtcttcatcatgccttgtcttttttaactgagaaaggagattttttgaaaagagtacaattaaaaggacattgtcaaga

SEQ ID NO: 416495 - DNA, 2075 bp, Homo sapiens
acgtccacccgcgaatccctgcttaaaggccttgctttcttgtctaacgccgcaaccagtcctctgagttgccaacgtctttcttcttgtctcgacgccccgtcgtccggccacagcgattctctgcttagcaggatcggtccacagcgggacgtgagtccttttcctcctcgcggcttaccgcctctctccgcctagtgccaggtgctaataaagttgttgtttcaaatgcggccaggaacatcgcgagcggggaccaatcagagagtagctttgcctctataacggcgcgagagtgagacgtcatcggtgagcgactaacgctagaaacagtggtgcgcggagaggagaggcctcgggatgtctctggcagatgagctcttagctgatctcgaagaggcagcagaagaggaggaaggaggaagctatggggaggaagaagaggagccagcgatcgaggatgtgcaggaggagacacagctggatctttccggggattcagtcaagaccatcgccaagctatgggatagtaagatgtttgctgagattatgatgaagattgaggagtatatcagcaagcaagccaaagcttcagaagtgatgggaccagtggaggccgcgcctgaataccgcgtcatcgtggatgccaacaacctgaccgtggagatcgaaaacgagctgaacatcatccataagttcatccgggataagtactcaaagagattccctgaactggagtccttggtccccaatgcactggattacatccgcacggtcaaggagctgggcaacagcctggacaagtgcaagaacaatgagaacctgcagcagatcctcaccaatgccaccatcatggtcgtcagcgtcaccgcctccaccacccaggggcagcagctgtcggaggaggagctggagcggctggaggaggcctgcgacatggcgctggagctgaacgcctccaagcaccgcatctacgagtatgtggagtcccggatgtccttcatcgcacccaacctctccaagatgcccgcctgcaacatcatgctgctcggggcccagcgcaagacgctgtcgggcttctcgtctacctcagtgctgccccacaccggctacatctaccacagtgacatcgtgcagtccctgccaccggatctgcggcggaaagcggcccggctggtggccgccaagtgcacactggcagcccgtgtggacagtttccacgagagcacagaagggaaggtgggctacgaactgaaggatgagatcgagcgcaaattcgacaagtggcaggagccgccgcctgtgaagcaggtgaagccgctgcctgcgcccctggatggacagcggaagaagcgaggcggccgcaggtaccgcaagatgaaggagcggctggggctgacggagatccggaagcaggccaaccgtatgagcttcggagagatcgaggaggacgcctaccaggaggacctgggattcagcctgggccacctgggcaagtcgggcagtgggcgtgtgcggcagacacaggtaaacgaggccaccaaggccaggatctccaagacgctgcagcggaccctgcagaagcagagcgtcgtatatggcgggaagtccaccatccgcgaccgctcctcgggcacggcctccagcgtggccttcaccccactccagggcctggagattgtgaacccacaggcggcagagaagaaggtggctgaggccaaccagaagtatttctccagcatggctgagttcctcaaggtcaagggcgagaagagtggccttatgtccacctgaatgactgcgtgtgtccaaggtggcttcccactgaagggacacagaggtccagtccttctgaagggctaggatcgggttctggcagggagaacctgccctgccactggccccattgctgggactgcccagggaggaggccttggaagagtccggcctggcctcccccaggaccgagatcaccgcccagtatgggctagagcaggtcttcatcatgccttgtcttttttaactgagaaaggagattttttgaaaagagtacaattaaaaggacattgtcaaga

SEQ ID NO: 416496 - DNA, 1987 bp, Homo sapiens
acgtccacccgcgaatccctgcttaaaggccttgctttcttgtctaacgccgcaaccagtcctctgagttgccaacgtctttcttcttgtctcgacgccccgtcgtccggccacagcgattctctgcttagcaggatcggtccacagcgggacgtgagtccttttcctcctcgcggcttaccgcctctctccgcctagtgccaggtgctaataaagttgttgtttcaaatgcggccaggaacatcgcgagcggggaccaatcagagagtagctttgcctctataacggcgcgagagtgagacgtcatcggtgagcgactaacgctagaaacagtggtgcgcggagaggagaggcctcgggatgtctctggcagatgagctcttagctgatctcgaagaggcagcagaagaggaggaaggaggaagctatggggaggaagaagaggagccagcgatcgaggatgtgcaggaggagacacagctggatctttccggggattcagtcaagaccatcgccaagctatgggatagtaagatgtttgctgagattatgatgaagattgaggagtatatcagcaagcaagccaaagcttcagaagtgatgggaccagtggaggccgcgcctgaataccgcgtcatcgtggatgccaacaacctgaccgtggagatcgaaaacgagctgaacatcatccataagttcatccgggataagtactcaaagagattccctgaactggagtccttggtccccaatgcatggagcggctggaggaggcctgcgacatggcgctggagctgaacgcctccaagcaccgcatctacgagtatgtggagtcccggatgtccttcatcgcacccaacctgtccatcattatcggggcatccacggccgccaagatcatgggtgtggccggcggcctgaccaacctctccaagatgcccgcctgcaacatcatgctgctcggggcccagcgcaagacgctgtcgggcttctcgtctacctcagtgctgccccacaccggctacatctaccacagtgacatcgtgcagtccctgccaccggatctgcggcggaaagcggcccggctggtggccgccaagtgcacactggcagcccgtgtggacagtttccacgagagcacagaagggaaggtgggctacgaactgaaggatgagatcgagcgcaaattcgacaagtggcaggagccgccgcctgtgaagcaggtgaagccgctgcctgcgcccctggatggacagcggaagaagcgaggcggccgcaggtaccgcaagatgaaggagcggctggggctgacggagatccggaagcaggccaaccgtatgagcttcggagagatcgaggaggacgcctaccaggaggacctgggattcagcctgggccacctgggcaagtcgggcagtgggcgtgtgcggcagacacaggtaaacgaggccaccaaggccaggatctccaagacgctgcagcggaccctgcagaagcagagcgtcgtatatggcgggaagtccaccatccgcgaccgctcctcgggcacggcctccagcgtggccttcaccccactccagggcctggagattgtgaacccacaggcggcagagaagaaggtggctgaggccaaccagaagtatttctccagcatggctgagttcctcaaggtcaagggcgagaagagtggccttatgtccacctgaatgactgcgtgtgtccaaggtggcttcccactgaagggacacagaggtccagtccttctgaagggctaggatcgggttctggcagggagaacctgccctgccactggccccattgctgggactgcccagggaggaggccttggaagagtccggcctggcctcccccaggaccgagatcaccgcccagtatgggctagagcaggtcttcatcatgccttgtcttttttaactgagaaaggagattttttgaaaagagtacaattaaaaggacattgtcaaga

SEQ ID NO: 416497 - DNA, 2088 bp, Homo sapiens
acgtccacccgcgaatccctgcttaaaggccttgctttcttgtctaacgccgcaaccagtcctctgagttgccaacgtctttcttcttgtctcgacgccccgtcgtccggccacagcgattctctgcttagcaggatcggtccacagcgggacgtgagtccttttcctcctcgcggcttaccgcctctctccgcctagtgccaggtgctaataaagttgttgtttcaaatgcggccaggaacatcgcgagcggggaccaatcagagagtagctttgcctctataacggcgcgagagtgagacgtcatcggtgagcgactaacgctagaaacagtggtgcgcggagaggagagggaacgctgctgtccctccccaggcctcgggatgtctctggcagatgagctcttagctgatctcgaagaggcagcagaagaggaggaaggaggaagctatggggaggaagaagaggagccagcgatcgaggatgtgcaggaggagacacagctggatctttccggggattcagtcaagaccatcgccaagctatgggatagtaagatgtttgctgagattatgatgaagattgaggagtatatcagcaagcaagccaaagcttcagaagtgatgggaccagtggaggccgcgcctgaataccgcgtcatcgtggatgccaacaacctgaccgtggagatcgaaaacgagctgaacatcatccataagttcatccgggataagtactcaaagagattccctgaactggagtccttggtccccaatgcactggattacatccgcacggtcaaggagctgggcaacagcctggacaagtgcaagaacaatgagaacctgcagcagatcctcaccaatgccaccatcatggtcgtcagcgtcaccgcctccaccacccaggggcagcagctgtcggaggaggagctggagcggctggaggaggcctgcgacatggcgctggagctgaacgcctccaagcaccgcatctacgagtatgtggagtcccggatgtccttcatcgcacccaacctgtccatcattatcggggcatccacggccgccaagatcatgggctgtcgggcttctcgtctacctcagtgctgccccacaccggctacatctaccacagtgacatcgtgcagtccctgccaccggatctgcggcggaaagcggcccggctggtggccgccaagtgcacactggcagcccgtgtggacagtttccacgagagcacagaagggaaggtgggctacgaactgaaggatgagatcgagcgcaaattcgacaagtggcaggagccgccgcctgtgaagcaggtgaagccgctgcctgcgcccctggatggacagcggaagaagcgaggcggccgcaggtaccgcaagatgaaggagcggctggggctgacggagatccggaagcaggccaaccgtatgagcttcggagagatcgaggaggacgcctaccaggaggacctgggattcagcctgggccacctgggcaagtcgggcagtgggcgtgtgcggcagacacaggtaaacgaggccaccaaggccaggatctccaagacgctgcagcggaccctgcagaagcagagcgtcgtatatggcgggaagtccaccatccgcgaccgctcctcgggcacggcctccagcgtggccttcaccccactccagggcctggagattgtgaacccacaggcggcagagaagaaggtggctgaggccaaccagaagtatttctccagcatggctgagttcctcaaggtcaagggcgagaagagtggccttatgtccacctgaatgactgcgtgtgtccaaggtggcttcccactgaagggacacagaggtccagtccttctgaagggctaggatcgggttctggcagggagaacctgccctgccactggccccattgctgggactgcccagggaggaggccttggaagagtccggcctggcctcccccaggaccgagatcaccgcccagtatgggctagagcaggtcttcatcatgccttgtcttttttaactgagaaaggagattttttgaaaagagtacaattaaaaggacattgtcaaga

SEQ ID NO: 416498 - DNA, 1219 bp, Homo sapiens
ctgtcttgtgaactgtcgtttgccaagcacccggcctggcacagcgttcaggtgttccgtgtccccttctcctttccctctccccatctcacccctggtctgggtgtgggggtgcagctgtgagtagcacagacaggacccctgccccgtggcgtggacattcttgttggggccgggtcaaagagacagtcaacaggtgaactctgtcctgcgtctagcggtgctaagtcaacaccaagaagaaaaagaaagggggtggcggtgaggcagcattaggtgctgatttaactaaggcacgtggatactcggggggcccgctcagaggaggcctgggtgggcagcccacgcgagcagctgcaggacctccccctcgccctccccaggtgggctacgaactgaaggatgagatcgagcgcaaattcgacaagtggcaggagccgccgcctgtgaagcaggtgaagccgctgcctgcgcccctggatggacagcggaagaagcgaggcggccgcaggtaccgcaagatgaaggagcggctggggctgacggagatccggaagcaggccaaccgtatgagcttcggagagatcgaggaggacgcctaccaggaggacctgggattcagcctgggccacctgggcaagtcgggcagtgggcgtgtgcggcagacacaggtaaacgaggccaccaaggccaggatctccaagacgctgcagcggaccctgcagaagcagagcgtcgtatatggcgggaagtccaccatccgcgaccgctcctcgggcacggcctccagcgtggccttcaccccactccagggcctggagattgtgaacccacaggcggcagagaagaaggtggctgaggccaaccagaagtatttctccagcatggctgagttcctcaaggtcaagggcgagaagagtggccttatgtccacctgaatgactgcgtgtgtccaaggtggcttcccactgaagggacacagaggtccagtccttctgaagggctaggatcgggttctggcagggagaacctgccctgccactggccccattgctgggactgcccagggaggaggccttggaagagtccggcctggcctcccccaggaccgagatcaccgcccagtatgggctagagcaggtcttcatcatgccttgtcttttttaactgagaaaggagattttttgaaaagagtacaattaaaaggacattgtcaaga

SEQ ID NO: 416499 - DNA, 915 bp, Homo sapiens
  misc_feature (858)..(858): n is a, c, g, or t
acgtccacccgcgaatccctgcttaaaggccttgctttcttgtctaacgccgcaaccagtcctctgagttgccaacgtctttcttcttgtctcgacgccccgtcgtccggccacagcgattctctgcttagcaggatcggtccacagcgggacgtgagtccttttcctcctcgcggcttaccgcctctctccgcctagtgccaggtgctaataaagttgttgtttcaaatgcggccaggaacatcgcgagcggggaccaatcagagagtagctttgcctctataacggcgcgagagtgagacgtcatcggtgagcgactaacgctagaaacagtggtgcgcggagaggagaggcctcgggatgtctctggcagatgagctcttagctgatctcgaagaggcagcagaagaggaggaaggaggaagctatggggaggaagaagaggagccagcgatcgaggatgtgcaggaggagacacagctggatctttccggggattcagtcaagaccatcgccaagctatgggatagtaagatgtttgctgagattatgatgaagattgaggagtatatcagcaagcaagccaaagcttcagaagtgatgggaccagtggaggccgcgcctgaataccgcgtcatcgtggatgccaacaacctgaccgtggagatcgaaaacgagctgaacatcatccataagttcatccgggataagtactcaaagagattccctgaactggagtccttggtccccaatgcactggattacatccgcacggtcaaggagctgggcaacagcctggacaagtgcaagaacaatgagaacctgcagcagatcctacttctcctatctctcccagtnctagctgctgcacactatactaatcacagcggcaacctgtcgacagtcagttaacca

SEQ ID NO: 416500 - DNA, 790 bp, Homo sapiens
acgtccacccgcgaatccctgcttaaaggccttgctttcttgtctaacgccgcaaccagtcctctgagttgccaacgtctttcttcttgtctcgacgccccgtcgtccggccacagcgattctctgcttagcaggatcggtccacagcgggacgtgagtccttttcctcctcgcggcttaccgcctctctccgcctagtgccaggtgctaataaagttgttgtttcaaatgcggccaggaacatcgcgagcggggaccaatcagagagtagctttgcctctataacggcgcgagagtgagacgtcatcggtgagcgactaacgctagaaacagtggtgcgcggagaggagaggcctcgggatgtctctggcagatgagctcttagctgatctcgaagaggcagcagaagaggaggaaggaggaagctatggggaggaagaagaggagccagcgatcgaggatgtgcaggaggagacacagctggatctttccggggattcagtcaagaccatcgccaagctatgggatagtaagatgtttgctgagattatgatgaagattgaggagtatatcagcaagcaagccaaagcttcagaaggtgcttcctcccactctgtgcccctccccatctcctgtctctcctgccaggccccctggctccctggctgcttgtggctgggtatatctccttctcagccttttccagagccttcttttttttttgtttcaccccaacccgttcccttttccactaaatatatattgcattgtaaagctcatgcttcttaag

SEQ ID NO: 416501 - DNA, 3603 bp, Homo sapiens
gctttgggcgggaccctgcagaggcggcggggctcctcctcccgctcctcctcggcctccccttcgggcgctctcgcgctaactgtgctcctccggggccctccgcctgctcccagccatggtggcctggcgctcggcgttccttgtctgcctcgctttctccttggccaccctggtccagcgaggatctggggactttgatgattttaacctggaggatgcagtgaaagaaacttcctcagtaaagcagccatgggaccacaccaccaccaccacaaccaataggccaggaaccaccagagctccggcaaaacctccaggtagtggattggacttggctgatgctttggatgatcaagatgatggccgcaggaaaccgggtataggaggaagagagagatggaaccatgtaaccaccacgaccaagaggccagtaaccaccagagctccagcaaatactttaggaaatgattttgacttggctgatgccctggatgatcgaaatgatcgagatgatggccgcaggaaaccaattgctggaggaggaggtttttcagacaaggatcttgaagacatagtagggggtggagaatacaaacctgacaagggtaaaggtgatggccggtacggcagcaatgacgaccctggatctggcatggtggcagagcctggcaccattgccggggtggccagcgccctggccatggccctcatcggtgccgtctccagctacatctcctaccagcagaagaagttctgcttcagcattcagcagggtctcaacgcagactacgtgaagggagagaacctggaagccgtggtatgtgaggaaccccaagtgaaatactccacgttgcacacgcagtctgcagagccgccgccgccgcccgaaccagcccggatctgagggccctgtccagctgcaggcatgcacaatggtgccaccgcttgtcacccggctccccccaccccttcatttggacccgcagctgctgtgctgctctgtgccatcggctccttgttggtctgagtttcccggatgagctctgggtgtttgtgagtttggtttctctgccctgccccaagcgtgctgagacttggtgccgaaattcaagagccagctctgatagaaagccagcaccagcctcgggagctgctgagccaccaactcccaaagccagcctgcctccagctttactgagcacaggatgcgggggccaagatgatgctgaggcctgatgacatttatgcttaggggacaagagtttgaactcaagggactgtgacccctgcacactggagtggctcattgtggcaggtttctgccaatagacagcccctgacagtggcctcaaggagctgcaggtggggggctcagcctgcacccacttggagcccctgcaaggagcgaaccggtcagcaccaagtaacaccacacacacgcagcacccaggatgatggtttcacttcagtcttccccatcccaggttttatgttgctgggcttccggagagccggtccaagcggaggctttcagtgatttaagtacaaacatgcatctcgtgatagtcctgccttgagagcttaggaatcttccggataagtatgaagcaattcgtaggcctgtttcccatctgattccatagggggctgggtgtggccttcgggttgacatgagaaaggtctttagcaatcatttctgcaccggagatgagttttatcctgtgttggggagaggtgctcaccctccaccctgtgtccctgttttggtagcaagagtgaccgatgtcaagaacgagcatcaaagccagaatcctgcttgtttgcttaaaaatgtaattgggggcggcgggggaggagaggggaaagagacattcgcttggtttagtgaaacgcaggtgactttgtagctctgtggtcagcctacttgtctgctctgagggagagtgcgtggggagccatgctcaccgtggcaaacacaggaaccccatgactcgcccctcacctggcgtggagctgcctggtttgggctggagcagagctggtttcctggaatgttcctttggcccacatatggttctgtcccggtgagctctgttgtcagaggctcacgggacagaaccacatgctagggtctagggcccctgtctactgatagtcagtttgctgtgtcagaaagcacttctgaaagcagatatgagtcaccagacaggcaggatcttacaaaactcacgggcctctttggtctgcatgatggccccatgcgtttcataggctgtccactgagcgggattgtctgctgagtgggatgagccaactccagtttcttaaggaaaccactggaatctgcagcccccacatgcatctgtctaacgcatgcctcgtgttcgttttgcaaacatgcctgtggtggagggtggtcagttgtagccctgtgcgtctcaaggctgccttgtgaggccattcccagtgcgtgcccttgagctccttaccaccccttttcctgctcggccctttaatccctgacagacctggactgtgtggctgaagggggacctgcagcactgcagaaatgcctctgcgtggtgccatgaaggaaagaaaccttggcctggtctcgagaagcttcccatgcttcaggaagttagtaagggtggggtggcttgcaggattggcctgtttccagggcctcccacactcattggccagattgtgaactttgtcaggcttgtccctccctgataccaagtatgtcgagaaccgatggccccaccctctggctggtgctgggccggaggtggctatggaggattttggcatgcgtggcctgtcgccacctggacagcgtgacctcaggggttgtccactttacctttatggtgaggcctgtcggatggctaagtccttgaaaccctagagctgtgacgtagaatatgtgctgtctgtgagaccgtgttcccaggagcactgactgcagttgagagagacccattttgctctcccttaccgccccccgccccgggtgctttctgcacaaagcctagagcctggcactcaagcccaccggtggcagctcctagtgactggacatgcctggaagacccctcagccttctgtttgcagaacgttcatttcaggagcttctccttcccacagacatcttacacttgctcgacactgccacctgcagaagcctggcgggctctggtcaccatgtgtctatctgaaggttgcactggccagcatgggcctgtcccaagcgagaggggagacacagtggactgaaaggactggttgaaagtggccaatctctgtcagcttaatttggcagagaaaatttgtaacaactctgagcacatgctgggtgaagtcacagctcaaggaaagataaagctgggcggaaggaggtgtgcgtggcttctggggtgggacccagaggggaggctctgggacaggggctggggttcagtgccagggccctgaggaagaaatggggactgatctcaaaattccagaattccctgtacatctgttcacgtgcttgtgtccaggtgtgacttgtaaactgtctagtgtttgcattaaataaaatggcaccgagca

SEQ ID NO: 416502 - DNA, 510 bp, Homo sapiens
tggcgggctctggtcaccaggcttctgcaggtggcagtgtcgagcaagtgtaagatgtctgtgggaaggagaagctcctgaaatgaacgttctgcagaagcctggcgggctctggtcaccatgtgtctatctgaaggttgcactggccagcatgggcctgtcccaagcgagaggggagacacagtggactgaaaggactggttgaaagtggccaatctctgtcagcttaatttggcagagaaaatttgtaacaactctgagcacatgctgggtgaagtcacagctcaaggaaagataaagctgggcggaaggaggtgtgcgtggcttctggggtgggacccagaggggaggctctgggacaggggctggggttcagtgccagggccctgaggaagaaatggggactgatctcaaaattccagaattccctgtacatctgttcacgtgcttgtgtccaggtgtgacttgtaaactgtctagtgtttgcattaaataaaatggcaccgagca

SEQ ID NO: 416503 - DNA, 574 bp, Homo sapiens
gggctctggtcaccatgtgtctatctgaaggttgcactggccagcatgggcctgtcccaagcgagaggggagacacagtggactgaaaggactggttgaaagtggccaatctctgtcagcttaatttggcagagaaaatttgtaacaactctgagcacatgctgtgacgtagaatatgtgctgtctgtgagaccgtgttcccaggagcactgactgcagttgagagagacccattttgctctcccttaccgccccccgccccgggtgctttctgcacaaagcctagagcctggcactcaagcccaccggtggcagctcctagtgactggacatgcctggaagacccctcagccttctgtttgcagaacgttcatttcagtgtgcgtggcttctggggtgggacccagaggggaggctctgggacaggggctggggttcagtgccagggccctgaggaagaaatggggactgatctcaaaattccagaattccctgtacatctgttcacgtgcttgtgtccaggtgtgacttgtaaactgtctagtgtttgcattaaataaaatggcaccgagca

SEQ ID NO: 416504 - DNA, 411 bp, Homo sapiens
ccatgtccacctcaccaccctcagcctccaaagaaaagtgagcagaactcttctcatttaaacctatatcattttgtcatccttttcagtgtgattctctggagctcctagctagaggggcctcaaggaccaagacaaggatattctactcacaatgtgacttccccaagtcataaagtagctgctgtgttttgttactaaacgtgctccccttgctgtcctccctctcccttttagagccatgggaccacaccaccaccaccacaaccaataggccaggaaccaccagagctccggcaaaacctccagggagttccctctggggtagcatgcaagtgaactacctacagttttaagccccatgtgtgcagaaacaatcaaggcatccatgtgaacactgagtttaacttt

SEQ ID NO: 416505 - DNA, 3529 bp, Homo sapiens
aacggctgatcggctccggaatttgggattcgctgctcccagccatggtggcctggcgctcggcgttccttgtctgcctcgctttctccttggccaccctggtccagcgaggatctggggactttgatgattttaacctggaggatgcagtgaaagaaacttcctcagtaaagcagccatgggaccacaccaccaccaccacaaccaataggccaggaaccaccagagctccggcaaaacctccaggtagtggattggacttggctgatgctttggatgatcaagatgatggccgcaggaaaccgggtataggaggaagagagagatggaaccatgtaaccaccacgaccaagaggccagtaaccaccagagctccagcaaatactttaggaaatgattttgacttggctgatgccctggatgatcgaaatgatcgagatgatggccgcaggaaaccaattgctggaggaggaggtttttcagacaaggatcttgaagacatagtagggggtggagaatacaaacctgacaagggtaaaggtgatggccggtacggcagcaatgacgaccctggatctggcatggtggcagagcctggcaccattgccggggtggccagcgccctggccatggccctcatcggtgccgtctccagctacatctcctaccagcagaagaagttctgcttcagcattcagcagggtctcaacgcagactacgtgaagggagagaacctggaagccgtggtatgtgaggaaccccaagtgaaatactccacgttgcacacgcagtctgcagagccgccgccgccgcccgaaccagcccggatctgagggccctgtccagctgcaggcatgcacaatggtgccaccgcttgtcacccggctccccccaccccttcatttggacccgcagctgctgtgctgctctgtgccatcggctccttgttggtctgagtttcccggatgagctctgggtgtttgtgagtttggtttctctgccctgccccaagcgtgctgagacttggtgccgaaattcaagagccagctctgatagaaagccagcaccagcctcgggagctgctgagccaccaactcccaaagccagcctgcctccagctttactgagcacaggatgcgggggccaagatgatgctgaggcctgatgacatttatgcttaggggacaagagtttgaactcaagggactgtgacccctgcacactggagtggctcattgtggcaggtttctgccaatagacagcccctgacagtggcctcaaggagctgcaggtggggggctcagcctgcacccacttggagcccctgcaaggagcgaaccggtcagcaccaagtaacaccacacacacgcagcacccaggatgatggtttcacttcagtcttccccatcccaggttttatgttgctgggcttccggagagccggtccaagcggaggctttcagtgatttaagtacaaacatgcatctcgtgatagtcctgccttgagagcttaggaatcttccggataagtatgaagcaattcgtaggcctgtttcccatctgattccatagggggctgggtgtggccttcgggttgacatgagaaaggtctttagcaatcatttctgcaccggagatgagttttatcctgtgttggggagaggtgctcaccctccaccctgtgtccctgttttggtagcaagagtgaccgatgtcaagaacgagcatcaaagccagaatcctgcttgtttgcttaaaaatgtaattgggggcggcgggggaggagaggggaaagagacattcgcttggtttagtgaaacgcaggtgactttgtagctctgtggtcagcctacttgtctgctctgagggagagtgcgtggggagccatgctcaccgtggcaaacacaggaaccccatgactcgcccctcacctggcgtggagctgcctggtttgggctggagcagagctggtttcctggaatgttcctttggcccacatatggttctgtcccggtgagctctgttgtcagaggctcacgggacagaaccacatgctagggtctagggcccctgtctactgatagtcagtttgctgtgtcagaaagcacttctgaaagcagatatgagtcaccagacaggcaggatcttacaaaactcacgggcctctttggtctgcatgatggccccatgcgtttcataggctgtccactgagcgggattgtctgctgagtgggatgagccaactccagtttcttaaggaaaccactggaatctgcagcccccacatgcatctgtctaacgcatgcctcgtgttcgttttgcaaacatgcctgtggtggagggtggtcagttgtagccctgtgcgtctcaaggctgccttgtgaggccattcccagtgcgtgcccttgagctccttaccaccccttttcctgctcggccctttaatccctgacagacctggactgtgtggctgaagggggacctgcagcactgcagaaatgcctctgcgtggtgccatgaaggaaagaaaccttggcctggtctcgagaagcttcccatgcttcaggaagttagtaagggtggggtggcttgcaggattggcctgtttccagggcctcccacactcattggccagattgtgaactttgtcaggcttgtccctccctgataccaagtatgtcgagaaccgatggccccaccctctggctggtgctgggccggaggtggctatggaggattttggcatgcgtggcctgtcgccacctggacagcgtgacctcaggggttgtccactttacctttatggtgaggcctgtcggatggctaagtccttgaaaccctagagctgtgacgtagaatatgtgctgtctgtgagaccgtgttcccaggagcactgactgcagttgagagagacccattttgctctcccttaccgccccccgccccgggtgctttctgcacaaagcctagagcctggcactcaagcccaccggtggcagctcctagtgactggacatgcctggaagacccctcagccttctgtttgcagaacgttcatttcaggagcttctccttcccacagacatcttacacttgctcgacactgccacctgcagaagcctggcgggctctggtcaccatgtgtctatctgaaggttgcactggccagcatgggcctgtcccaagcgagaggggagacacagtggactgaaaggactggttgaaagtggccaatctctgtcagcttaatttggcagagaaaatttgtaacaactctgagcacatgctgggtgaagtcacagctcaaggaaagataaagctgggcggaaggaggtgtgcgtggcttctggggtgggacccagaggggaggctctgggacaggggctggggttcagtgccagggccctgaggaagaaatggggactgatctcaaaattccagaattccctgtacatctgttcacgtgcttgtgtccaggtgtgacttgtaaactgtctagtgtttgcattaaataaaatggcaccgagca

SEQ ID NO: 416506 - DNA, 3439 bp, Homo sapiens
acctcctaccccacgagcgaggatctggggactttgatgattttaacctggaggatgcagtgaaagaaacttcctcagtaaagcagccatgggaccacaccaccaccaccacaaccaataggccaggaaccaccagagctccggcaaaacctccaggtagtggattggacttggctgatgctttggatgatcaagatgatggccgcaggaaaccgggtataggaggaagagagagatggaaccatgtaaccaccacgaccaagaggccagtaaccaccagagctccagcaaatactttaggaaatgattttgacttggctgatgccctggatgatcgaaatgatcgagatgatggccgcaggaaaccaattgctggaggaggaggtttttcagacaaggatcttgaagacatagtagggggtggagaatacaaacctgacaagggtaaaggtgatggccggtacggcagcaatgacgaccctggatctggcatggtggcagagcctggcaccattgccggggtggccagcgccctggccatggccctcatcggtgccgtctccagctacatctcctaccagcagaagaagttctgcttcagcattcagcagggtctcaacgcagactacgtgaagggagagaacctggaagccgtggtatgtgaggaaccccaagtgaaatactccacgttgcacacgcagtctgcagagccgccgccgccgcccgaaccagcccggatctgagggccctgtccagctgcaggcatgcacaatggtgccaccgcttgtcacccggctccccccaccccttcatttggacccgcagctgctgtgctgctctgtgccatcggctccttgttggtctgagtttcccggatgagctctgggtgtttgtgagtttggtttctctgccctgccccaagcgtgctgagacttggtgccgaaattcaagagccagctctgatagaaagccagcaccagcctcgggagctgctgagccaccaactcccaaagccagcctgcctccagctttactgagcacaggatgcgggggccaagatgatgctgaggcctgatgacatttatgcttaggggacaagagtttgaactcaagggactgtgacccctgcacactggagtggctcattgtggcaggtttctgccaatagacagcccctgacagtggcctcaaggagctgcaggtggggggctcagcctgcacccacttggagcccctgcaaggagcgaaccggtcagcaccaagtaacaccacacacacgcagcacccaggatgatggtttcacttcagtcttccccatcccaggttttatgttgctgggcttccggagagccggtccaagcggaggctttcagtgatttaagtacaaacatgcatctcgtgatagtcctgccttgagagcttaggaatcttccggataagtatgaagcaattcgtaggcctgtttcccatctgattccatagggggctgggtgtggccttcgggttgacatgagaaaggtctttagcaatcatttctgcaccggagatgagttttatcctgtgttggggagaggtgctcaccctccaccctgtgtccctgttttggtagcaagagtgaccgatgtcaagaacgagcatcaaagccagaatcctgcttgtttgcttaaaaatgtaattgggggcggcgggggaggagaggggaaagagacattcgcttggtttagtgaaacgcaggtgactttgtagctctgtggtcagcctacttgtctgctctgagggagagtgcgtggggagccatgctcaccgtggcaaacacaggaaccccatgactcgcccctcacctggcgtggagctgcctggtttgggctggagcagagctggtttcctggaatgttcctttggcccacatatggttctgtcccggtgagctctgttgtcagaggctcacgggacagaaccacatgctagggtctagggcccctgtctactgatagtcagtttgctgtgtcagaaagcacttctgaaagcagatatgagtcaccagacaggcaggatcttacaaaactcacgggcctctttggtctgcatgatggccccatgcgtttcataggctgtccactgagcgggattgtctgctgagtgggatgagccaactccagtttcttaaggaaaccactggaatctgcagcccccacatgcatctgtctaacgcatgcctcgtgttcgttttgcaaacatgcctgtggtggagggtggtcagttgtagccctgtgcgtctcaaggctgccttgtgaggccattcccagtgcgtgcccttgagctccttaccaccccttttcctgctcggccctttaatccctgacagacctggactgtgtggctgaagggggacctgcagcactgcagaaatgcctctgcgtggtgccatgaaggaaagaaaccttggcctggtctcgagaagcttcccatgcttcaggaagttagtaagggtggggtggcttgcaggattggcctgtttccagggcctcccacactcattggccagattgtgaactttgtcaggcttgtccctccctgataccaagtatgtcgagaaccgatggccccaccctctggctggtgctgggccggaggtggctatggaggattttggcatgcgtggcctgtcgccacctggacagcgtgacctcaggggttgtccactttacctttatggtgaggcctgtcggatggctaagtccttgaaaccctagagctgtgacgtagaatatgtgctgtctgtgagaccgtgttcccaggagcactgactgcagttgagagagacccattttgctctcccttaccgccccccgccccgggtgctttctgcacaaagcctagagcctggcactcaagcccaccggtggcagctcctagtgactggacatgcctggaagacccctcagccttctgtttgcagaacgttcatttcaggagcttctccttcccacagacatcttacacttgctcgacactgccacctgcagaagcctggcgggctctggtcaccatgtgtctatctgaaggttgcactggccagcatgggcctgtcccaagcgagaggggagacacagtggactgaaaggactggttgaaagtggccaatctctgtcagcttaatttggcagagaaaatttgtaacaactctgagcacatgctgggtgaagtcacagctcaaggaaagataaagctgggcggaaggaggtgtgcgtggcttctggggtgggacccagaggggaggctctgggacaggggctggggttcagtgccagggccctgaggaagaaatggggactgatctcaaaattccagaattccctgtacatctgttcacgtgcttgtgtccaggtgtgacttgtaaactgtctagtgtttgcattaaataaaatggcaccgagca

SEQ ID NO: 416507 - DNA, 3456 bp, Homo sapiens
gctttgggcgggaccctgcagaggcggcggggctcctcctcccgctcctcctcggcctccccttcgggcgctctcgcgctaactgtgctcctccggggccctccgcctgctcccagccatggtggcctggcgctcggcgttccttgtctgcctcgctttctccttggccaccctggtccagcgaggatctggggactttgatgattttaacctggaggatgcagtgaaagaaacttcctcagtaaagcagagatggaaccatgtaaccaccacgaccaagaggccagtaaccaccagagctccagcaaatactttaggaaatgattttgacttggctgatgccctggatgatcgaaatgatcgagatgatggccgcaggaaaccaattgctggaggaggaggtttttcagacaaggatcttgaagacatagtagggggtggagaatacaaacctgacaagggtaaaggtgatggccggtacggcagcaatgacgaccctggatctggcatggtggcagagcctggcaccattgccggggtggccagcgccctggccatggccctcatcggtgccgtctccagctacatctcctaccagcagaagaagttctgcttcagcattcagcagggtctcaacgcagactacgtgaagggagagaacctggaagccgtggtatgtgaggaaccccaagtgaaatactccacgttgcacacgcagtctgcagagccgccgccgccgcccgaaccagcccggatctgagggccctgtccagctgcaggcatgcacaatggtgccaccgcttgtcacccggctccccccaccccttcatttggacccgcagctgctgtgctgctctgtgccatcggctccttgttggtctgagtttcccggatgagctctgggtgtttgtgagtttggtttctctgccctgccccaagcgtgctgagacttggtgccgaaattcaagagccagctctgatagaaagccagcaccagcctcgggagctgctgagccaccaactcccaaagccagcctgcctccagctttactgagcacaggatgcgggggccaagatgatgctgaggcctgatgacatttatgcttaggggacaagagtttgaactcaagggactgtgacccctgcacactggagtggctcattgtggcaggtttctgccaatagacagcccctgacagtggcctcaaggagctgcaggtggggggctcagcctgcacccacttggagcccctgcaaggagcgaaccggtcagcaccaagtaacaccacacacacgcagcacccaggatgatggtttcacttcagtcttccccatcccaggttttatgttgctgggcttccggagagccggtccaagcggaggctttcagtgatttaagtacaaacatgcatctcgtgatagtcctgccttgagagcttaggaatcttccggataagtatgaagcaattcgtaggcctgtttcccatctgattccatagggggctgggtgtggccttcgggttgacatgagaaaggtctttagcaatcatttctgcaccggagatgagttttatcctgtgttggggagaggtgctcaccctccaccctgtgtccctgttttggtagcaagagtgaccgatgtcaagaacgagcatcaaagccagaatcctgcttgtttgcttaaaaatgtaattgggggcggcgggggaggagaggggaaagagacattcgcttggtttagtgaaacgcaggtgactttgtagctctgtggtcagcctacttgtctgctctgagggagagtgcgtggggagccatgctcaccgtggcaaacacaggaaccccatgactcgcccctcacctggcgtggagctgcctggtttgggctggagcagagctggtttcctggaatgttcctttggcccacatatggttctgtcccggtgagctctgttgtcagaggctcacgggacagaaccacatgctagggtctagggcccctgtctactgatagtcagtttgctgtgtcagaaagcacttctgaaagcagatatgagtcaccagacaggcaggatcttacaaaactcacgggcctctttggtctgcatgatggccccatgcgtttcataggctgtccactgagcgggattgtctgctgagtgggatgagccaactccagtttcttaaggaaaccactggaatctgcagcccccacatgcatctgtctaacgcatgcctcgtgttcgttttgcaaacatgcctgtggtggagggtggtcagttgtagccctgtgcgtctcaaggctgccttgtgaggccattcccagtgcgtgcccttgagctccttaccaccccttttcctgctcggccctttaatccctgacagacctggactgtgtggctgaagggggacctgcagcactgcagaaatgcctctgcgtggtgccatgaaggaaagaaaccttggcctggtctcgagaagcttcccatgcttcaggaagttagtaagggtggggtggcttgcaggattggcctgtttccagggcctcccacactcattggccagattgtgaactttgtcaggcttgtccctccctgataccaagtatgtcgagaaccgatggccccaccctctggctggtgctgggccggaggtggctatggaggattttggcatgcgtggcctgtcgccacctggacagcgtgacctcaggggttgtccactttacctttatggtgaggcctgtcggatggctaagtccttgaaaccctagagctgtgacgtagaatatgtgctgtctgtgagaccgtgttcccaggagcactgactgcagttgagagagacccattttgctctcccttaccgccccccgccccgggtgctttctgcacaaagcctagagcctggcactcaagcccaccggtggcagctcctagtgactggacatgcctggaagacccctcagccttctgtttgcagaacgttcatttcaggagcttctccttcccacagacatcttacacttgctcgacactgccacctgcagaagcctggcgggctctggtcaccatgtgtctatctgaaggttgcactggccagcatgggcctgtcccaagcgagaggggagacacagtggactgaaaggactggttgaaagtggccaatctctgtcagcttaatttggcagagaaaatttgtaacaactctgagcacatgctgggtgaagtcacagctcaaggaaagataaagctgggcggaaggaggtgtgcgtggcttctggggtgggacccagaggggaggctctgggacaggggctggggttcagtgccagggccctgaggaagaaatggggactgatctcaaaattccagaattccctgtacatctgttcacgtgcttgtgtccaggtgtgacttgtaaactgtctagtgtttgcattaaataaaatggcaccgagca

SEQ ID NO: 416508 - DNA, 1855 bp, Homo sapiens
gctttgggcgggaccctgcagaggcggcggggctcctcctcccgctcctcctcggcctccccttcgggcgctctcgcgctaactgtgctcctccggggccctccgcgaggagaggggaaagagacattcgcttggtttagtgaaacgcaggtgactttgtagctctgtggtcagcctacttgtctgctctgagggagagtgcgtggggagccatgctcaccgtggcaaacacaggaaccccatgactcgcccctcacctggcgtggagctgcctggtttgggctggagcagagctggtttcctggaatgttcctttggcccacatatggttctgtcccggtgagctctgttgtcagaggctcacgggacagaaccacatgctagggtctagggcccctgtctactgatagtcagtttgctgtgtcagaaagcacttctgaaagcagatatgagtcaccagacaggcaggatcttacaaaactcacgggcctctttggtctgcatgatggccccatgcgtttcataggctgtccactgagcgggattgtctgctgagtgggatgagccaactccagtttcttaaggaaaccactggaatctgcagcccccacatgcatctgtctaacgcatgcctcgtgttcgttttgcaaacatgcctgtggtggagggtggtcagttgtagccctgtgcgtctcaaggctgccttgtgaggccattcccagtgcgtgcccttgagctccttaccaccccttttcctgctcggccctttaatccctgacagacctggactgtgtggctgaagggggacctgcagcactgcagaaatgcctctgcgtggtgccatgaaggaaagaaaccttggcctggtctcgagaagcttcccatgcttcaggaagttagtaagggtggggtggcttgcaggattggcctgtttccagggcctcccacactcattggccagattgtgaactttgtcaggcttgtccctccctgataccaagtatgtcgagaaccgatggccccaccctctggctggtgctgggccggaggtggctatggaggattttggcatgcgtggcctgtcgccacctggacagcgtgacctcaggggttgtccactttacctttatggtgaggcctgtcggatggctaagtccttgaaaccctagagctgtgacgtagaatatgtgctgtctgtgagaccgtgttcccaggagcactgactgcagttgagagagacccattttgctctcccttaccgccccccgccccgggtgctttctgcacaaagcctagagcctggcactcaagcccaccggtggcagctcctagtgactggacatgcctggaagacccctcagccttctgtttgcagaacgttcatttcaggagcttctccttcccacagacatcttacacttgctcgacactgccacctgcagaagcctggcgggctctggtcaccatgtgtctatctgaaggttgcactggccagcatgggcctgtcccaagcgagaggggagacacagtggactgaaaggactggttgaaagtggccaatctctgtcagcttaatttggcagagaaaatttgtaacaactctgagcacatgctgggtgaagtcacagctcaaggaaagataaagctgggcggaaggaggtgtgcgtggcttctggggtgggacccagaggggaggctctgggacaggggctggggttcagtgccagggccctgaggaagaaatggggactgatctcaaaattccagaattccctgtacatctgttcacgtgcttgtgtccaggtgtgacttgtaaactgtctagtgtttgcattaaataaaatggcaccgagca

SEQ ID NO: 416509 - DNA, 3102 bp, Homo sapiens
gctttgggcgggaccctgcagaggcggcggggctcctcctcccgctcctcctcggcctccccttcgggcgctctcgcgctaactgtgctcctccggggccctccgcctgctcccagccatggtggcctggcgctcggcgttccttgtctgcctcgctttctccttggccaccctggtccagcgaggatctggggactttgatgattttaacctggaggatgcagtgaaagaaacttcctcagtaaagcagccatgggaccacaccaccaccaccacaaccaataggccaggaaccaccagagctccggcaaaacctccaggtagtggattggacttggctgatgctttggatgatcaagatgatggccgcaggaaaccgggtataggaggaagagagagatggaaccatgtaaccaccacgaccaagaggccagtaaccaccagagctccagcaaatactttaggaaatgattttgacttggctgatgccctggatgatcgaaatgatcgagatgatggccgcaggaaaccaattgctggaggaggaggtttttcagacaaggatcttgaagacatagtagggggtggagaatacaaacctgacaagggtaaaggtgatggccggtacggcagcaatgacgaccctggatctggcatggtggcagagcctggcaccattgccggggtggccagcgccctggccatggccctcatcggtgccgtctccagctacatctcctaccagcagaagaagttctgcttcagcattcagcagggtctcaacgcagactacgtgaagggagagaacctggaagccgtggtatgtgaggaaccccaagtgaaatactccacgttgcacacgcagtctgcagagccgccgccgccgcccgaaccagcccggatctgagggccctgtccagctgcaggcatgcacaatggtgccaccgcttgtcacccggctccccccaccccttcatttggacccgcagctgctgtgctgctctgtgccatcggctccttgttggtctgagtttcccggatgagctctgggtgtttgtgagtttggtttctctgccctgccccaagcgtgctgagacttggtgccgaaattcaagagccagctctgatagaaagccagcaccagcctcgggagctgctgagccaccaactcccaaagccagcctgcctccagctttactgagcacaggatgcgggggccaagatgatgctgaggcctgatgacatttatgcttaggggacaagagtttgaactcaagggactgtgacccctgcacactggagtggctcattgtggcaggtttctgccaatagacagcccctgacagtggcctcaaggagctgcaggtggggggctcagcctgcacccacttggagcccctgcaaggagcgaaccggtcagcaccaagtaacaccacacacacgcagcacccaggatgatggtttcacttcagtcttccccatcccaggttttatgttgctgggcttccggagagccggtccaagcggaggctttcagtgatttaagtacaaacatgcatctcgtgatagtcctgccttgagagcttaggaatcttccggataagtatgaagcaattcgtaggcctgtttcccatctgattccatagggggctgggtgtggccttcgggttgacatgagaaaggtctttagcaatcatttctgcaccggagatgagttttatcctgtgttggggagaggtgctcaccctccaccctgtgtccctgttttggtagcaagagtgaccgatgtcaagaacgagcatcaaagccagaatcctgcttgtttgcttaaaaatgtaattgggggcggcgggggaggagaggggaaagagacattcgcttggtttagtgaaacgcaggtgactttgtagctctgtggtcagcctacttgtctgctctgagggagagtgcgtggggagccatgctcaccgtggcaaacacaggaaccccatgactcgcccctcacctggcgtggagctgcctggtttgggctggagcagagctggtttcctggaatgttcctttggcccacatatggttctgtcccggtgagctctgttgtcagaggctcacgggacagaaccacatgctagggtctagggcccctgtctactgatagtcagtttgctgtgtcagaaagcacttctgaaagcagatatgagtcaccagacaggcaggatcttacaaaactcacgggcctctttggtctgcatgatggccccatgcgtttcataggctgtccactgagcgggattgtctgctgagtgggatgagccaactccagtttcttaaggaaaccactggaatctgcagcccccacatgcatctgtctaacgcatgcctcgtgttcgttttgcaaacatgcctgtggtggagggtggtcagttgtagccctgtgcgtctcaaggctgccttgtgaggccattcccagtgcgtgcccttgagctccttaccaccccttttcctgctcggccctttaatccctgacagacctggactgtgtggctgaagggggacctgcagcactgcagaaatgcctctgcgtggtgccatgaaggaaagaaaccttggcctggtctcgagaagcttcccatgcttcaggaagttagtaagggtggggtggcttgcaggattggcctgtttccagggcctcccacactcattggccagattgtgaactttgtcaggcttgtccctccctgataccaagtatgtcgagaaccgatggccccaccctctggctggtgctgggccggaggtggctatggaggattttggcatgcgtggcctgtcgccacctggacagcgtgacctcaggggttgtccactttacctttatggtgaggcctgtcggatggctaagtccttgaaaccctagagctgtgacgtagaatatgtgctgtctgtgagaccgtgggctggggttcagtgccagggccctgaggaagaaatggggactgatctcaaaattccagaattccctgtacatctgttcacgtgcttgtgtccaggtgtgacttgtaaactgtctagtgtttgcattaaataaaatggcaccgagca

SEQ ID NO: 416510 - DNA, 3217 bp, Homo sapiens
gctttgggcgggaccctgcagaggcggcggggctcctcctcccgctcctcctcggcctccccttcgggcgctctcgcgctaactgtgctcctccggggccctccgcctgctcccagccatggtggcctggcgctcggcgttccttgtctgcctcgctttctccttggccaccctggtccagcgaggatctggggactttgatgattttaacctggaggatgcagtgaaagaaacttcctcagtaaagcagccatgggaccacaccaccaccaccacaaccaataggccaggaaccaccagagctccggcaaaacctccaggtagtggattggacttggctgatgctttggatgatcaagatgatggccgcaggaaaccgggtataggaggaagagagagatggaaccatgtaaccaccacgaccaagaggccagtaaccaccagagctccagcaaatactttaggaaatgattttgacttggctgatgccctggatgatcgaaatgatcgagatgatggccgcaggaaaccaattgctggaggaggaggtttttcagacaaggatcttgaagacatagtagggggtggagaatacaaacctgacaagggtaaaggtgatggccggtacggcagcaatgacgaccctggatctggcatggtggcagagcctggcaccattgccggggtggccagcgccctggccatggccctcatcggtgccgtctccagctacatctcctaccagcagaagaagttctgcttcagcattcagcagggtctcaacgcagactacgtgaagggagagaacctggaagccgtggtatgtgaggaaccccaagtgaaatactccacgttgcacacgcagtctgcagagccgccgccgccgcccgaaccagcccggatctgagggccctgtccagctgcaggcatgcacaatggtgccaccgcttgtcacccggctccccccaccccttcatttggacccgcagctgctgtgctgctctgtgccatcggctccttgttggtctgagtttcccggatgagctctgggtgtttgtgagtttggtttctctgccctgccccaagcgtgctgagacttggtgccgaaattcaagagccagctctgatagaaagccagcaccagcctcgggagctgctgagccaccaactcccaaagccagcctgcctccagctttactgagcacaggatgcgggggccaagatgatgctgaggcctgatgacatttatgcttaggggacaagagtttgaactcaagggactgtgacccctgcacactggagtggctcattgtggcaggtttctgccaatagacagcccctgacagtggcctcaaggagctgcaggtggggggctcagcctgcacccacttggagcccctgcaaggagcgaaccggtcagcaccaagtaacaccacacacacgcagcacccaggatgatggtttcacttcagtcttccccatcccaggttttatgttgctgggcttccggagagccggtccaagcggaggctttcagtgatttaagtacaaacatgcatctcgtgatagtcctgccttgagagcttaggaatcttccggataagtatgaagcaattcgtaggcctgtttcccatctgattccatagggggctgggtgtggccttcgggttgacatgagaaaggtctttagcaatcatttctgcaccggagatgagttttatcctgtgttggggagaggtgctcaccctccaccctgtgtccctgttttggtagcaagagtgaccgatgtcaagaacgagcatcaaagccagaatcctgcttgtttgcttaaaaatgtaattgggggcggcgggggaggagaggggaaagagacattcgcttggtttagtgaaacgcaggtgactttgtagctctgtggtcagcctacttgtctgctctgagggagagtgcgtggggagccatgctcaccgtggcaaacacaggaaccccatgactcgcccctcacctggcgtggagctgcctggtttgggctggagcagagctggtttcctggaatgttcctttggcccacatatggttctgtcccggtgagctctgttgtcagaggctcacgggacagaaccacatgctagggtctagggcccctgtctactgatagtcagtttgctgtgtcagaaagcacttctgaaagcagatatgagtcaccagacaggcaggatcttacaaaactcacgggcctctttggtctgcatgatggccccatgcgtttcataggctgtccactgagcgggattgtctgctgagtgggatgagccaactccagtttcttaaggaaaccactggaatctgcagcccccacatgcatctgtctaacgcatgcctcgtgttcgttttgcaaacatgcctgtggtggagggtggtcagttgtagccctgtgcgtctcaaggctgccttgtgaggccattcccagtgcgtgcccttgagctccttaccaccccttttcctgctcggccctttaatccctgacagacctggactgtgtggctgaagggggacctgcagcactgcagaaatgcctctgcgtggtgccatgaaggaaagaaaccttggcctggtctcgagaagcttcccatgcttcaggaagttagtaagggtggggtggcttgcaggattggcctgtttccagggcctcccacactcattggccagattgtgaactttgtcaggcttgtccctccctgataccaagtatgtcgagaaccgatggccccaccctctggctggtgctgggccggaggtggctatggaggattttggcatgcgtggcctgtcgccacctggacagcgtgacctcaggggttgtccactttacctttatggtgaggcctgtcggatggctaagtccttgaaaccctagagctgtgacgtagaatatgtgctgtctgtgagaccgtgttcccaggagcactgactgcagttgagagagacccattttgctctcccttaccgccccccgccccggtgtgcgtggcttctggggtgggacccagaggggaggctctgggacaggggctggggttcagtgccagggccctgaggaagaaatggggactgatctcaaaattccagaattccctgtacatctgttcacgtgcttgtgtccaggtgtgacttgtaaactgtctagtgtttgcattaaataaaatggcaccgagca

SEQ ID NO: 416511 - DNA, 2826 bp, Homo sapiens
gctttgggcgggaccctgcagaggcggcggggctcctcctcccgctcctcctcggcctccccttcgggcgctctcgcgctaactgtgctcctccggggccctccgcctgctcccagccatggtggcctggcgctcggcgttccttgtctgcctcgctttctccttggccaccctggtccagcgaggatctggggactttgatgattttaacctggaggatgcagtgaaagaaacttcctcagtaaagcagccatgggaccacaccaccaccaccacaaccaataggccaggaaccaccagagctccggcaaaacctccaggtagtggattggacttggctgatgctttggatgatcaagatgatggccgcaggaaaccgggtataggaggaagagagagatggaaccatgtaaccaccacgaccaagaggccagtaaccaccagagctccagcaaatactttaggaaatgattttgacttggctgatgccctggatgatcgaaatgatcgagatgatggccgcaggaaaccaattgctggaggaggaggtttttcagacaaggatcttgaagacatagtagggggtggagaatacaaacctgacaagggtaaaggtgatggccggtacggcagcaatgacgaccctggatctggcatggtggcagagcctggcaccattgccggggtggccagcgccctggccatggccctcatcggtgccgtctccagctacatctcctaccagcagaagaagttctgcttcagcattcagcagggtctcaacgcagactacgtgaagggagagaacctggaagccgtggtatgtgaggaaccccaagtgaaatactccacgttgcacacgcagtctgcagagccgccgccgccgcccgaaccagcccggatctgagggccctgtccagctgcaggcatgcacaatggtgccaccgcttgtcacccggctccccccaccccttcatttggacccgcagctgctgtgctgctctgtgccatcggctccttgttggtctgagtttcccggatgagctctgggtgtttgtgagtttggtttctctgccctgccccaagcgtgctgagacttggtgccgaaattcaagagccagctctgatagaaagccagcaccagcctcgggagctgctgagccaccaactcccaaagccagcctgcctccagctttactgagcacaggatgcgggggccaagatgatgctgaggcctgatgacatttatgcttaggggacaagagtttgaactcaagggactgtgacccctgcacactggagtggctcattgtggcaggtttctgccaatagacagcccctgacagtggcctcaaggagctgcaggtggggggctcagcctgcacccacttggagcccctgcaaggagcgaaccggtcagcaccaagtaacaccacacacacgcagcacccaggatgatggtttcacttcagtcttccccatcccaggttttatgttgctgggcttccggagagccggtccaagcggaggctttcagtgatttaagtacaaacatgcatctcgtgatagtcctgccttgagagcttaggaatcttccggataagtatgaagcaattcgtaggcctgtttcccatctgattccatagggggctgggtgtggccttcgggttgacatgagaaaggtctttagcaatcatttctgcaccggagatgagttttatcctgtgttggggagaggtgctcaccctccaccctgtgtccctgttttggtagcaagagtgaccgatgtcaagaacgagcatcaaagccagaatcctgcttgtttgcttaaaaatgtaattgggggcggcgggggaggagaggggaaagagacattcgcttggtttagtgaaacgcaggtgactttgtagctctgtggtcagcctacttgtctgctctgagggagagtgcgtggggagccatgctcaccgtggcaaacacaggaaccccatgactcgcccctcacctggcgtggagctgcctggtttgggctggagcagagctggtttcctggaatgttcctttggcccacatatggttctgtcccggtgagctctgttgtcagaggctcacgggacagaaccacatgctagggtctagggcccctgtctactgatagtcagtttgctgtgtcagaaagcacttctgaaagcagatatgagtcaccagacaggcaggatcttacaaaactcacgggcctctttggtctgcatgatggccccatgcgtttcataggctgtccactgagcgggattgtctgctgagtgggatgagccaactccagtttcttaaggaaaccactggaatctgcagcccccacatgcatctgtctaacgcatgcctcgtgttcgttttgcaaacatgcctgtggtggagggtggtcagttgtagccctgtgcgtctcaaggctgccttgtgaggccattcccagtgcgtgcccttgagctccttaccaccccttttcctgctcggccctttaatccctgacagacctggactgtgtggctgaagggggacctgcagcactgcagaaatgcctctgcgtggtgccatgaaggaaagaaaccttggcctggtctcgagaagcttcccatgcttcaggaagttagtaagggtggggtggcttgcaggattggcctgggctggggttcagtgccagggccctgaggaagaaatggggactgatctcaaaattccagaattccctgtacatctgttcacgtgcttgtgtccaggtgtgacttgtaaactgtctagtgtttgcattaaataaaatggcaccgagca

SEQ ID NO: 416512 - DNA, 1195 bp, Homo sapiens
gctttgggcgggaccctgcagaggcggcggggctcctcctcccgctcctcctcggcctccccttcgggcgctctcgcgctaactgtgctcctccggggccctccgcctgctcccagccatggtggcctggcgctcggcgttccttgtctgcctcgctttctccttggccaccctggtccagcgaggatctggggactttgatgattttaacctggaggatgcagtgaaagaaacttcctcagtaaagcagccatgggaccacaccaccaccaccacaaccaataggccaggaaccaccagagctccggcaaaacctccaggtagtggattggacttggctgatgctttggatgatcaagatgatggccgcaggaaaccgggtataggaggaagagagagatggaaccatgtaaccaccacgaccaagaggccagtaaccaccagagctccagcaaatactttaggaaatgattttgacttggctgatgccctggatgatcgaaatgatcgagatgatggccgcaggaaaccaattgctggaggaggaggtttttcagacaaggatcttgaagacatagtagggggtggagaatacaaacctgacaagggtaaaggtgatggccggtacggcagcaatgacgaccctggatctggtgggtttctgaatcctgaggctcctgttggccatgtgaaaggaaaatgaatctcaggaccccaaaatcactaagccaagggaaaagtcaagctagaaactgcatcaggcaaacgtgcctcccattctactcctaaataagatagctgcaaagatggaaaaagctgcacgcctccctcacaatttgcctacaaagaaatttcttatgggcctcaatatctttaccctaaaacagttctgtgaatttcaccctggcaatacaaactgatagctgatctttacagagggagagagagccgtccctctgctcccctgatacaaatgcatctctggttgcttcctctgcccaattgcttatgtaaaaatgcaggttcactgagccagacaaaattgtgtattcagtgaaaggctgatcaaggactcaaaagaatgcaaccttttgtctctttctcttatctccctatgacctggaagcaccccacctctacccctgctttgagttgtcccacctttctggaccaaaccaatgtacgtcttacacat

SEQ ID NO: 416513 - DNA, 1091 bp, Homo sapiens
gctttgggcgggaccctgcagaggcggcggggctcctcctcccgctcctcctcggcctccccttcgggcgctctcgcgctaactgtgctcctccggggccctccgcctgctcccagccatggtggcctggcgctcggcgttccttgtctgcctcgctttctccttggccaccctggtccagcgaggatctggggactttgatgattttaacctggaggatgcagtgaaagaaacttcctcagtaaagcctgccttaggaatgtaccacaaactagatggcttaaaacaacagaactttattctgtcactgttctggatgctagaagttctatatcaaggtgttggttgggccacattctctctgaaggctctagggaagaatctttccttgactttccccacttctggtggctctaggtgttccttggtttgtggttgcatcactccaatctctgcctctgttgtcacgtggtgttcccctttctgtgtctctctcctttctcttacaaagatgcttgttagtgggtttaaggcccacctggataatccaggatgatctcatcttgagatctttcacttaattacatctgcagagatcctttttccaaataaggaaatatatatttatagatatataatatatatacacatacatatatgtgcgcatatatatatacacacatcccttattcgttttaagcactgcacggtatgccatagtatgcattcagtaaatgtctgagtgccagctgtgtatcagttactgttttaggctttggggctacaggccatggacaaatcacacataaacctgtgccttgtggagccagcgttccagtagtgtggatttggccatgacctgtattgccatttccttactggcagacacgtggtttatttcctttttatgcaattacaaatagggctacagtggacattcttgtccatgtcctttgtgcctaagtgcattgtgactgctaggaccaaagatatgtgttttttatattataaaaaacgctgccaaattgttttccaaagtggatttgccattatgcactgtcactgatgttgttataatagtacctgttttc

SEQ ID NO: 416514 - DNA, 3551 bp, Homo sapiens
gctttgggcgggaccctgcagaggcggcggggctcctcctcccgctcctcctcggcctccccttcgggcgctctcgcgctaactgtgctcctccggggccctccgcctgctcccagccatggtggcctggcgctcggcgttccttgtctgcctcgctttctccttggccaccctggtccagcgaggatctggggactttgatgattttaacctggaggatgcagtgaaagaaacttcctcagtaaagcagccatgggaccacaccaccaccaccacaaccaataggccaggaaccaccagagctccggcaaaacctccaggtagtggattggacttggctgatgctttggatgatcaagatgatggccgcaggaaaccgggtataggaggaagagagagatggaaccatgtaaccaccacgaccaagaggccagtaaccaccagagctccagcaaatactttaggaaatgattttgacttggctgatgccctggatgatcgaaatgatcgagatgatggccgcaggaaaccaattgctggaggaggaggtttttcagacaaggatcttgaagacatagtagggggtggagaatacaaacctgacaagggtaaaggtgatggccggtacggcagcaatgacgaccctggatctggcatggtggcagagcctggcaccattgccggggtggccagcgccctggccatggccctcatcggtgccgtctccagctacatctcctaccagcagaagaagttctgcttcagcattcagcagggtctcaacgcagactacgtgaagggagagaacctggaagccgtggtatgtgaggaaccccaagtgaaatactccacgttgcacacgcagtctgcagagccgccgccgccgcccgaaccagcccggatctgagggccctgtccagctgcaggcatgcacaatggtgccaccgcttgtcacccggctccccccaccccttcatttggacccgcagctgctgtgctgctctgtgccatcggctccttgttggtctgagtttcccggatgagctctgggtgtttgtgagtttggtttctctgccctgccccaagcgtgctgagacttggtgccgaaattcaagagccagctctgatagaaagccagcaccagcctcgggagctgctgagccaccaactcccaaagccagcctgcctccagctttactgagcacaggatgcgggggccaagatgatgctgaggcctgatgacatttatgcttaggggacaagagtttgaactcaagggactgtgacccctgcacactggagtggctcattgtggcaggtttctgccaatagacagcccctgacagtggcctcaaggagctgcaggtggggggctcagcctgcacccacttggagcccctgcaaggagcgaaccggtcagcaccaagtaacaccacacacacgcagcacccaggatgatggtttcacttcagtcttccccatcccaggttttatgttgctgggcttccggagagccggtccaagcggaggctttcagtgatttaagtacaaacatgcatctcgtgatagtcctgccttgagagcttaggaatcttccggataagtatgaagcaattcgtaggcctgtttcccatctgattccatagggggctgggtgtggccttcgggttgacatgagaaaggtctttagcaatcatttctgcaccggagatgagttttatcctgtgttggggagaggtgctcaccctccaccctgtgtccctgttttggtagcaagagtgaccgatgtcaagaacgagcatcaaagccagaatcctgcttgtttgcttaaaaatgtaattgggggcggcgggggaggagaggggaaagagacattcgcttggtttagtgaaacgcaggtgactttgtagctctgtggtcagcctacttgtctgctctgagggagagtgcgtggggagccatgctcaccgtggcaaacacaggaaccccatgactcgcccctcacctggcgtggagctgcctggtttgggctggagcagagctggtttcctggaatgttcctttggcccacatatggttctgtcccggtgagctctgttgtcagaggctcacgggacagaaccacatgctagggtctagggcccctgtctactgatagtcagtttgctgtgtcagaaagcacttctgaaagcagatatgagtcaccagacaggcaggatcttacaaaactcacgggcctctttggtctgcatgatggccccatgcgtttcataggctgtccactgagcgggattgtctgctgagtgggatgagccaactccagtttcttaaggaaaccactggaatctgcagcccccacatgcatctgtctaacgcatgcctcgtgttcgttttgcaaacatgcctgtggtggagggtggtcagttgtagccctgtgcgtctcaaggctgccttgtgaggccattcccagtgcgtgcccttgagctccttaccaccccttttcctgctcggccctttaatccctgacagacctggactgtgtggctgaagggggacctgcagcactgcagaaatgcctctgcgtggtgccatgaaggaaagaaaccttggcctggtctcgagaagcttcccatgcttcaggaagttagtaagggtggggtggcttgcaggattggcctgtttccagggcctcccacactcattggccagattgtgaactttgtcaggcttgtccctccctgataccaagtatgtcgagaaccgatggccccaccctctggctggtgctgggccggaggtggctatggaggattttggcatgcgtggcctgtcgccacctggacagcgtgacctcaggggttgtccactttacctttatggtgaggcctgtcggatggctaagtccttgaaaccctagagctgtgacgtagaatatgtgctgtctgtgagaccgtgttcccaggagcactgactgcagttgagagagacccattttgctctcccttaccgccccccgccccgggtgctttctgcacaaagcctagagcctggcactcaagcccaccggtggcagctcctagtgactggacatgcctggaagacccctcagccttctgtttgcagaacgttcatttcaggagcttctccttcccacagacatcttacacttgctcgacactgccactggccagcatgggcctgtcccaagcgagaggggagacacagtggactgaaaggactggttgaaagtggccaatctctgtcagcttaatttggcagagaaaatttgtaacaactctgagcacatgctgggtgaagtcacagctcaaggaaagataaagctgggcggaaggaggtgtgcgtggcttctggggtgggacccagaggggaggctctgggacaggggctggggttcagtgccagggccctgaggaagaaatggggactgatctcaaaattccagaattccctgtacatctgttcacgtgcttgtgtccaggtgtgacttgtaaactgtctagtgtttgcattaaataaaatggcaccgagca

SEQ ID NO: 416515 - DNA, 3332 bp, Homo sapiens
gctttgggcgggaccctgcagaggcggcggggctcctcctcccgctcctcctcggcctccccttcgggcgctctcgcgctaactgtgctcctccggggccctccgcctgctcccagccatggtggcctggcgctcggcgttccttgtctgcctcgctttctccttggccaccctggtccagcgaggatctggggactttgatgattttaacctggaggatgcagtgaaagaaacttcctcagtaaagcagccatgggaccacaccaccaccaccacaaccaataggccaggaaccaccagagctccggcaaaacctccaggtagtggattggacttggctgatgctttggatgatcaagatgatggccgcaggaaaccgggtataggaggaagagagagatggaaccatgtaaccaccacgaccaagaggccagtaaccaccagagctccagcaaatactttaggaaatgattttgacttggctgatgccctggatgatcgaaatgatcgagatgatggccgcaggaaaccaattgctggaggaggaggtttttcagacaaggatcttgaagacatagtagggggtggagaatacaaacctgacaagggtaaaggtgatggccggtacggcagcaatgacgaccctggatctggcatggtggcagagcctggcaccattgccggggtggccagcgccctggccatggccctcatcggtgccgtctccagctacatctcctaccagcagaagaagttctgcttcagcattcagcagggtctcaacgcagactacgtgaagggagagaacctggaagccgtggtatgtgaggaaccccaagtgaaatactccacgttgcacacgcagtctgcagagccgccgccgccgcccgaaccagcccggatctgagggccctgtccagctgcaggcatgcacaatggtgccaccgcttgtcacccggctccccccaccccttcatttggacccgcagctgctgtgctgctctgtgccatcggctccttgttggtctgagtttcccggatgagctctgggtgtttgtgagtttggtttctctgccctgccccaagcgtgctgagacttggtgccgaaattcaagagccagctctgatagaaagccagcaccagcctcgggagctgctgagccaccaactcccaaagccagcctgcctccagctttactgagcacaggatgcgggggccaagatgatgctgaggcctgatgacatttatgcttaggggacaagagtttgaactcaagggactgtgacccctgcacactggagtggctcattgtggcaggtttctgccaatagacagcccctgacagtggcctcaaggagctgcaggtggggggctcagcctgcacccacttggagcccctgcaaggagcgaaccggtcagcaccaagtaacaccacacacacgcagcacccaggatgatggtttcacttcagtcttccccatcccaggttttatgttgctgggcttccggagagccggtccaagcggaggctttcagtgatttaagtacaaacatgcatctcgtgatagtcctgccttgagagcttaggaatcttccggataagtatgaagcaattcgtaggcctgtttcccatctgattccatagggggctgggtgtggccttcgggttgacatgagaaaggtctttagcaatcatttctgcaccggagatgagttttatcctgtgttggggagaggtgctcaccctccaccctgtgtccctgttttggtagcaagagtgaccgatgtcaagaacgagcatcaaagccagaatcctgcttgtttgcttaaaaatgtaattgggggcggcgggggaggagaggggaaagagacattcgcttggtttagtgaaacgcaggtgactttgtagctctgtggtcagcctacttgtctgctctgagggagagtgcgtggggagccatgctcaccgtggcaaacacaggaaccccatgactcgcccctcacctggcgtggagctgcctggtttgggctggagcagagctggtttcctggaatgttcctttggcccacatatggttctgtcccggtgagctctgttgtcagaggctcacgggacagaaccacatgctagggtctagggcccctgtctactgatagtcagtttgctgtgtcagaaagcacttctgaaagcagatatgagtcaccagacaggcaggatcttacaaaactcacgggcctctttggtctgcatgatggccccatgcgtttcataggctgtccactgagcgggattgtctgctgagtgggatgagccaactccagtttcttaaggaaaccactggaatctgcagcccccacatgcatctgtctaacgcatgcctcgtgttcgttttgcaaacatgcctgtggtggagggtggtcagttgtagccctgtgcgtctcaaggctgccttgtgaggccattcccagtgcgtgcccttgagctccttaccaccccttttcctgctcggccctttaatccctgacagacctggactgtgtggctgaagggggacctgcagcactgcagaaatgcctctgcgtggtgccatgaaggaaagaaaccttggcctggtctcgagaagcttcccatgcttcaggaagttagtaagggtggggtggcttgcaggattggcctgtttccagggcctcccacactcattggccagattgtgaactttgtcaggcttgtccctccctgataccaagtatgtcgagaaccgatggccccaccctctggctggtgctgggccggaggtggctatggaggattttggcatgcgtggcctgtcgccacctggacagcgtgacctcaggggttgtccactttacctttatggtgaggcctgtcggatggctaagtccttgaaaccctagagctgtgacgtagaatatgtgctgtctgtgagaccgtgttcccaggagcactgactgcagttgagagagacccattttgctctcccttaccgccccccgccccgggtgctttctgcacaaagcctagagcctggcactcaagcccaccggtggcagctcctagtgactggacatgcctggaagacccctcagccttctgtttgcagaacgttcatttcagtgtgcgtggcttctggggtgggacccagaggggaggctctgggacaggggctggggttcagtgccagggccctgaggaagaaatggggactgatctcaaaattccagaattccctgtacatctgttcacgtgcttgtgtccaggtgtgacttgtaaactgtctagtgtttgcattaaataaaatggcaccgagca

SEQ ID NO: 416516 - DNA, 325 bp, Homo sapiens
acaaaataggccttatgaaatttttagcatgtggcatggtacgttatctgaaaatcctcctactgtacaacaccccaaaatgcttagtaaataaaatattgaaacaaatccttttaaatacatagtcggccttactcaaagtaaggaaaattccttgggagcaaaaatgtgtaagaattccatttccttttgtatggcaaaccaattattctgaagtgccttatcactgtaatataagtagatcctctttaaatttgaataagcctccttttttaatgcattgacaagcttgcaagaaataagggaaatctcaataccctcacac

SEQ ID NO: 416517 - DNA, 238 bp, Homo sapiens
ctggccccatttttcttttttaaaagcaaacaggtggggtgccatggctcacgcctgtaatcccaccattttgggaggccaagccaggtggatcacttgagtccaggagttcggagaccagcctgggcaacatggcaaaaccctgtgtctataaaaactaccaaaaaaaaaaaaaaaattagcgggatgtgatgctgtacgcctgtagtcctggctatctgaggggctgaggctggag

SEQ ID NO: 416518 - DNA, 1906 bp, Homo sapiens
tccaacttgtttgacacattagaaaaaatccatatccaattacaacagtaaatcgtgtaaagttgtcagggagtgttataatgacacgttttctctccctttctatctagggagcagtaatgaatgcaatggaaacaaacctcgttggaagtgacaaatatgctgcaagatttggggaatctatagttaatcttggcgacattgacaatgatggctttgaaggtaattaaaattatcaaattggtgcttgatttctgcttttaaaatggtttatggaagaaaatatgattaaagttttgtattgttttccttcctatagaagatggagccagaatggcatgctaagttttttcttttctttagtgttatatatgacttctcctcaattgtcacccattgatctttaccactgttaataatggatgatattcaaaataccttatttcagtgattctaaggcaccattgattagaaactgcattattatttatgtgtccctaaaagctacctattaagctgttacacccaccatttttctgttaaggaagatcctgatttcagaaataataaaatatgggcaggaaatgtgttatcatagactcattggaccacggtatttaactatcagtacaataaagacactgaccaaacccaacagaggctggctgcagagctggagcagggttctggaagcccctgctctgccaggcattccctatagctatgttgtggaggatctggggaattcaagaagagattctgagcaggccactgggaggcctggggacagtggctgtttacccactgatattgacgttttttattaattgaatagatggtagtgtggtaactgtgcatattgccatggatgtcagtcctgttgttgaaatccctgcatctactagcatttactgttaaaaatttgcttttatcaatctagttctaagtggtaagtaactgagtctgttaaaactgtgcataaaatggtgaataggtttaagaggagagtgtgcagtttcatggagttcagcacataagtatttgatacttatttttagggttcataattgtcttcttgataaggccattggcaattagtatacggtagttttaggctaaagctttctcagagattaaagtgctggggtactataaattctcatctccttaatgtcttcttgtacctagataccacaatctactttaaatatataaaatgcattattctacataaaaagtcagttattgaatacatgcttccagtgaaccttcttaaacgtaagatagtgtaacttgttatacaagtattactgttctggattttttgtttactattttaaaactgaaagaaaaaaataggtgtatatacttttggttattacgattacacataatttttttaaaaaacatgtatgaatgggagcctctctgtaccccacccatcactagcttccccctacttcccttaccctcccaggaccccaggttgggcattggctcattttcataaataacctcatcccagacaggggtgagggaaggtgttgtggctgttttgtttaaattggagctgtaagagggatcatgtcatattttatgcccttcctagaaaggggacgggacacctggtttgcattcctgtattgaccactgctgccgtcactcgtcacattgagttcacatctcctgagagtttgtataaattcaggtcagcgctgctcctatgcagccatccagtgtcatagaaaagcaattcactgataactgatctctccattcagaagtgtgcagttttaatgtatagcaataagaaattgttatttatctattacaagcctggtttgattaaaaacaaaaaataaaatgttattatgcttgatgttacatctcataagtaaaaaaaaaa

SEQ ID NO: 416519 - DNA, 750 bp, Homo sapiens
cagtttaaatactttattataatttagaaaacaaacattcatgtcttgtttaaaggtaatttaaatgccactaaggaaagcagatgtttaatttcatatttatggaaagatgattttcaaaatgccattagagtatatattaaattctatataaaatattttaaaaatattttccaatgttgaaaattttaatgtagcacttttatattcccttcaagtactgcataaaagctgatccacattgtttaaatttcttgtgtaattttgggaaaatggaaagtggaaaagaagccagtgttcatatccaactggaaggccggccatccattttagaaatggtaagtaagtctaaaacattgacaacttggtggctaagtttacataaaatctataaattcagtcgtataggcaggatagtatgaaggcattcaacaaattaaattttaaataaaattttggagtaaaactctaaaactgtatttctatcacttcaactatctacattgactaagtgaaatggctttagaaattaacaggtaataaaggctaaaataggccaggcacagtggctcatgcctgtaatcccagcactttgggaggccaaggcaggaggatcacttgaggccaggagttcgagaccagttgtattcctaggtagatgtctggtgttatttctgaggtctctgttctgttccattggcctctgtatctgttttggttagccttgtagtacagtttgaagtcgggtag

SEQ ID NO: 416520 - DNA, 5259 bp, Homo sapiens
  misc_feature (90)..(90): n is a, c, g, or t
ggcagggcacacctggattgcattagaatgagactcactacccagttcaggtgtgttgcgttgtgggtctccggcacatttcagaggctnattaggaccctgaccccacactggggtttacacccctaaaagcaggtgtgtcccgtggcaactgagtgggtgcgtgaaaaggggggatcatcaattaccagctggagcaatcgaatcggttaaagtgaatcaagtcacagtgcttccttaacccaacctctctgttggggtcagccacagcctaaaccgcctgccgttcagcctgagaggctgctgctagcctgctcacgcatgcagcccgggctgcagaggaagtgtggggaggaaggaagtgggtatagaagggtgctgagatgtgggtcttgaagagaatagccataacgtctttgtcactaaaatgttccccaggggccttcggcgagtctttttgtttggttttttgtttttaatctgtggctcttgataatttatctagtggttgcctacacctgaaaaacaagacacagtgtttaactatcaacgaaagaactggacggctccccgccgcagtcccactccccgagtttgtggctggcatttgggccacgccgggctgggcggtcacagcgaggggcgcgcagtttggggtcacacagctccgcttctaggccccaaccaccgttaaaaggggaagcccgtgccccatcaggtccgctcttgctgagcccagagccatcccgcgctctgcgggctgggaggcccgggccaggacgcgagtcctgcgcagccgaggttccccagcgccccctgcagccgcgcgtaggcagagacggagcccggccctgcgcctccgcaccacgcccgggaccccacccagcggcccgtacccggagaagcagcgcgagcacccgaagctcccggctggcggcagaaaccgggagtggggccgggcgagtgcgcggcatcccaggccggcccgaacgctccgcccgcggtgggccgacttcccctcctcttccctctctccttcctttagcccgctggcgccggacacgctgcgcctcatctcttggggcgttcttccccgttggccaaccgtcgcatcccgtgcaactttggggtagtggccgtttagtgttgaatgttccccaccgagagcgcatggcttgggaagcgaggcgcgaacccggcccccgaagccgccgtccgggagacggtgatgctgttgctgtgcctgggggtcccgaccggccgcccctacaacgtggacactgagagcgcgctgctttaccagggcccccacaacacgctgttcggctactcggtcgtgctgcacagccacggggcgaaccgatggctcctagtgggtgcgcccactgccaactggctcgccaacgcttcagtgatcaatcccggggcgatttacagatgcaggatcggaaagaatcccggccagacgtgcgaacagctccagctgggtagccctaatggagaaccttgtggaaagacttgtttggaagagagagacaatcagtggttgggggtcacactttccagacagccaggagaaaatggatccatcgtgacttgtgggcatagatggaaaaatatattttacataaagaatgaaaataagctccccactggtggttgctatggagtgccccctgatttacgaacagaactgagtaaaagaatagctccgtgttatcaagattatgtgaaaaaatttggagaaaattttgcatcatgtcaagctggaatatccagtttttacacaaaggatttaattgtgatgggggccccaggatcatcttactggactggctctctttttgtctacaatataactacaaataaatacaaggcttttttagacaaacaaaatcaagtaaaatttggaagttatttaggatattcagtcggagctggtcattttcggagccagcatactaccgaagtagtcggaggagctcctcaacatgagcagattggtaaggcatatatattcagcattgatgaaaaagaactaaatatcttacatgaaatgaaaggtaaaaagcttggatcgtactttggagcttctgtctgtgctgtggacctcaatgcagatggcttctcagatctgctcgtgggagcacccatgcagagcaccatcagagaggaaggaagagtgtttgtgtacatcaactctggctcgggagcagtaatgaatgcaatggaaacaaacctcgttggaagtgacaaatatgctgcaagatttggggaatctatagttaatcttggcgacattgacaatgatggctttgaagatgttgctatcggagctccacaagaagatgacttgcaaggtgctatttatatttacaatggccgtgcagatgggatctcgtcaaccttctcacagagaattgaaggacttcagatcagcaaatcgttaagtatgtttggacagtctatatcaggacaaattgatgcagataataatggctatgtagatgtagcagttggtgcttttcggtctgattctgctgtcttgctaaggacaagacctgtagtaattgttgacgcttctttaagccaccctgagtcagtaaatagaacgaaatttgactgtgttgaaaatggatggccttctgtgtgcatagatctaacactttgtttctcatataagggcaaggaagttccaggttacattgttttgttttataacatgagtttggatgtgaacagaaaggcagagtctccaccaagattctatttctcttctaatggaacttctgacgtgattacaggaagcatacaggtgtccagcagagaagctaactgtagaacacatcaagcatttatgcggaaagatgtgcgggacatcctcaccccaattcagattgaagctgcttaccaccttggtcctcatgtcatcagtaaacgaagtacagaggaattcccaccacttcagccaattcttcagcagaagaaagaaaaagacataatgaaaaaaacaataaactttgcaaggttttgtgcccatgaaaattgttctgctgatttacaggtttctgcaaagattgggtttttgaagccccatgaaaataaaacatatcttgctgttgggagtatgaagacattgatgttgaatgtgtccttgtttaatgctggagatgatgcatatgaaacgactctacatgtcaaactacccgtgggtctttatttcattaagattttagagctggaagagaagcaaataaactgtgaagtcacagataactctggcgtggtacaacttgactgcagtattggctatatatatgtagatcatctctcaaggatagatattagctttctcctggatgtgagctcactcagcagagcggaagaggacctcagtatcacagtgcatgctacctgtgaaaatgaagaggaaatggacaatctaaagcacagcagagtgactgtagcaatacctttaaaatatgaggttaagctgactgttcatgggtttgtaaacccaacttcatttgtgtatggatcaaatgatgaaaatgagcctgaaacgtgcatggtggagaaaatgaacttaactttccatgttatcaacactggcaatagtatggctcccaatgttagtgtggaaataatggtaccaaattcttttagcccccaaactgataagctgttcaacattttggatgtccagactactactggagaatgccactttgaaaattatcaaagagtgtgtgcattagagcagcaaaagagtgcaatgcagaccttgaaaggcatagtccggttcttgtccaagactgataagaggctattgtactgcataaaagctgatccacattgtttaaatttcttgtgtaattttgggaaaatggaaagtggaaaagaagccagtgttcatatccaactggaaggccggccatccattttagaaatggatgagacttcagcactcaagtttgaaataagagcaacaggttttccagagccaaatccaagagtaattgaactaaacaaggatgagaatgttgcgcatgttctactggaaggactacatcatcaaagacccaaacgttatttcaccatagtgattatttcaagtagcttgctacttggacttattgtacttctgttgatctcatatgttatgtggaaggctggcttctttaaaagacaatacaaatctatcctacaagaagaaaacagaagagacagttggagttatatcaacagtaaaagcaatgatgattaaggacttctttcaaattgagagaatggaaaacagactcaggttgtagtaaagaaatttaaaagacactgtttacaagaaaaaatgaattttgtttggacttcttttactcatgatcttgtgacatattatgtcttcatgcaaggggaaaatctcagcaatgattactctttgagatagaagaactgcaaaggtaataatacagccaaagataatctctcagcttttaaatgggtagagaaacactaaagcattcaatttattcaagaaaagtaagcccttgaagatatcttgaaatgaaagtataactgagttaaattatactggagaagtcttagacttgaaatactacttaccatatgtgcttgcctcagtaaaatgaaccccactgggtgggcagaggttcatttcaaatacatctttgatacttgttcaaaatatgttctttaaaaatataattttttagagagctgttcccaaattttctaacgagtggaccattatcactttaaagccctttatttataatacatttcctacgggctgtgttccaacaaccattttttttcagcagactatgaatattatagtattataggccaaactggcaaacttcagactgaacatgtacactggtttgagcttagtgaaatgacttctggataattatttttttataattatggatttcaccatctttctttctgtatatatacatgtgtttttatgtaggtatatatttaccattcttcctatctattcttcctataacacacctttatcaagcatacccaggagtaatcttcaaatcttttgttatattctgaaacaaaagattgtgagtgttgcactttacctgattacacgctgatttagaaaatacagaaaccatacctcactaataactttaaaatcaaagctgtgcaaagactagggggcctatacttcatatgtattatgtactatgtaaaatattgactatcacacaactattt

SEQ ID NO: 416521 - DNA, 2710 bp, Homo sapiens
  misc_feature (90)..(90): n is a, c, g, or t
ggcagggcacacctggattgcattagaatgagactcactacccagttcaggtgtgttgcgttgtgggtctccggcacatttcagaggctnattaggaccctgaccccacactggggtttacacccctaaaagcaggtgtgtcccgtggcaactgagtgggtgcgtgaaaaggggggatcatcaattaccagctggagcaatcgaatcggttaaagtgaatcaagtcacagtgcttccttaacccaacctctctgttggggtcagccacagcctaaaccgcctgccgttcagcctgagaggctgctgctagcctgctcacgcatgcagcccgggctgcagaggaagtgtggggaggaaggaagtgggtatagaagggtgctgagatgtgggtcttgaagagaatagccataacgtctttgtcactaaaatgttccccaggggccttcggcgagtctttttgtttggttttttgtttttaatctgtggctcttgataatttatctagtggttgcctacacctgaaaaacaagacacagtgtttaactatcaacgaaagaactggacggctccccgccgcagtcccactccccgagtttgtggctggcatttgggccacgccgggctgggcggtcacagcgaggggcgcgcagtttggggtcacacagctccgcttctaggccccaaccaccgttaaaaggggaagcccgtgccccatcaggtccgctcttgctgagcccagagccatcccgcgctctgcgggctgggaggcccgggccaggacgcgagtcctgcgcagccgaggttccccagcgccccctgcagccgcgcgtaggcagagacggagcccggccctgcgcctccgcaccacgcccgggaccccacccagcggcccgtacccggagaagcagcgcgagcacccgaagctcccggctggcggcagaaaccgggagtggggccgggcgagtgcgcggcatcccaggccggcccgaacgctccgcccgcggtgggccgacttcccctcctcttccctctctccttcctttagcccgctggcgccggacacgctgcgcctcatctcttggggcgttcttccccgttggccaaccgtcgcatcccgtgcaactttggggtagtggccgtttagtgttgaatgttccccaccgagagcgcatggcttgggaagcgaggcgcgaacccggcccccgaagccgccgtccgggagacggtgatgctgttgctgtgcctgggggtcccgaccggccgcccctacaacgtggacactgagagcgcgctgctttaccagggcccccacaacacgctgttcggctactcggtcgtgctgcacagccacggggcgaaccgatggctcctagtgggtgcgcccactgccaactggctcgccaacgcttcagtgatcaatcccggggcgatttacagatgcaggatcggaaagaatcccggccagacgtgcgaacagctccagctgggtgagttgggtatgggaccaggagttagtgacctcccgaccccccatgtggaccccaccatagggcaagtcctggaaagattcacgttgcctgttacttctggtttaaagagcataaagttttcagtttcaactccatctcatcttgcctccttaatataaaagggattccctttctgttaatatcgttctcccttttccttatggcaatgattgcagtactctgacaactatgctagagaaatttcttatgataccttctcttcatctctccccgtctctccgtgtgtaaagcacattttagactctctcagcgtattaaggacaggatccagctaagccaagacttgagaattttatttccatctttgacctatcaaccctcttaaagaacaggctaaggagcatatcaggaatagcaattggaattgatcccatatcccgtcgtttaacctaaaggcctaaaaaaaaagtgatagttttacttacaatatacaatctaaaagaaaaggaaaattggcatcttcatcgttaatgtagtataattttccattcccaaaaccgtcatccaaaactcatgttatatgggtccatctttttgcagtcatttctcaatgtctcagatttgtgacaagttgaaaaatgtgtactgatagaggggagaagtttcatgtttcaaagccaaagacaagtttgttgcacacaggcaagtggggaaagaagaaggaatattaaataacaagacctatcttgttccaaagtgttactgctatatatattgcttaacttttttccccttaaagcaaccctgggtcatggttgacattgttcctagtttatgtatgaggactgtggctcagagttgcaaatacctttttaaaagttacttagctagtgactgataggtgggaactaaagtcaaactagggtctgaatgcgtccaaagtctaagccattttcttccatgtatgtatcttcaatgcaaataaaattaagtgtaatggtttaatatgttgtctgctgagctgatgggtcatctgtaaacggtgaataaaattggtacttctttatatttctttgctataaatggacttttgagattagttattggatctttaacttcttttgtattttatagtagtctttgctctttttcaaactgtgaagctggttcccttcattcagatgaattcagatagagtataaacataatggaatttttac

SEQ ID NO: 416522 - DNA, 5196 bp, Homo sapiens
  misc_feature (90)..(90): n is a, c, g, or t
ggcagggcacacctggattgcattagaatgagactcactacccagttcaggtgtgttgcgttgtgggtctccggcacatttcagaggctnattaggaccctgaccccacactggggtttacacccctaaaagcaggtgtgtcccgtggcaactgagtgggtgcgtgaaaaggggggatcatcaattaccagctggagcaatcgaatcggttaaagtgaatcaagtcacagtgcttccttaacccaacctctctgttggggtcagccacagcctaaaccgcctgccgttcagcctgagaggctgctgctagcctgctcacgcatgcagcccgggctgcagaggaagtgtggggaggaaggaagtgggtatagaagggtgctgagatgtgggtcttgaagagaatagccataacgtctttgtcactaaaatgttccccaggggccttcggcgagtctttttgtttggttttttgtttttaatctgtggctcttgataatttatctagtggttgcctacacctgaaaaacaagacacagtgtttaactatcaacgaaagaactggacggctccccgccgcagtcccactccccgagtttgtggctggcatttgggccacgccgggctgggcggtcacagcgaggggcgcgcagtttggggtcacacagctccgcttctaggccccaaccaccgttaaaaggggaagcccgtgccccatcaggtccgctcttgctgagcccagagccatcccgcgctctgcgggctgggaggcccgggccaggacgcgagtcctgcgcagccgaggttccccagcgccccctgcagccgcgcgtaggcagagacggagcccggccctgcgcctccgcaccacgcccgggaccccacccagcggcccgtacccggagaagcagcgcgagcacccgaagctcccggctggcggcagaaaccgggagtggggccgggcgagtgcgcggcatcccaggccggcccgaacgctccgcccgcggtgggccgacttcccctcctcttccctctctccttcctttagcccgctggcgccggacacgctgcgcctcatctcttggggcgttcttccccgttggccaaccgtcgcatcccgtgcaactttggggtagtggccgtttagtgttgaatgttccccaccgagagcgcatggcttgggaagcgaggcgcgaacccggcccccgaagccgccgtccgggagacggtgatgctgttgctgtgcctgggggtcccgaccggccgcccctacaacgtggacactgagagcgcgctgctttaccagggcccccacaacacgctgttcggctactcggtcgtgctgcacagccacggggcgaaccgatggctcctagtgggtgcgcccactgccaactggctcgccaacgcttcagtgatcaatcccggggcgatttacagatgcaggatcggaaagaatcccggccagacgtgcgaacagctccagctgggtagccctaatggagaaccttgtggaaagacttgtttggaagagagagacaatcagtggttgggggtcacactttccagacagccaggagaaaatggatccatcgtggtaggtattggaactggtccacagatccatcgtgaaatcagctatcctgggtgcagctttcacatcatttggtctacttttattttattcagacttgtgggcatagatggaaaaatatattttacataaagaatgaaaataagctccccactggtggttgctatggagtgccccctgatttacgaacagaactgagtaaaagaatagctccgtgttatcaagattatgtgaaaaaatttggagaaaattttgcatcatgtcaagctggaatatccagtttttacacaaaggatttaattgtgatgggggccccaggatcatcttactggactggctctctttttgtctacaatataactacaaataaatacaaggcttttttagacaaacaaaatcaagtaaaatttggaagttatttaggatattcagtcggagctggtcattttcggagccagcatactaccgaagtagtcggaggagctcctcaacatgagcagattggtaaggcatatatattcagcattgatgaaaaagaactaaatatcttacatgaaatgaaaggtaaaaagcttggatcgtactttggagcttctgtctgtgctgtggacctcaatgcagatggcttctcagatctgctcgtgggagcacccatgcagagcaccatcagagaggaaggaagagtgtttgtgtacatcaactctggctcgggagcagtaatgaatgcaatggaaacaaacctcgttggaagtgacaaatatgctgcaagatttggggaatctatagttaatcttggcgacattgacaatgatggctttgaagatgttgctatcggagctccacaagaagatgacttgcaaggtgctatttatatttacaatggccgtgcagatgggatctcgtcaaccttctcacagagaattgaaggacttcagatcagcaaatcgttaagtatgtttggacagtctatatcaggacaaattgatgcagataataatggctatgtagatgtagcagttggtgcttttcggtctgattctgctgtcttgctaagttttgttttataacatgagtttggatgtgaacagaaaggcagagtctccaccaagattctatttctcttctaatggaacttctgacgtgattacaggaagcatacaggtgtccagcagagaagctaactgtagaacacatcaagcatttatgcggaaagatgtgcgggacatcctcaccccaattcagattgaagctgcttaccaccttggtcctcatgtcatcagtaaacgaagtacagaggaattcccaccacttcagccaattcttcagcagaagaaagaaaaagacataatgaaaaaaacaataaactttgcaaggttttgtgcccatgaaaattgttctgctgatttacaggtttctgcaaagattgggtttttgaagccccatgaaaataaaacatatcttgctgttgggagtatgaagacattgatgttgaatgtgtccttgtttaatgctggagatgatgcatatgaaacgactctacatgtcaaactacccgtgggtctttatttcattaagattttagagctggaagagaagcaaataaactgtgaagtcacagataactctggcgtggtacaacttgactgcagtattggctatatatatgtagatcatctctcaaggatagatattagctttctcctggatgtgagctcactcagcagagcggaagaggacctcagtatcacagtgcatgctacctgtgaaaatgaagaggaaatggacaatctaaagcacagcagagtgactgtagcaatacctttaaaatatgaggttaagctgactgttcatgggtttgtaaacccaacttcatttgtgtatggatcaaatgatgaaaatgagcctgaaacgtgcatggtggagaaaatgaacttaactttccatgttatcaacactggcaatagtatggctcccaatgttagtgtggaaataatggtaccaaattcttttagcccccaaactgataagctgttcaacattttggatgtccagactactactggagaatgccactttgaaaattatcaaagagtgtgtgcattagagcagcaaaagagtgcaatgcagaccttgaaaggcatagtccggttcttgtccaagactgataagaggctattgtactgcataaaagctgatccacattgtttaaatttcttgtgtaattttgggaaaatggaaagtggaaaagaagccagtgttcatatccaactggaaggccggccatccattttagaaatggatgagacttcagcactcaagtttgaaataagagcaacaggttttccagagccaaatccaagagtaattgaactaaacaaggatgagaatgttgcgcatgttctactggaaggactacatcatcaaagacccaaacgttatttcaccatagtgattatttcaagtagcttgctacttggacttattgtacttctgttgatctcatatgttatgtggaaggctggcttctttaaaagacaatacaaatctatcctacaagaagaaaacagaagagacagttggagttatatcaacagtaaaagcaatgatgattaaggacttctttcaaattgagagaatggaaaacagactcaggttgtagtaaagaaatttaaaagacactgtttacaagaaaaaatgaattttgtttggacttcttttactcatgatcttgtgacatattatgtcttcatgcaaggggaaaatctcagcaatgattactctttgagatagaagaactgcaaaggtaataatacagccaaagataatctctcagcttttaaatgggtagagaaacactaaagcattcaatttattcaagaaaagtaagcccttgaagatatcttgaaatgaaagtataactgagttaaattatactggagaagtcttagacttgaaatactacttaccatatgtgcttgcctcagtaaaatgaaccccactgggtgggcagaggttcatttcaaatacatctttgatacttgttcaaaatatgttctttaaaaatataattttttagagagctgttcccaaattttctaacgagtggaccattatcactttaaagccctttatttataatacatttcctacgggctgtgttccaacaaccattttttttcagcagactatgaatattatagtattataggccaaactggcaaacttcagactgaacatgtacactggtttgagcttagtgaaatgacttctggataattatttttttataattatggatttcaccatctttctttctgtatatatacatgtgtttttatgtaggtatatatttaccattcttcctatctattcttcctataacacacctttatcaagcatacccaggagtaatcttcaaatcttttgttatattctgaaacaaaagattgtgagtgttgcactttacctgattacacgctgatttagaaaatacagaaaccatacctcactaataactttaaaatcaaagctgtgcaaagactagggggcctatacttcatatgtattatgtactatgtaaaatattgactatcacacaactattt

SEQ ID NO: 416523 - DNA, 3961 bp, Homo sapiens
tggcgacagggagctcagtgggcagcacagctcacgtctgagcgcacgtgcacgtgtctcgctttaggctcctagtgggtgcgcccactgccaactggctcgccaacgcttcagtgatcaatcccggggcgatttacagatgcaggatcggaaagaatcccggccagacgtgcgaacagctccagctgggtagccctaatggagaaccttgtggaaagacttgtttggaagagagagacaatcagtggttgggggtcacactttccagacagccaggagaaaatggatccatcgtgacttgtgggcatagatggaaaaatatattttacataaagaatgaaaataagctccccactggtggttgctatggagtgccccctgatttacgaacagaactgagtaaaagaatagctccgtgttatcaagattatgtgaaaaaatttggagaaaattttgcatcatgtcaagctggaatatccagtttttacacaaaggatttaattgtgatgggggccccaggatcatcttactggactggctctctttttgtctacaatataactacaaataaatacaaggcttttttagacaaacaaaatcaagtaaaatttggaagttatttaggatattcagtcggagctggtcattttcggagccagcatactaccgaagtagtcggaggagctcctcaacatgagcagattggtaaggcatatatattcagcattgatgaaaaagaactaaatatcttacatgaaatgaaaggtaaaaagcttggatcgtactttggagcttctgtctgtgctgtggacctcaatgcagatggcttctcagatctgctcgtgggagcacccatgcagagcaccatcagagaggaaggaagagtgtttgtgtacatcaactctggctcgggagcagtaatgaatgcaatggaaacaaacctcgttggaagtgacaaatatgctgcaagatttggggaatctatagttaatcttggcgacattgacaatgatggctttgaagatgttgctatcggagctccacaagaagatgacttgcaaggtgctatttatatttacaatggccgtgcagatgggatctcgtcaaccttctcacagagaattgaaggacttcagatcagcaaatcgttaagtatgtttggacagtctatatcaggacaaattgatgcagataataatggctatgtagatgtagcagttggtgcttttcggtctgattctgctgtcttgctaaggacaagacctgtagtaattgttgacgcttctttaagccaccctgagtcagtaaatagaacgaaatttgactgtgttgaaaatggatggccttctgtgtgcatagatctaacactttgtttctcatataagggcaaggaagttccaggttacattgttttgttttataacatgagtttggatgtgaacagaaaggcagagtctccaccaagattctatttctcttctaatggaacttctgacgtgattacaggaagcatacaggtgtccagcagagaagctaactgtagaacacatcaagcatttatgcggaaagatgtgcgggacatcctcaccccaattcagattgaagctgcttaccaccttggtcctcatgtcatcagtaaacgaagtacagaggaattcccaccacttcagccaattcttcagcagaagaaagaaaaagacataatgaaaaaaacaataaactttgcaaggttttgtgcccatgaaaattgttctgctgatttacaggtttctgcaaagattgggtttttgaagccccatgaaaataaaacatatcttgctgttgggagtatgaagacattgatgttgaatgtgtccttgtttaatgctggagatgatgcatatgaaacgactctacatgtcaaactacccgtgggtctttatttcattaagattttagagctggaagagaagcaaataaactgtgaagtcacagataactctggcgtggtacaacttgactgcagtattggctatatatatgtagatcatctctcaaggatagatattagctttctcctggatgtgagctcactcagcagagcggaagaggacctcagtatcacagtgcatgctacctgtgaaaatgaagaggaaatggacaatctaaagcacagcagagtgactgtagcaatacctttaaaatatgaggttaagctgactgttcatgggtttgtaaacccaacttcatttgtgtatggatcaaatgatgaaaatgagcctgaaacgtgcatggtggagaaaatgaacttaactttccatgttatcaacactggcaatagtatggctcccaatgttagtgtggaaataatggtaccaaattcttttagcccccaaactgataagctgttcaacattttggatgtccagactactactggagaatgccactttgaaaattatcaaagagtgtgtgcattagagcagcaaaagagtgcaatgcagaccttgaaaggcatagtccggttcttgtccaagactgataagaggctattgtactgcataaaagctgatccacattgtttaaatttcttgtgtaattttgggaaaatggaaagtggaaaagaagccagtgttcatatccaactggaaggccggccatccattttagaaatggatgagacttcagcactcaagtttgaaataagagcaacaggttttccagagccaaatccaagagtaattgaactaaacaaggatgagaatgttgcgcatgttctactggaaggactacatcatcaaagacccaaacgttatttcaccatagtgattatttcaagtagcttgctacttggacttattgtacttctgttgatctcatatgttatgtggaaggctggcttctttaaaagacaatacaaatctatcctacaagaagaaaacagaagagacagttggagttatatcaacagtaaaagcaatgatgattaaggacttctttcaaattgagagaatggaaaacagactcaggttgtagtaaagaaatttaaaagacactgtttacaagaaaaaatgaattttgtttggacttcttttactcatgatcttgtgacatattatgtcttcatgcaaggggaaaatctcagcaatgattactctttgagatagaagaactgcaaaggtaataatacagccaaagataatctctcagcttttaaatgggtagagaaacactaaagcattcaatttattcaagaaaagtaagcccttgaagatatcttgaaatgaaagtataactgagttaaattatactggagaagtcttagacttgaaatactacttaccatatgtgcttgcctcagtaaaatgaaccccactgggtgggcagaggttcatttcaaatacatctttgatacttgttcaaaatatgttctttaaaaatataattttttagagagctgttcccaaattttctaacgagtggaccattatcactttaaagccctttatttataatacatttcctacgggctgtgttccaacaaccattttttttcagcagactatgaatattatagtattataggccaaactggcaaacttcagactgaacatgtacactggtttgagcttagtgaaatgacttctggataattatttttttataattatggatttcaccatctttctttctgtatatatacatgtgtttttatgtaggtatatatttaccattcttcctatctattcttcctataacacacctttatcaagcatacccaggagtaatcttcaaatcttttgttatattctgaaacaaaagattgtgagtgttgcactttacctgattacacgctgatttagaaaatacagaaaccatacctcactaataactttaaaatcaaagctgtgcaaagactagggggcctatacttcatatgtattatgtactatgtaaaatattgactatcacacaactattt

SEQ ID NO: 416524 - DNA, 557 bp, Homo sapiens
atgttccaatatcatttttcacatttctgcaaggttaaggccattttatcagcttagaacctatatccaacctgctgtaatttggctgggtttttgtgtttctgccacagacatttaatcactcccaaatctgtcaaaaaaatttctacaatttcagaggtacttgatatattttagcaaagataagctactggaacttttaaaaccaggttgctttttgctgttttttccagtgttgaaagataagatttctcttgctttctgtcttcatagactactactggagaatgccactttgaaaattatcaaagagtgtgtgcattagagcagcaaaagagtgcaatgcagaccttgaaaggcatagtccggttcttgtccaagactgataagaggctattggtaagtttcagtttttcaggttgtagttcctgctttccaacagagaagtgagacacttaaaatcaagtcaatgggtttgagctgtcacttcaataataagagagaagacaagtttaggtagtattcttgcgtggaaggaacaagcatggttggaaagt

SEQ ID NO: 416525 - DNA, 439 bp, Homo sapiens
atgcggtggtggggtggagaacaatggtaaatggtaacttacctctttctgtagtctaatatttaaatcaagttatttgcaaggtagctgtttaatcaaaggatttcaataaaatgatactatataaattaataccaagaccacactttgggaaccaaaggaggcactgcagttaattttaagtggtgaaataaattggggaaggtaaattgtgaaaacctctagctagaaggtaaagatcctgataaattatgtctttatgaaataaaccaggctatggtgatccttcttttattaaacaggatgagacttcagcactcaagtttgaaataagagcaacaggttttccagagccaaatccaagagtaattgaactaaacaaggatgagaatgttgcgcatgtaagattaccctcttaactgctacattaaaattatag

SEQ ID NO: 416526 - DNA, 5351 bp, Homo sapiens
  misc_feature (90)..(90): n is a, c, g, or t
ggcagggcacacctggattgcattagaatgagactcactacccagttcaggtgtgttgcgttgtgggtctccggcacatttcagaggctnattaggaccctgaccccacactggggtttacacccctaaaagcaggtgtgtcccgtggcaactgagtgggtgcgtgaaaaggggggatcatcaattaccagctggagcaatcgaatcggttaaagtgaatcaagtcacagtgcttccttaacccaacctctctgttggggtcagccacagcctaaaccgcctgccgttcagcctgagaggctgctgctagcctgctcacgcatgcagcccgggctgcagaggaagtgtggggaggaaggaagtgggtatagaagggtgctgagatgtgggtcttgaagagaatagccataacgtctttgtcactaaaatgttccccaggggccttcggcgagtctttttgtttggttttttgtttttaatctgtggctcttgataatttatctagtggttgcctacacctgaaaaacaagacacagtgtttaactatcaacgaaagaactggacggctccccgccgcagtcccactccccgagtttgtggctggcatttgggccacgccgggctgggcggtcacagcgaggggcgcgcagtttggggtcacacagctccgcttctaggccccaaccaccgttaaaaggggaagcccgtgccccatcaggtccgctcttgctgagcccagagccatcccgcgctctgcgggctgggaggcccgggccaggacgcgagtcctgcgcagccgaggttccccagcgccccctgcagccgcgcgtaggcagagacggagcccggccctgcgcctccgcaccacgcccgggaccccacccagcggcccgtacccggagaagcagcgcgagcacccgaagctcccggctggcggcagaaaccgggagtggggccgggcgagtgcgcggcatcccaggccggcccgaacgctccgcccgcggtgggccgacttcccctcctcttccctctctccttcctttagcccgctggcgccggacacgctgcgcctcatctcttggggcgttcttccccgttggccaaccgtcgcatcccgtgcaactttggggtagtggccgtttagtgttgaatgttccccaccgagagcgcatggcttgggaagcgaggcgcgaacccggcccccgaagccgccgtccgggagacggtgatgctgttgctgtgcctgggggtcccgaccggccgcccctacaacgtggacactgagagcgcgctgctttaccagggcccccacaacacgctgttcggctactcggtcgtgctgcacagccacggggcgaaccgatggctcctagtgggtgcgcccactgccaactggctcgccaacgcttcagtgatcaatcccggggcgatttacagatgcaggatcggaaagaatcccggccagacgtgcgaacagctccagctgggtagccctaatggagaaccttgtggaaagacttgtttggaagagagagacaatcagtggttgggggtcacactttccagacagccaggagaaaatggatccatcgtggtaggtattggaactggtccacagatccatcgtgaaatcagctatcctgggtgcagctttcacatcatttggtctacttttattttattcagacttgtgggcatagatggaaaaatatattttacataaagaatgaaaataagctccccactggtggttgctatggagtgccccctgatttacgaacagaactgagtaaaagaatagctccgtgttatcaagattatgtgaaaaaatttggagaaaattttgcatcatgtcaagctggaatatccagtttttacacaaaggatttaattgtgatgggggccccaggatcatcttactggactggctctctttttgtctacaatataactacaaataaatacaaggcttttttagacaaacaaaatcaagtaaaatttggaagttatttaggatattcagtcggagctggtcattttcggagccagcatactaccgaagtagtcggaggagctcctcaacatgagcagattggtaaggcatatatattcagcattgatgaaaaagaactaaatatcttacatgaaatgaaaggtaaaaagcttggatcgtactttggagcttctgtctgtgctgtggacctcaatgcagatggcttctcagatctgctcgtgggagcacccatgcagagcaccatcagagaggaaggaagagtgtttgtgtacatcaactctggctcgggagcagtaatgaatgcaatggaaacaaacctcgttggaagtgacaaatatgctgcaagatttggggaatctatagttaatcttggcgacattgacaatgatggctttgaagatgttgctatcggagctccacaagaagatgacttgcaaggtgctatttatatttacaatggccgtgcagatgggatctcgtcaaccttctcacagagaattgaaggacttcagatcagcaaatcgttaagtatgtttggacagtctatatcaggacaaattgatgcagataataatggctatgtagatgtagcagttggtgcttttcggtctgattctgctgtcttgctaaggacaagacctgtagtaattgttgacgcttctttaagccaccctgagtcagtaaatagaacgaaatttgactgtgttgaaaatggatggccttctgtgtgcatagatctaacactttgtttctcatataagggcaaggaagttccaggttacattgttttgttttataacatgagtttggatgtgaacagaaaggcagagtctccaccaagattctatttctcttctaatggaacttctgacgtgattacaggaagcatacaggtgtccagcagagaagctaactgtagaacacatcaagcatttatgcggaaagatgtgcgggacatcctcaccccaattcagattgaagctgcttaccaccttggtcctcatgtcatcagtaaacgaagtacagaggaattcccaccacttcagccaattcttcagcagaagaaagaaaaagacataatgaaaaaaacaataaactttgcaaggttttgtgcccatgaaaattgttctgctgatttacaggtttctgcaaagattgggtttttgaagccccatgaaaataaaacatatcttgctgttgggagtatgaagacattgatgttgaatgtgtccttgtttaatgctggagatgatgcatatgaaacgactctacatgtcaaactacccgtgggtctttatttcattaagattttagagctggaagagaagcaaataaactgtgaagtcacagataactctggcgtggtacaacttgactgcagtattggctatatatatgtagatcatctctcaaggatagatattagctttctcctggatgtgagctcactcagcagagcggaagaggacctcagtatcacagtgcatgctacctgtgaaaatgaagaggaaatggacaatctaaagcacagcagagtgactgtagcaatacctttaaaatatgaggttaagctgactgttcatgggtttgtaaacccaacttcatttgtgtatggatcaaatgatgaaaatgagcctgaaacgtgcatggtggagaaaatgaacttaactttccatgttatcaacactggcaatagtatggctcccaatgttagtgtggaaataatggtaccaaattcttttagcccccaaactgataagctgttcaacattttggatgtccagactactactggagaatgccactttgaaaattatcaaagagtgtgtgcattagagcagcaaaagagtgcaatgcagaccttgaaaggcatagtccggttcttgtccaagactgataagaggctattgtactgcataaaagctgatccacattgtttaaatttcttgtgtaattttgggaaaatggaaagtggaaaagaagccagtgttcatatccaactggaaggccggccatccattttagaaatggatgagacttcagcactcaagtttgaaataagagcaacaggttttccagagccaaatccaagagtaattgaactaaacaaggatgagaatgttgcgcatgttctactggaaggactacatcatcaaagacccaaacgttatttcaccatagtgattatttcaagtagcttgctacttggacttattgtacttctgttgatctcatatgttatgtggaaggctggcttctttaaaagacaatacaaatctatcctacaagaagaaaacagaagagacagttggagttatatcaacagtaaaagcaatgatgattaaggacttctttcaaattgagagaatggaaaacagactcaggttgtagtaaagaaatttaaaagacactgtttacaagaaaaaatgaattttgtttggacttcttttactcatgatcttgtgacatattatgtcttcatgcaaggggaaaatctcagcaatgattactctttgagatagaagaactgcaaaggtaataatacagccaaagataatctctcagcttttaaatgggtagagaaacactaaagcattcaatttattcaagaaaagtaagcccttgaagatatcttgaaatgaaagtataactgagttaaattatactggagaagtcttagacttgaaatactacttaccatatgtgcttgcctcagtaaaatgaaccccactgggtgggcagaggttcatttcaaatacatctttgatacttgttcaaaatatgttctttaaaaatataattttttagagagctgttcccaaattttctaacgagtggaccattatcactttaaagccctttatttataatacatttcctacgggctgtgttccaacaaccattttttttcagcagactatgaatattatagtattataggccaaactggcaaacttcagactgaacatgtacactggtttgagcttagtgaaatgacttctggataattatttttttataattatggatttcaccatctttctttctgtatatatacatgtgtttttatgtaggtatatatttaccattcttcctatctattcttcctataacacacctttatcaagcatacccaggagtaatcttcaaatcttttgttatattctgaaacaaaagattgtgagtgttgcactttacctgattacacgctgatttagaaaatacagaaaccatacctcactaataactttaaaatcaaagctgtgcaaagactagggggcctatacttcatatgtattatgtactatgtaaaatattgactatcacacaactattt

SEQ ID NO: 416527 - DNA, 4053 bp, Homo sapiens
tggcgacagggagctcagtgggcagcacagctcacgtctgagcgcacgtgcacgtgtctcgctttaggctcctagtgggtgcgcccactgccaactggctcgccaacgcttcagtgatcaatcccggggcgatttacagatgcaggatcggaaagaatcccggccagacgtgcgaacagctccagctgggtagccctaatggagaaccttgtggaaagacttgtttggaagagagagacaatcagtggttgggggtcacactttccagacagccaggagaaaatggatccatcgtggtaggtattggaactggtccacagatccatcgtgaaatcagctatcctgggtgcagctttcacatcatttggtctacttttattttattcagacttgtgggcatagatggaaaaatatattttacataaagaatgaaaataagctccccactggtggttgctatggagtgccccctgatttacgaacagaactgagtaaaagaatagctccgtgttatcaagattatgtgaaaaaatttggagaaaattttgcatcatgtcaagctggaatatccagtttttacacaaaggatttaattgtgatgggggccccaggatcatcttactggactggctctctttttgtctacaatataactacaaataaatacaaggcttttttagacaaacaaaatcaagtaaaatttggaagttatttaggatattcagtcggagctggtcattttcggagccagcatactaccgaagtagtcggaggagctcctcaacatgagcagattggtaaggcatatatattcagcattgatgaaaaagaactaaatatcttacatgaaatgaaaggtaaaaagcttggatcgtactttggagcttctgtctgtgctgtggacctcaatgcagatggcttctcagatctgctcgtgggagcacccatgcagagcaccatcagagaggaaggaagagtgtttgtgtacatcaactctggctcgggagcagtaatgaatgcaatggaaacaaacctcgttggaagtgacaaatatgctgcaagatttggggaatctatagttaatcttggcgacattgacaatgatggctttgaagatgttgctatcggagctccacaagaagatgacttgcaaggtgctatttatatttacaatggccgtgcagatgggatctcgtcaaccttctcacagagaattgaaggacttcagatcagcaaatcgttaagtatgtttggacagtctatatcaggacaaattgatgcagataataatggctatgtagatgtagcagttggtgcttttcggtctgattctgctgtcttgctaaggacaagacctgtagtaattgttgacgcttctttaagccaccctgagtcagtaaatagaacgaaatttgactgtgttgaaaatggatggccttctgtgtgcatagatctaacactttgtttctcatataagggcaaggaagttccaggttacattgttttgttttataacatgagtttggatgtgaacagaaaggcagagtctccaccaagattctatttctcttctaatggaacttctgacgtgattacaggaagcatacaggtgtccagcagagaagctaactgtagaacacatcaagcatttatgcggaaagatgtgcgggacatcctcaccccaattcagattgaagctgcttaccaccttggtcctcatgtcatcagtaaacgaagtacagaggaattcccaccacttcagccaattcttcagcagaagaaagaaaaagacataatgaaaaaaacaataaactttgcaaggttttgtgcccatgaaaattgttctgctgatttacaggtttctgcaaagattgggtttttgaagccccatgaaaataaaacatatcttgctgttgggagtatgaagacattgatgttgaatgtgtccttgtttaatgctggagatgatgcatatgaaacgactctacatgtcaaactacccgtgggtctttatttcattaagattttagagctggaagagaagcaaataaactgtgaagtcacagataactctggcgtggtacaacttgactgcagtattggctatatatatgtagatcatctctcaaggatagatattagctttctcctggatgtgagctcactcagcagagcggaagaggacctcagtatcacagtgcatgctacctgtgaaaatgaagaggaaatggacaatctaaagcacagcagagtgactgtagcaatacctttaaaatatgaggttaagctgactgttcatgggtttgtaaacccaacttcatttgtgtatggatcaaatgatgaaaatgagcctgaaacgtgcatggtggagaaaatgaacttaactttccatgttatcaacactggcaatagtatggctcccaatgttagtgtggaaataatggtaccaaattcttttagcccccaaactgataagctgttcaacattttggatgtccagactactactggagaatgccactttgaaaattatcaaagagtgtgtgcattagagcagcaaaagagtgcaatgcagaccttgaaaggcatagtccggttcttgtccaagactgataagaggctattgtactgcataaaagctgatccacattgtttaaatttcttgtgtaattttgggaaaatggaaagtggaaaagaagccagtgttcatatccaactggaaggccggccatccattttagaaatggatgagacttcagcactcaagtttgaaataagagcaacaggttttccagagccaaatccaagagtaattgaactaaacaaggatgagaatgttgcgcatgttctactggaaggactacatcatcaaagacccaaacgttatttcaccatagtgattatttcaagtagcttgctacttggacttattgtacttctgttgatctcatatgttatgtggaaggctggcttctttaaaagacaatacaaatctatcctacaagaagaaaacagaagagacagttggagttatatcaacagtaaaagcaatgatgattaaggacttctttcaaattgagagaatggaaaacagactcaggttgtagtaaagaaatttaaaagacactgtttacaagaaaaaatgaattttgtttggacttcttttactcatgatcttgtgacatattatgtcttcatgcaaggggaaaatctcagcaatgattactctttgagatagaagaactgcaaaggtaataatacagccaaagataatctctcagcttttaaatgggtagagaaacactaaagcattcaatttattcaagaaaagtaagcccttgaagatatcttgaaatgaaagtataactgagttaaattatactggagaagtcttagacttgaaatactacttaccatatgtgcttgcctcagtaaaatgaaccccactgggtgggcagaggttcatttcaaatacatctttgatacttgttcaaaatatgttctttaaaaatataattttttagagagctgttcccaaattttctaacgagtggaccattatcactttaaagccctttatttataatacatttcctacgggctgtgttccaacaaccattttttttcagcagactatgaatattatagtattataggccaaactggcaaacttcagactgaacatgtacactggtttgagcttagtgaaatgacttctggataattatttttttataattatggatttcaccatctttctttctgtatatatacatgtgtttttatgtaggtatatatttaccattcttcctatctattcttcctataacacacctttatcaagcatacccaggagtaatcttcaaatcttttgttatattctgaaacaaaagattgtgagtgttgcactttacctgattacacgctgatttagaaaatacagaaaccatacctcactaataactttaaaatcaaagctgtgcaaagactagggggcctatacttcatatgtattatgtactatgtaaaatattgactatcacacaactattt

SEQ ID NO: 416528 - DNA, 4097 bp, Homo sapiens
  misc_feature (90)..(90): n is a, c, g, or t
ggcagggcacacctggattgcattagaatgagactcactacccagttcaggtgtgttgcgttgtgggtctccggcacatttcagaggctnattaggaccctgaccccacactggggtttacacccctaaaagcaggtgtgtcccgtggcaactgagtgggtgcgtgaaaaggggggatcatcaattaccagctggagcaatcgaatcggttaaagtgaatcaagtcacagtgcttccttaacccaacctctctgttggggtcagccacagcctaaaccgcctgccgttcagcctgagaggctgctgctagcctgctcacgcatgcagcccgggctgcagaggaagtgtggggaggaaggaagtgggtatagaagggtgctgagatgtgggtcttgaagagaatagccataacgtctttgtcactaaaatgttccccaggggccttcggcgagtctttttgtttggttttttgtttttaatctgtggctcttgataatttatctagtggttgcctacacctgaaaaacaagacacagtgtttaactatcaacgaaagaactggacggctccccgccgcagtcccactccccgagtttgtggctggcatttgggccacgccgggctgggcggtcacagcgaggggcgcgcagtttggggtcacacagctccgcttctaggccccaaccaccgttaaaaggggaagcccgtgccccatcaggtccgctcttgctgagcccagagccatcccgcgctctgcgggctgggaggcccgggccaggacgcgagtcctgcgcagccgaggttccccagcgccccctgcagccgcgcgtaggcagagacggagcccggccctgcgcctccgcaccacgcccgggaccccacccagcggcccgtacccggagaagcagcgcgagcacccgaagctcccggctggcggcagaaaccgggagtggggccgggcgagtgcgcggcatcccaggccggcccgaacgctccgcccgcggtgggccgacttcccctcctcttccctctctccttcctttagcccgctggcgccggacacgctgcgcctcatctcttggggcgttcttccccgttggccaaccgtcgcatcccgtgcaactttggggtagtggccgtttagtgttgaatgttccccaccgagagcgcatggcttgggaagcgaggcgcgaacccggcccccgaagccgccgtccgggagacggtgatgctgttgctgtgcctgggggtcccgaccggccgcccctacaacgtggacactgagagcgcgctgctttaccagggcccccacaacacgctgttcggctactcggtcgtgctgcacagccacggggcgaaccgatggctcctagtgggtgcgcccactgccaactggctcgccaacgcttcagtgatcaatcccggggcgatttacagatgcaggatcggaaagaatcccggccagacgtgcgaacagctccagctgggtagccctaatggagaaccttgtggaaagacttgtttggaagagagagacaatcagtggttgggggtcacactttccagacagccaggagaaaatggatccatcgtggtaggtattggaactggtccacagatccatcgtgaaatcagctatcctgggtgcagctttcacatcatttggtctacttttattttattcagacttgtgggcatagatggaaaaatatattttacataaagaatgaaaataagctccccactggtggttgctatggagtgccccctgatttacgaacagaactgagtaaaagaatagctccgtgttatcaagattatgtgaaaaaatttggagaaaattttgcatcatgtcaagctggaatatccagtttttacacaaaggatttaattgtgatgggggccccaggatcatcttactggactggctctctttttgtctacaatataactacaaataaatacaaggcttttttagacaaacaaaatcaagtaaaatttggaagttatttaggatattcagtcggagctggtcattttcggagccagcatactaccgaagtagtcggaggagctcctcaacatgagcagattggtaaggcatatatattcagcattgatgaaaaagaactaaatatcttacatgaaatgaaaggtaaaaagcttggatcgtactttggagcttctgtctgtgctgtggacctcaatgcagatggcttctcagatctgctcgtgggagcacccatgcagagcaccatcagagaggaaggaagagtgtttgtgtacatcaactctggctcgggagcagtaatgaatgcaatggaaacaaacctcgttggaagtgacaaatatgctgcaagatttggggaatctatagttaatcttggcgacattgacaatgatggctttgaaggtaattaaaattatcaaattggtgcttgatttctgcttttaaaatggtttatggaagaaaatatgattaaagttttgtattgttttccttcctatagaagatggagccagaatggcatgctaagttttttcttttctttagtgttatatatgacttctcctcaattgtcacccattgatctttaccactgttaataatggatgatattcaaaataccttatttcagtgattctaaggcaccattgattagaaactgcattattatttatgtgtccctaaaagctacctattaagctgttacacccaccatttttctgttaaggaagatcctgatttcagaaataataaaatatgggcaggaaatgtgttatcatagactcattggaccacggtatttaactatcagtacaataaagacactgaccaaacccaacagaggctggctgcagagctggagcagggttctggaagcccctgctctgccaggcattccctatagctatgttgtggaggatctggggaattcaagaagagattctgagcaggccactgggaggcctggggacagtggctgtttacccactgatattgacgttttttattaattgaatagatggtagtgtggtaactgtgcatattgccatggatgtcagtcctgttgttgaaatccctgcatctactagcatttactgttaaaaatttgcttttatcaatctagttctaagtggtaagtaactgagtctgttaaaactgtgcataaaatggtgaataggtttaagaggagagtgtgcagtttcatggagttcagcacataagtatttgatacttatttttagggttcataattgtcttcttgataaggccattggcaattagtatacggtagttttaggctaaagctttctcagagattaaagtgctggggtactataaattctcatctccttaatgtcttcttgtacctagataccacaatctactttaaatatataaaatgcattattctacataaaaagtcagttattgaatacatgcttccagtgaaccttcttaaacgtaagatagtgtaacttgttatacaagtattactgttctggattttttgtttactattttaaaactgaaagaaaaaaataggtgtatatacttttggttattacgattacacataatttttttaaaaaacatgtatgaatgggagcctctctgtaccccacccatcactagcttccccctacttcccttaccctcccaggaccccaggttgggcattggctcattttcataaataacctcatcccagacaggggtgagggaaggtgttgtggctgttttgtttaaattggagctgtaagagggatcatgtcatattttatgcccttcctagaaaggggacgggacacctggtttgcattcctgtattgaccactgctgccgtcactcgtcacattgagttcacatctcctgagagtttgtataaattcaggtcagcgctgctcctatgcagccatccagtgtcatagaaaagcaattcactgataactgatctctccattcagaagtgtgcagttttaatgtatagcaataagaaattgttatttatctattacaagcctggtttgattaaaaacaaaaaataaaatgttattatgcttgatgttacatctcataagtaaaaaaaaaa

SEQ ID NO: 416529 - DNA, 2183 bp, Homo sapiens
cgctccaccagatccgcgggagccccactgctctccgggtccttggcttgtggctgtgggtcccatcgggcccgccctcgcacgtcactccgggacccccgcggcctccgcaggttctgcgctccaggccggagtcagagactccaggatcggttctttcatcttcgccgcccctgcgcgtccagctcttctaagacgagatgccgtcgggcttccaacagataggctccgaagatggggaaccccctcagcagcgagtgactgggaccctggtccttgctgtgttctctgcggtgcttggctccctgcagtttgggtacaacattggggtcatcaatgcccctcagaaggtgattgaacagagctacaatgagacgtggctggggaggcaggggcctgagggacccagctccatccctccaggcaccctcaccaccctctgggccctctccgtggccatcttttccgtgggcggcatgatttcctccttcctcattggtatcatctctcagtggcttggaaggaaaagggccatgctggtcaacaatgtcctggcggtgctggggggcagcctcatgggcctggccaacgctgctgcctcctatgaaatgctcatccttggacgattcctcattggcgcctactcagggctgacatcagggctggtgcccatgtacgtgggggagattgctcccactcacctgcggggcgccctggggacgctcaaccaactggccattgttatcggcattctgatcgcccaggtgctgggcttggagtccctcctgggcactgccagcctgtggccactgctcctgggcctcacagtgctacctgccctcctgcagctggtcctgctgcccttctgtcccgagagcccccgctacctctacatcatccagaatctcgaggggcctgccagaaagagtctgaagcgcctgacaggctgggccgatgtttctggagtgctggctgagctgaaggatgagaagcggaagctggagcgtgagcggccactgtccctgctccagctcctgggcagccgtacccaccggcagcccctgatcattgcggtcgtgctgcagctgagccagcagctctctggcatcaatgctgttttctattattcgaccagcatcttcgagacagcaggggtaggccagcctgcctatgccaccataggagctggtgtggtcaacacagtcttcaccttggtctcggtgttgttggtggagcgggcggggcgccggacgctccatctcctgggcctggcgggcatgtgtggctgtgccatcctgatgactgtggctctgctcctgctggagcgagttccagccatgagctacgtctccattgtggccatctttggcttcgtggcattttttgagattggccctggccccattccttggttcatcgtggccgagctcttcagccagggaccccgcccggcagccatggctgtggctggtttctccaactggacgagcaacttcatcattggcatgggtttccagtatgttgcggaggctatggggccctacgtcttccttctatttgcggtcctcctgctgggcttcttcatcttcaccttcttaagagtacctgaaactcgaggccggacgtttgaccagatctcagctgccttccaccggacaccctctcttttagagcaggaggtgaaacccagcacagaacttgagtatttagggccagatgagaacgactgaggggccaggcaggggtgggagagccagctctctctacccggcccagagaccccttcctttcctctgcagcactttaaccctctcttccctattatttccgggtggaaaagaatccctgcagcctggtagaattgggaagctgggggaagggtggtctgagcaccccctcattcccctcgtgtgactctcttggattatttatgtgttgtggtttggccgtggccatcagggtgggccactctcccctccctcttccttcccccatcccctttcctccccaccttccccagactcagctccagaataccttcttcgctgctagagaagggggattggagggaagacaggtctagactttctcagtgggacaaaccagagcagagagcaggacaggagacaagaaatccagtttcccaccaccttggactcctcccacaatctgggactttcact

SEQ ID NO: 416530 - DNA, 1934 bp, Homo sapiens
gctgatgataataatgcacgtgttaatttatgaaaccagcactgtcaaggatattgttaacatgtgatgttgattttcacaacactctcacagataggtaggcaaggcaggcaacatcacccccatctcacagaggacactcaggttcggggcagggaagtgacttggccaaggtcacacaaatctgagctcttaaggccaagcctgtctcaaggtcacagaagaattttgagacaagttctcaaacatttctctgccttatggacccaaacatccagtttctcctttatgcccaggttgcagttcagctcctgtttacattgagatctttgtgcaattcctaatatggcccagtttccctcacccaacatgttgggtggagcccagtatcttcaggctccagctgggcccgggcccctagcggaaggaaaaaaatcatggttccatgtgacatgctgtgtctttgtgtctgcctgttcaggatggggaaccccctcagcagcgagtgactgggaccctggtccttgctgtgttctctgcggtgcttggctccctgcagtttgggtacaacattggggtcatcaatgcccctcagaaggtgattgaacagagctacaatgagacgtggctggggaggcaggggcctgagggacccagctccatccctccaggcaccctcaccaccctctgggccctctccgtggccatcttttccgtgggcggcatgatttcctccttcctcattggtatcatctctcagtggcttggaaggaaaagggccatgctggtcaacaatgtcctggcggtgctggggggcagcctcatgggcctggccaacgctgctgcctcctatgaaatgctcatccttggacgattcctcattggcgcctactcagggctgacatcagggctggtgcccatgtacgtgggggagattgctcccactcacctgcggggcgccctggggacgctcaaccaactggccattgttatcggcattctgatcgcccaggtgctgggcttggagtccctcctgggcactgccagcctgtggccactgctcctgggcctcacagtgctacctgccctcctgcagctggtcctgctgcccttctgtcccgagagcccccgctacctctacatcatccagaatctcgaggggcctgccagaaagagtctgaagcgcctgacaggctgggccgatgtttctggagtgctggctgagctgaaggatgagaagcggaagctggagcgtgagcggccactgtccctgctccagctcctgggcagccgtacccaccggcagcccctgatcattgcggtcgtgctgcagctgagccagcagctctctggcatcaatgctgttttctattattcgaccagcatcttcgagacagcaggggtaggccagcctgcctatgccaccataggagctggtgtggtcaacacagtcttcaccttggtctcggtgttgttggtggagcgggcggggcgccggacgctccatctcctgggcctggcgggcatgtgtggctgtgccatcctgatgactgtggctctgctcctgctggagcgagttccagccatgagctacgtctccattgtggccatctttggcttcgtggcattttttgagattggccctggccccattccttggttcatcgtggccgagctcttcagccagggaccccgcccggcagccatggctgtggctggtttctccaactggacgagcaacttcatcattggcatgggtttccagtatgttgcggtaggtccccccgccccagcctcccacaccgtaggccagaggtgggcatcacacagctagcccacctgcttccccgtcagggactcctccagccacagaccatgggtctttgggtcagtttggtggaccacctgctccacagaatcaaagcaaggaaggg

SEQ ID NO: 416531 - DNA, 557 bp, Homo sapiens
gtggtctgctcctgagggatttgggctgcactgggaggcagctgtggcacaactctggcagccaggagggagagcccctgtcaagcctcaggaacaatcattcctaaggacccagctttagagtccagggagagctgaccgtcataagaactgagaggccataacatttcctctgccttgaacccacttgggatagccagcagaatgccagtcaagggcctgctctaacccgggacagcaggccccctacaagctgctgcggagggggttaggtttcacttctctgagttgagggcaagggaagatcagaaaggcctcaactggattctccaccctccctgtctggcccctaggagcgagttccagccatgagctacgtctccattgtggccatctttggcttcgtggcattttttgagattggccctggccccattccttggttcatcgtggccgagctcttcagccagggaccccgcccggcagccatggctgtggctggtttctccaactggacgagcaacttcatcattggcatgggtttccagtatgttgcg

SEQ ID NO: 416532 - DNA, 1686 bp, Homo sapiens
cgctccaccagatccgcgggagccccactgctctccgggtccttggcttgtggctgtgggtcccatcgggcccgccctcgcacgtcactccgggacccccgcggcctccgcaggttctgcgctccaggccggagtcagagactccaggatcggttctttcatcttcgccgcccctgcgcgtccagctcttctaagacgagatgccgtcgggcttccaacagataggctccgaagatggggaaccccctcagcagcgagtgactgggaccctggtccttgctgtgttctctgcggtgcttggctccctgcagtttgggtacaacattggggtcatcaatgcccctcagaaggtgattgaacagagctacaatgagacgtggctggggaggcaggggcctgagggacccagctccatccctccaggcaccctcaccaccctctgggccctctccgtggccatcttttccgtgggcggcatgatttcctccttcctcattggtatcatctctcagtggcttggaaggaaaagggccatgctggtcaacaatgtcctggcggtgctggggggcagcctcatgggcctggccaacgctgctgcctcctatgaaatgctcatccttggacgattcctcattggcgcctactcagggctgacatcagggctggtgcccatgtacgtgggggagattgctcccactcacctgcggggcgccctggggacgctcaaccaactggccattgttatcggcattctgatcgcccaggtgctgggcttggagtccctcctgggcactgccagcctgtggccactgctcctgggcctcacagtgctacctgccctcctgcagctggtcctgctgcccttctgtcccgagagcccccgctacctctacatcatccagaatctcgaggggcctgccagaaagagtctgaagcgcctgacaggctgggccgatgtttctggagtgctggctgagctgaaggatgagaagcggaagctggagcgtgagcggccactgtccctgctccagctcctgggcagccgtacccaccggcagcccctgatcattgcggtcgtgctgcagctgagccagcagctctctggcatcaatgctgttttctattattcgaccagcatcttcgagacagcaggggtaggccagcctgcctatgccaccataggagctggtgtggtcaacacagtcttcaccttggtctcggtgttgttggtggagcgggcggggcgccggacgctccatctcctgggcctggcgggcatgtgtggctgtgccatcctgatgactgtggctctgctcctgctggagcgagttccagccatgagctacgtctccattgtggccatctttggcttcgtggcattttttgagattggccctggccccattccttggttcatcgtggccgagctcttcagccagggaccccgcccggcagccatggctgtggctggtttctccaactggacgagcaacttcatcattggcatgggtttccagtatgttgcggtaggtccccccgccccagcctcccacaccgtaggccagaggtgggcatcacacagctagcccacctgcttccccgtcagggactcctccagccacagaccatgggtctttgggtcagtttggtggaccacctgctccacagaatcaaagcaaggaaggg

SEQ ID NO: 416533 - DNA, 3267 bp, Homo sapiens
  misc_feature (27)..(27): n is a, c, g, or t
tatctcgtagcatgttggcctatgggngagtgcgcccgggccgcggatccccaagcccgccacgccgcccagcccggccccgcccgcgccggaagagccacgccggccctgggcagtgacggggttcgggtgaccatggagagtgcgctcaccgcccgtgaccgggtgggggtgcaggatttcgtgctgctggagaacttcaccagcgaggccgccttcatcgagaacctgcggcggcgatttcgggagaatctcatctacacctacattggccccgtcctggtctctgtcaatccctaccgggacctgcagatctacagccggcagcatatggagcgttaccgtggcgtcagcttctatgaagtgccccctcacctgtttgccgtggcggacactgtgtaccgagcactgcgcacggagcgtcgggaccaggctgtgatgatctctggggagagcggggcaggcaagaccgaggccaccaagaggctgctgcagttctatgcagagacctgcccagcccccgagcgcggaggtgccgtgcgggaccggctgctacagagcaacccggtgctggaggcctttggaaatgccaagaccctccggaacgataactccagcaggttcgggaagtacatggatgtgcagtttgacttcaagggtgcccccgtgggtggccacatcctcagttacctcctggaaaagtcacgagtggtgcaccagaatcatggggagcggaacttccacatcttctaccagctgctggaggggggcgaggaggagactcttcgcaggctgggcttggaacggaacccccagagctacctgtacctggtgaagggccagtgtgccaaagtctcctccatcaacgacaagagtgactggaaggtcgtcaggaaggctctgacagtcattgatttcaccgaggatgaagtggaggacctgctgagcatcgtggccagcgtccttcatttgggcaacatccactttgctgccaacgaggagagcaatgcccaggtcaccaccgagaaccagctcaagtatctgaccaggctcctcagcgtggaaggctcgacgctgcgagaagccctgacacacaggaagatcatcgccaagggggaggagctcctgagcccgctgaacctggagcaggccgcgtacgcacgagacgccctcgccaaggctgtgtacagccgcacttttacctggctcgtcgggaagatcaacaggtcgctggcctccaaggacgtggagagccccagctggcggagcaccacggttctcgggctcctggatatttatggctttgaagtgtttcagcataacagctttgagcagttctgcatcaattactgcaacgagaagctgcagcagctcttcatcgagctcacgctcaagtcggagcaggaggagtacgaggcagagggcatcgcgtgggagcccgtccagtatttcaacaacaaaatcatctgtgatctggtggaggagaagtttaagggcatcatctcgattttggatgaggagtgtctgcgccccggggaggccacagacctgaccttcctggagaagctggaggatactgtcaagcaccatccacacttcctgacgcacaagctggctgaccagcggaccaggaaatctctgggccgaggggaattccgccttctgcactatgcgggggaggtgacctacagcgtgaccgggtttctggacaaaaacaatgaccttctcttccggaaccttaaggagaccatgtgtagctcaaagaatcccattatgagccagtgctttgaccggagcgagctcagtgacaagaagcggccagagacggtcgccacccagttcaagatgagcctcctgcagctggtggagatcctgcagtctaaggagcccgcctacgtccgctgcatcaaacccaatgatgccaaacagcccggccgctttgacgaggtgctgatccgccaccaggtgaagtacctggggctgttggaaaacctgcgcgtgcgcagagccggctttgcctatcgccgcaaatacgaagctttcctgcaaaggtacaagtcactgtgcccagagacgtggcccacgtgggcaggacggccgcaggatggggtggctgtgctggtccgacacctgggctacaagccagaagagtacaagatgggcaggaccaagatcttcatccgcttccccaagaccctgtttgccacagaggatgccctggaggtccggcggcagagcctggccacaaagatccaagctgcctggaggggctttcactggcggcagaaattcctccgggtgaagagatcagccatctgcatccagtcgtggtggcgtggaacactgggccggaggaaggcagccaagaggaagtgggcggcacagaccatccggcggctcatccgaggcttcatcctgcgccacgccccccgctgccccgagaacgccttcttcctggaccatgtgcgcacctcttttttgctaaacctgaggcggcagctgccccggaatgtcctggacacctcgtggcccacgcccccacctgccctgcgtgaggcctcagagcttctgcgggagttgtgcataaagaacatggtgtggaaatactgccggagtatcagccctgagtggaagcagcagctgcagcagaaggccgtggctagtgagatcttcaagggcaagaaggataattaccctcagagtgtacccaggctcttcatcagcactcggcttggtacagatgagatcagcccccgagtgctgcaggccttgggctctgagcccattcagtatgcggtgcctgttgtgaaatacgaccgcaagggctacaagcctcgctcccggcagctgctgctcacgcccaacgccgtcgtcatcgtggaggacgccaaagtcaagcagaggattgattacgccaacctgaccggaatctctgtcagcagcctgagcgacagtctttttgtgcttcatgtacagcgtgcggacaataagcaaaagggagatgtggtgctgcagagtgaccacgtgattgagacgctgaccaagacagccctcagtgccaaccgcgtgaacagcatcaacatcaaccagggcagcatcacgtttgcagggggccccggcaggatggcaccattgacttcacacccggctcggagctgctcatcaccaaggccaagaacgggcacctggctgtggtcgccccacggctgaattctcggtgataaaggcgcccactggaccctcccaacgcccaatgctttgcttttc

SEQ ID NO: 416534 - DNA, 3126 bp, Homo sapiens
  misc_feature (27)..(27): n is a, c, g, or t
tatctcgtagcatgttggcctatgggngagtgcgcccgggccgcggatccccaagcccgccacgccgcccagcccggccccgcccgcgccggaagagccacgccggccctgggcagtgacggggttcgggtgaccatggagagtgcgctcaccgcccgtgaccgggtgggggtgcaggatttcgtgctgctggagaacttcaccagcgaggccgccttcatcgagaacctgcggcggcgatttcgggagaatctcatctacacctacattggccccgtcctggtctctgtcaatccctaccgggacctgcagatctacagccggcagcatatggagcgttaccgtggcgtcagcttctatgaagtgccccctcacctgtttgccgtggcggacactgtgtaccgagcactgcgcacggagcgtcgggaccaggctgtgatgatctctggggagagcggggcaggcaagaccgaggccaccaagaggctgctgcagttctatgcagagacctgcccagcccccgagcgcggaggtgccgtgcgggaccggctgctacagagcaacccggtgctggaggcctttggaaatgccaagaccctccggaacgataactccagcaggttcgggaagtacatggatgtgcagtttgacttcaagggtgcccccgtgggtggccacatcctcagttacctcctggaaaagtcacgagtggtgcaccagaatcatggggagcggaacttccacatcttctaccagctgctggaggggggcgaggaggagactcttcgcaggctgggcttggaacggaacccccagagctacctgtacctggtgaagggccagtgtgccaaagtctcctccatcaacgacaagagtgactggaaggtcgtcaggaaggctctgacagtcattgatttcaccgaggatgaagtggaggacctgctgagcatcgtggccagcgtccttcatttgggcaacatccactttgctgccaacgaggagagcaatgcccaggtcaccaccgagaaccagctcaagtatctgaccaggctcctcagcgtggaaggctcgacgctgcgagaagccctgacacacaggaagatcatcgccaagggggaggagctcctgagcccgctgaacctggagcaggccgcgtacgcacgagacgccctcgccaaggctgtgtacagccgcacttttacctggctcgtcgggaagatcaacaggtcgctggcctccaaggacgtggagagccccagctggcggagcaccacggttctcgggctcctggatatttatggctttgaagtgtttcagcataacagctttgagcagttctgcatcaattactgcaacgagaagctgcagcagctcttcatcgagctcacgctcaagtcggagcaggaggagtacgaggcagagggcatcgcgtgggagcccgtccagtatttcaacaacaaaatcatctgtgatctggtggaggagaagtttaagggcatcatctcgattttggatgaggagtgtctgcgccccggggaggccacagacctgaccttcctggagaagctggaggatactgtcaagcaccatccacacttcctgacgcacaagctggctgaccagcggaccaggaaatctctgggccgaggggaattccgccttctgcactatgcgggggaggtgacctacagcgtgaccgggtttctggacaaaaacaatgaccttctcttccggaaccttaaggagaccatgtgtagctcaaagaatcccattatgagccagtgctttgaccggagcgagctcagtgacaagaagcggccagagacggtcgccacccagttcaagatgagcctcctgcagctggtggagatcctgcagtctaaggagcccgcctacgtccgctgcatcaaacccaatgatgccaaacagcccggccgctttgacgaggtgctgatccgccaccaggtgaagtacctggggctgttggaaaacctgcgcgtgcgcagagccggctttgcctatcgccgcaaatacgaagctttcctgcaaaggtacaagtcactgtgcccagagacgtggcccacgtgggcaggacggccgcaggatggggtggctgtgctggtccgacacctgggctacaagccagaagagtacaagatgggcaggaccaagatcttcatccgcttccccaagaccctgtttgccacagaggatgccctggaggtccggcggcagagcctggccacaaagatccaagctgcctggaggggctttcactggcggcagaaattcctccgggtgaagagatcagccatctgcatccagtcgtggtggcgtggaacactgggccggaggaaggcagccaagaggaagtgggcggcacagaccatccggcggctcatccgaggcttcatcctgcgccacgccccccgctgccccgagaacgccttcttcctggaccatgtgcgcacctcttttttgctaaacctgaggcggcagctgccccggaatgtcctggacacctcgtggcccacgcccccacctgccctgcgtgaggcctcagagcttctgcgggagttgtgcataaagaacatggtgtggaaatactgccggagtatcagccctgagtggaagcagcagctgcagcagaaggccgtggctagtgagatcttcaagggcaagaaggataattaccctcagagtgtacccaggctcttcatcagcactcggcttggtacagatgagatcagcccccgagtgctgcaggccttgggctctgagcccattcagtatgcggtgcctgttgtgaaatacgaccgcaagggctacaagcctcgctcccggcagctgctgctcacgcccaacgccgtcgtcatcgtggaggacgccaaagtcaagcagaggattgattacgccaacctgaccggaatctctgtcagcagcctgagcgacagtctttttgtgcttcatgtacagcgtgcggacaataagcaaaagggagatgtggtgctgcagagtgaccacgtgattgagacgctgaccaagacagccctcagtgccaaccgcgtgaacagcatcaacatcaaccagggcaggatcctctagtaacccgggcaacaccgtgcc

SEQ ID NO: 416535 - DNA, 2395 bp, Homo sapiens
  misc_feature (24)..(24): n is a, c, g, or t
gggcccgggtgccctgttcgatgntgtataaaatctctgtgggtcctggcggactaatgtgcaggacctgctgagcatcgtggccagcgtccttcatttgggcaacatccactttgctgccaacgaggagagcaatgcccaggtcaccaccgagaaccagctcaagtatctgaccaggctcctcagcgtggaaggctcgacgctgcgagaagccctgacacacaggaagatcatcgccaagggggaggagctcctgagcccgctgaacctggagcaggccgcgtacgcacgagacgccctcgccaaggctgtgtacagccgcacttttacctggctcgtcgggaagatcaacaggtcgctggcctccaaggacgtggagagccccagctggcggagcaccacggttctcgggctcctggatatttatggctttgaagtgtttcagcataacagctttgagcagttctgcatcaattactgcaacgagaagctgcagcagctcttcatcgagctcacgctcaagtcggagcaggaggagtacgaggcagagggcatcgcgtgggagcccgtccagtatttcaacaacaaaatcatctgtgatctggtggaggagaagtttaagggcatcatctcgattttggatgaggagtgtctgcgccccggggaggccacagacctgaccttcctggagaagctggaggatactgtcaagcaccatccacacttcctgacgcacaagctggctgaccagcggaccaggaaatctctgggccgaggggaattccgccttctgcactatgcgggggaggtgacctacagcgtgaccgggtttctggacaaaaacaatgaccttctcttccggaaccttaaggagaccatgtgtagctcaaagaatcccattatgagccagtgctttgaccggagcgagctcagtgacaagaagcggccagagacggtcgccacccagttcaagatgagcctcctgcagctggtggagatcctgcagtctaaggagcccgcctacgtccgctgcatcaaacccaatgatgccaaacagcccggccgctttgacgaggtgctgatccgccaccaggtgaagtacctggggctgttggaaaacctgcgcgtgcgcagagccggctttgcctatcgccgcaaatacgaagctttcctgcaaaggtacaagtcactgtgcccagagacgtggcccacgtgggcaggacggccgcaggatggggtggctgtgctggtccgacacctgggctacaagccagaagagtacaagatgggcaggaccaagatcttcatccgcttccccaagaccctgtttgccacagaggatgccctggaggtccggcggcagagcctggccacaaagatccaagctgcctggaggggctttcactggcggcagaaattcctccgggtgaagagatcagccatctgcatccagtcgtggtggcgtggaacactgggccggaggaaggcagccaagaggaagtgggcggcacagaccatccggcggctcatccgaggcttcatcctgcgccacgccccccgctgccccgagaacgccttcttcctggaccatgtgcgcacctcttttttgctaaacctgaggcggcagctgccccggaatgtcctggacacctcgtggcccacgcccccacctgccctgcgtgaggcctcagagcttctgcgggagttgtgcataaagaacatggtgtggaaatactgccggagtatcagccctgagtggaagcagcagctgcagcagaaggccgtggctagtgagatcttcaagggcaagaaggataattaccctcagagtgtacccaggctcttcatcagcactcggcttggtacagatgagatcagcccccgagtgctgcaggccttgggctctgagcccattcagtatgcggtgcctgttgtgaaatacgaccgcaagggctacaagcctcgctcccggcagctgctgctcacgcccaacgccgtcgtcatcgtggaggacgccaaagtcaagcagaggattgattacgccaacctgaccggaatctctgtcagcagcctgagcgacagtctttttgtgcttcatgtacagcgtgcggacaataagcaaaagggagatgtggtgctgcagagtgaccacgtgattgagacgctgaccaagacagccctcagtgccaaccgcgtgaacagcatcaacatcaaccagggcagcatcacgtttgcagggggccccggcaggatggcaccattgacttcacacccggctcggagctgctcatcaccaaggccaagaacgggcacctggctgtggtcgccccacggctgaattctcggtgataaaggcgcccactggaccctcccaacgcccaatgctttgcttttc

SEQ ID NO: 416536 - DNA, 1989 bp, Homo sapiens
cgtttctcgcataactgcctatttgcagccagtatcctgcactccaattacttgctatactgcgtaagctgggagctagcctcttcaaacgcagctgctcagtcgaccaagatcggtagcaggatgagatacgaggcaggaagggcatcgcagtgggagcccgtccagtatttcaacaacaaaatcatctgtgatctggtggaggagaagtttaagggcatcatctcgattttggatgaggagtgtctgcgccccggggaggccacagacctgaccttcctggagaagctggaggatactgtcaagcaccatccacacttcctgacgcacaagctggctgaccagcggaccaggaaatctctgggccgaggggaattccgccttctgcactatgcgggggaggtgacctacagcgtgaccgggtttctggacaaaaacaatgaccttctcttccggaaccttaaggagaccatgtgtagctcaaagaatcccattatgagccagtgctttgaccggagcgagctcagtgacaagaagcggccagagacggtcgccacccagttcaagatgagcctcctgcagctggtggagatcctgcagtctaaggagcccgcctacgtccgctgcatcaaacccaatgatgccaaacagcccggccgctttgacgaggtgctgatccgccaccaggtgaagtacctggggctgttggaaaacctgcgcgtgcgcagagccggctttgcctatcgccgcaaatacgaagctttcctgcaaaggtacaagtcactgtgcccagagacgtggcccacgtgggcaggacggccgcaggatggggtggctgtgctggtccgacacctgggctacaagccagaagagtacaagatgggcaggaccaagatcttcatccgcttccccaagaccctgtttgccacagaggatgccctggaggtccggcggcagagcctggccacaaagatccaagctgcctggaggggctttcactggcggcagaaattcctccgggtgaagagatcagccatctgcatccagtcgtggtggcgtggaacactgggccggaggaaggcagccaagaggaagtgggcggcacagaccatccggcggctcatccgaggcttcatcctgcgccacgccccccgctgccccgagaacgccttcttcctggaccatgtgcgcacctcttttttgctaaacctgaggcggcagctgccccggaatgtcctggacacctcgtggcccacgcccccacctgccctgcgtgaggcctcagagcttctgcgggagttgtgcataaagaacatggtgtggaaatactgccggagtatcagccctgagtggaagcagcagctgcagcagaaggccgtggctagtgagatcttcaagggcaagaaggataattaccctcagagtgtacccaggctcttcatcagcactcggcttggtacagatgagatcagcccccgagtgctgcaggccttgggctctgagcccattcagtatgcggtgcctgttgtgaaatacgaccgcaagggctacaagcctcgctcccggcagctgctgctcacgcccaacgccgtcgtcatcgtggaggacgccaaagtcaagcagaggattgattacgccaacctgaccggaatctctgtcagcagcctgagcgacagtctttttgtgcttcatgtacagcgtgcggacaataagcaaaagggagatgtggtgctgcagagtgaccacgtgattgagacgctgaccaagacagccctcagtgccaaccgcgtgaacagcatcaacatcaaccagggcagcatcacgtttgcagggggccccggcaggatggcaccattgacttcacacccggctcggagctgctcatcaccaaggccaagaacgggcacctggctgtggtcgccccacggctgaattctcggtgataaaggcgcccactggaccctcccaacgcccaatgctttgcttttc

SEQ ID NO: 416537 - DNA, 3361 bp, Homo sapiens
  misc_feature (27)..(27): n is a, c, g, or t
tatctcgtagcatgttggcctatgggngagtgcgcccgggccgcggatccccaagcccgccacgccgcccagcccggccccgcccgcgccggaagagccacgccggccctgggcagtgacggggttcgggtgaccatggagagtgcgctcaccgcccgtgaccgggtgggggtgcaggatttcgtgctgctggagaacttcaccagcgaggccgccttcatcgagaacctgcggcggcgatttcgggagaatctcatctacacctacattggccccgtcctggtctctgtcaatccctaccgggacctgcagatctacagccggcagcatatggagcgttaccgtggcgtcagcttctatgaagtgccccctcacctgtttgccgtggcggacactgtgtaccgagcactgcgcacggagcgtcgggaccaggctgtgatgatctctggggagagcggggcaggcaagaccgaggccaccaagaggctgctgcagttctatgcagagacctgcccagcccccgagcgcggaggtgccgtgcgggaccggctgctacagagcaacccggtgctggaggcctttggaaatgccaagaccctccggaacgataactccagcaggttcgggaagtacatggatgtgcagtttgacttcaagggtgcccccgtgggtggccacatcctcagttacctcctggaaaagtcacgagtggtgcaccagaatcatggggagcggaacttccacatcttctaccagctgctggaggggggcgaggaggagactcttcgcaggctgggcttggaacggaacccccagagctacctgtacctggtgaagggccagtgtgccaaagtctcctccatcaacgacaagagtgactggaaggtcgtcaggaaggctctgacagtcattgatttcaccgaggatgaagtggaggacctgctgagcatcgtggccagcgtccttcatttgggcaacatccactttgctgccaacgaggagagcaatgcccaggtcaccaccgagaaccagctcaagtatctgaccaggctcctcagcgtggaaggctcgacgctgcgagaagccctgacacacaggaagatcatcgccaagggggaggagctcctgagcccgctgaacctggagcaggccgcgtacgcacgagacgccctcgccaaggctgtgtacagccgcacttttacctggctcgtcgggaagatcaacaggtcgctggcctccaaggacgtggagagccccagctggcggagcaccacggttctcgggctcctggatatttatggctttgaagtgtttcagcataacagctttgagcagttctgcatcaattactgcaacgagaagctgcagcagctcttcatcgagctcacgctcaagtcggagcaggaggagtacgaggcagagggcatcgcgtgggagcccgtccagtatttcaacaacaaaatcatctgtgatctggtggaggagaagtttaagggcatcatctcgattttggatgaggagtgtctgcgccccggggaggccacagacctgaccttcctggagaagctggaggatactgtcaagcaccatccacacttcctgacgcacaagctggctgaccagcggaccaggaaatctctgggccgaggggaattccgccttctgcactatgcgggggaggtgacctacagcgtgaccgggtttctggacaaaaacaatgaccttctcttccggaaccttaaggagaccatgtgtagctcaaagaatcccattatgagccagtgctttgaccggagcgagctcagtgacaagaagcggccagagacggtcgccacccagttcaagatgagcctcctgcagctggtggagatcctgcagtctaaggagcccgcctacgtccgctgcatcaaacccaatgatgccaaacagcccggccgctttgacgaggtgctgatccgccaccaggtgaagtacctggggctgttggaaaacctgcgcgtgcgcagagccggctttgcctatcgccgcaaatacgaagctttcctgcaaaggtacaagtcactgtgcccagagacgtggcccacgtgggcaggacggccgcaggatggggtggctgtgctggtccgacacctgggctacaagccagaagagtacaagatgggcaggaccaagatcttcatccgcttccccaagaccctgtttgccacagaggatgccctggaggtccggcggcagagcctggccacaaagatccaagctgcctggaggggctttcactggcggcagaaattcctccgggtgaagagatcagccatctgcatccagtcgtggtggcgtggaacactgggccggaggaaggcagccaagaggaagtgggcggcacagaccatccggcggctcatccgaggcttcatcctgcgccacgccccccgctgccccgagaacgccttcttcctggaccatgtgcgcacctcttttttgctaaacctgaggcggcagctgccccggaatgtcctggacacctcgtggcccacgcccccacctgccctgcgtgaggcctcagagcttctgcgggagttgtgcataaagaacatggtgtggaaatactgccggagtatcagccctgagtggaagcagcagctgcagcagaaggccgtggctagtgagatcttcaagggcaagaaggataattaccctcagagtgtacccaggctcttcatcagcactcggcttggtgagcccctgactttccagcactcagacctttcgtcaccatcctggtcccccattgcctccactgacttccctccccgccatctgagttgcaggtacagatgagatcagcccccgagtgctgcaggccttgggctctgagcccattcagtatgcggtgcctgttgtgaaatacgaccgcaagggctacaagcctcgctcccggcagctgctgctcacgcccaacgccgtcgtcatcgtggaggacgccaaagtcaagcagaggattgattacgccaacctgaccggaatctctgtcagcagcctgagcgacagtctttttgtgcttcatgtacagcgtgcggacaataagcaaaagggagatgtggtgctgcagagtgaccacgtgattgagacgctgaccaagacagccctcagtgccaaccgcgtgaacagcatcaacatcaaccagggcagcatcacgtttgcagggggccccggcaggatggcaccattgacttcacacccggctcggagctgctcatcaccaaggccaagaacgggcacctggctgtggtcgccccacggctgaattctcggtgataaaggcgcccactggaccctcccaacgcccaatgctttgcttttc

SEQ ID NO: 416538 - DNA, 1606 bp, Homo sapiens
acttgtgagcctccttgtgtgacctacatgcgtgaccgggtttctggacaaaaacaatgaccttctcttccggaaccttaaggagaccatgtgtagctcaaagaatcccattatgagccagtgctttgaccggagcgagctcagtgacaagaagcggccagagacggtcgccacccagttcaagatgagcctcctgcagctggtggagatcctgcagtctaaggagcccgcctacgtccgctgcatcaaacccaatgatgccaaacagcccggccgctttgacgaggtgctgatccgccaccaggtgaagtacctggggctgttggaaaacctgcgcgtgcgcagagccggctttgcctatcgccgcaaatacgaagctttcctgcaaaggtacaagtcactgtgcccagagacgtggcccacgtgggcaggacggccgcaggatggggtggctgtgctggtccgacacctgggctacaagccagaagagtacaagatgggcaggaccaagatcttcatccgcttccccaagaccctgtttgccacagaggatgccctggaggtccggcggcagagcctggccacaaagatccaagctgcctggaggggctttcactggcggcagaaattcctccgggtgaagagatcagccatctgcatccagtcgtggtggcgtggaacactgggccggaggaaggcagccaagaggaagtgggcggcacagaccatccggcggctcatccgaggcttcatcctgcgccacgccccccgctgccccgagaacgccttcttcctggaccatgtgcgcacctcttttttgctaaacctgaggcggcagctgccccggaatgtcctggacacctcgtggcccacgcccccacctgccctgcgtgaggcctcagagcttctgcgggagttgtgcataaagaacatggtgtggaaatactgccggagtatcagccctgagtggaagcagcagctgcagcagaaggccgtggctagtgagatcttcaagggcaagaaggataattaccctcagagtgtacccaggctcttcatcagcactcggcttggtacagatgagatcagcccccgagtgctgcaggccttgggctctgagcccattcagtatgcggtgcctgttgtgaaatacgaccgcaagggctacaagcctcgctcccggcagctgctgctcacgcccaacgccgtcgtcatcgtggaggacgccaaagtcaagcagaggattgattacgccaacctgaccggaatctctgtcagcagcctgagcgacagtctttttgtgcttcatgtacagcgtgcggacaataagcaaaagggagatgtggtgctgcagagtgaccacgtgattgagacgctgaccaagacagccctcagtgccaaccgcgtgaacagcatcaacatcaaccagggcagcatcacgtttgcagggggccccggcaggatggcaccattgacttcacacccggctcggagctgctcatcaccaaggccaagaacgggcacctggctgtggtcgccccacggctgaattctcggtgataaaggcgcccactggaccctcccaacgcccaatgctttgcttttc

SEQ ID NO: 416539 - DNA, 3365 bp, Homo sapiens
  misc_feature (27)..(27): n is a, c, g, or t
tatctcgtagcatgttggcctatgggngagtgcgcccgggccgcggatccccaagcccgccacgccgcccagcccggccccgcccgcgccggaagagccacgccggccctgggcagtgacggggttcgggtgaccatggagagtgcgctcaccgcccgtgaccgggtgggggtgcaggatttcgtgctgctggagaacttcaccagcgaggccgccttcatcgagaacctgcggcggcgatttcgggagaatctcatctacacctacattggccccgtcctggtctctgtcaatccctaccgggacctgcagatctacagccggcagcatatggagcgttaccgtggcgtcagcttctatgaagtgccccctcacctgtttgccgtggcggacactgtgtaccgagcactgcgcacggagcgtcgggaccaggctgtgatgatctctggggagagcggggcaggcaagaccgaggccaccaagaggctgctgcagttctatgcagagacctgcccagcccccgagcgcggaggtgccgtgcgggaccggctgctacagagcaacccggtgctggaggcctttggaaatgccaagaccctccggaacgataactccagcaggttcgggaagtacatggatgtgcagtttgacttcaagggtgcccccgtgggtggccacatcctcagttacctcctggaaaagtcacgagtggtgcaccagaatcatggggagcggaacttccacatcttctaccagctgctggaggggggcgaggaggagactcttcgcaggctgggcttggaacggaacccccagagctacctgtacctggtgaagggccagtgtgccaaagtctcctccatcaacgacaagagtgactggaaggtcgtcaggaaggctctgacagtcattgatttcaccgaggatgaagtggaggacctgctgagcatcgtggccagcgtccttcatttgggcaacatccactttgctgccaacgaggagagcaatgcccaggtcaccaccgagaaccagctcaagtatctgaccaggctcctcagcgtggaaggctcgacgctgcgagaagccctgacacacaggaagatcatcgccaagggggaggagctcctgagcccgctgaacctggagcaggccgcgtacgcacgagacgccctcgccaaggctgtgtacagccgcacttttacctggctcgtcgggaagatcaacaggtcgctggcctccaaggacgtggagagccccagctggcggagcaccacggttctcgggctcctggatatttatggctttgaagtgtttcagcataacagctttgagcagttctgcatcaattactgcaacgagaagctgcagcagctcttcatcgagctcacgctcaagtcggagcaggaggagtacgaggcagagggcatcgcgtgggagcccgtccagtatttcaacaacaaaatcatctgtgatctggtggaggagaagtttaagggcatcatctcgattttggatgaggagtgtctgcgccccggggaggccacagacctgaccttcctggagaagctggaggatactgtcaagcaccatccacacttcctgacgcacaagctggctgaccagcggaccaggaaatctctgggccgaggggaattccgccttctgcactatgcgggggaggtgacctacagcgtgaccgggtttctggacaaaaacaatgaccttctcttccggaaccttaaggagaccatgtgtagctcaaagaatcccattatgagccagtgctttgaccggagcgagctcagtgacaagaagcggccagagacggtcgccacccagttcaagatgagcctcctgcagctggtggagatcctgcagtctaaggagcccgcctacgtccgctgcatcaaacccaatgatgccaaacagcccggccgctttgacgaggtgctgatccgccaccaggtgaagtacctggggctgttggaaaacctgcgcgtgcgcagagccggctttgcctatcgccgcaaatacgaagctttcctgcaaaggtacaagtcactgtgcccagagacgtggcccacgtgggcaggacggccgcaggatggggtggctgtgctggtccgacacctgggctacaagccagaagagtacaagatgggcaggaccaagatcttcatccgcttccccaagaccctgtttgccacagaggatgccctggaggtccggcggcagagcctggccactctcccattcatgccactcgtggagcgcacacggcaccaggctcccagctggctccccgcgctctggccaattgcctttctttcccaaccgcagccacaaagatccaagctgcctggaggggctttcactggcggcagaaattcctccgggtgaagagatcagccatctgcatccagtcgtggtggcgtggaacactgggccggaggaaggcagccaagaggaagtgggcggcacagaccatccggcggctcatccgaggcttcatcctgcgccacgccccccgctgccccgagaacgccttcttcctggaccatgtgcgcacctcttttttgctaaacctgaggcggcagctgccccggaatgtcctggacacctcgtggcccacgcccccacctgccctgcgtgaggcctcagagcttctgcgggagttgtgcataaagaacatggtgtggaaatactgccggagtatcagccctgagtggaagcagcagctgcagcagaaggccgtggctagtgagatcttcaagggcaagaaggataattaccctcagagtgtacccaggctcttcatcagcactcggcttggtacagatgagatcagcccccgagtgctgcaggccttgggctctgagcccattcagtatgcggtgcctgttgtgaaatacgaccgcaagggctacaagcctcgctcccggcagctgctgctcacgcccaacgccgtcgtcatcgtggaggacgccaaagtcaagcagaggattgattacgccaacctgaccggaatctctgtcagcagcctgagcgacagtctttttgtgcttcatgtacagcgtgcggacaataagcaaaagggagatgtggtgctgcagagtgaccacgtgattgagacgctgaccaagacagccctcagtgccaaccgcgtgaacagcatcaacatcaaccagggcagcatcacgtttgcagggggccccggcaggatggcaccattgacttcacacccggctcggagctgctcatcaccaaggccaagaacgggcacctggctgtggtcgccccacggctgaattctcggtgataaaggcgcccactggaccctcccaacgcccaatgctttgcttttc

SEQ ID NO: 416540 - DNA, 1660 bp, Homo sapiens
  misc_feature (118)..(118): n is a, c, g, or t
ggatgattatgtgaagtatgatcctgtagcactaagagacaatgactgtaagtctttcgggactatcgtgcaggtctgatccatatgcttcagtgatcactactagccttacatgtangcgcgattagatttcaaccagcagcctacggtggacctgagtttgaattgtgtcactagtacgtgctgtcattcacttttcaatatagtctgggatagaccaacatggtgaaagatcctagacactctaagggatgccctgctagggtgcgcatgacatcaggtccctaatagattgccaaatcggtcactgagcctggtttcgaggaccgtgcttattctcggcacacaggtgaagtatcctggggtgtccggaatagctgcgcgtgtgacatagccagtgattcgagtttcgcctggatttactgaattcttttgaatgcaaaggtacaagtcactgtgcccagagacgtggcccacgtgggcaggacggccgcaggatggggtggctgtgctggtccgacacctgggctacaagccagaagagtacaagatgggcaggaccaagatcttcatccgcttccccaagaccctgtttgccacagaggatgccctggaggtccggcggcagagcctggccacaaagatccaagctgcctggaggggctttcactggcggcagaaattcctccgggtgaagagatcagccatctgcatccagtcgtggtggcgtggaacactgggccggaggaaggcagccaagaggaagtgggcggcacagaccatccggcggctcatccgaggcttcatcctgcgccacgccccccgctgccccgagaacgccttcttcctggaccatgtgcgcacctcttttttgctaaacctgaggcggcagctgccccggaatgtcctggacacctcgtggcccacgcccccacctgccctgcgtgaggcctcagagcttctgcgggagttgtgcataaagaacatggtgtggaaatactgccggagtatcagccctgagtggaagcagcagctgcagcagaaggccgtggctagtgagatcttcaagggcaagaaggataattaccctcagagtgtacccaggctcttcatcagcactcggcttggtacagatgagatcagcccccgagtgctgcaggccttgggctctgagcccattcagtatgcggtgcctgttgtgaaatacgaccgcaagggctacaagcctcgctcccggcagctgctgctcacgcccaacgccgtcgtcatcgtggaggacgccaaagtcaagcagaggattgattacgccaacctgaccggaatctctgtcagcagcctgagcgacagtctttttgtgcttcatgtacagcgtgcggacaataagcaaaagggagatgtggtgctgcagagtgaccacgtgattgagacgctgaccaagacagccctcagtgccaaccgcgtgaacagcatcaacatcaaccagggcagcatcacgtttgcagggggccccggcaggatggcaccattgacttcacacccggctcggagctgctcatcaccaaggccaagaacgggcacctggctgtggtcgccccacggctgaattctcggtgataaaggcgcccactggaccctcccaacgcccaatgctttgcttttc

SEQ ID NO: 416541 - DNA, 1914 bp, Homo sapiens
  misc_feature (27)..(27): n is a, c, g, or t
tatctcgtagcatgttggcctatgggngagtgcgcccgggccgcggatccccaagcccgccacgccgcccagcccggccccgcccgcgccggaagagccacgccggccctgggcagtgacggggttcgggtgaccatggagagtgcgctcaccgcccgtgaccgggtgggggtgcaggatttcgtgctgctggagaacttcaccagcgaggccgccttcatcgagaacctgcggcggcgatttcgggagaatctcatctacacctacattggccccgtcctggtctctgtcaatccctaccgggacctgcagatctacagccggcagcatatggagcgttaccgtggcgtcagcttctatgaagtgccccctcacctgtttgccgtggcggacactgtgtaccgagcactgcgcacggagcgtcgggaccaggctgtgatgatctctggggagagcggggcaggcaagaccgaggccaccaagaggctgctgcagttctatgcagagacctgcccagcccccgagcgcggaggtgccgtgcgggaccggctgctacagagcaacccggtgctggaggcctttggaaatgccaagaccctccggaacgataactccagcaggttcgggaagtacatggatgtgcagtttgacttcaagggtgcccccgtgggtggccacatcctcagttacctcctggaaaagtcacgagtggtgcaccagaatcatggggagcggaacttccacatcttctaccagctgctggaggggggcgaggaggagactcttcgcaggctgggcttggaacggaacccccagagctacctgtacctggtgaagggccagtgtgccaaagtctcctccatcaacgacaagagtgactggaaggtcgtcaggaaggctctgacagtcattgatttcaccgaggatgaagtggaggacctgctgagcatcgtggccagcgtccttcatttgggcaacatccactttgctgccaacgaggagagcaatgcccaggtcaccaccgagaaccagctcaagtatctgaccaggctcctcagcgtggaaggctcgacgctgcgagaagccctgacacacaggaagatcatcgccaagggggaggagctcctgagcccgctgaacctggagcaggccgcgtacgcacgagacgccctcgccaaggctgtgtacagccgcacttttacctggctcgtcgggaagatcaacaggtcgctggcctccaaggacgtggagagccccagctggcggagcaccacggttctcgggctcctggatatttatggctttgaagtgtttcagcataacagctttgagcagttctgcatcaattactgcaacgagaagctgcagcagctcttcatcgagctcacgctcaagtcggagcaggaggagtacgaggcagagggcatcgcgtgggagcccgtccagtatttcaacaacaaaatcatctgtgatctggtggaggagaagtttaagggcatcatctcgattttggatgaggagtgtctgcgccccggggaggccacagacctgaccttcctggagaagctggaggatactgtcaagcaccatccacacttcctgacgtgagtggggctgcggggctgctgggggcaagggctcacttgcagcagagcctgcggagtgcaggagtccctccgccatcacaaaacaccagccacaaggaggtgaccagggacggtgctgagttaaggacccctcacatgtgtccagaaactaagaagcttagccaggcatgctgacacgcctggagtcccatctatgcagaaggctggggcaagagcatcacttgagccctggagttttgaggttgcagtgagctaggatcaacccactgcactccagcctgggtgacaagagcgagactccgtctca

SEQ ID NO: 416542 - DNA, 1728 bp, Homo sapiens
  misc_feature (27)..(27): n is a, c, g, or t
tatctcgtagcatgttggcctatgggngagtgcgcccgggccgcggatccccaagcccgccacgccgcccagcccggccccgcccgcgccggaagagccacgccggccctgggcagtgacggggttcgggtgaccatggagagtgcgctcaccgcccgtgaccgggtgggggtgcaggatttcgtgctgctggagaacttcaccagcgaggccgccttcatcgagaacctgcggcggcgatttcgggagaatctcatctacacctacattggccccgtcctggtctctgtcaatccctaccgggacctgcagatctacagccggcagcatatggagcgttaccgtggcgtcagcttctatgaagtgccccctcacctgtttgccgtggcggacactgtgtaccgagcactgcgcacggagcgtcgggaccaggctgtgatgatctctggggagagcggggcaggcaagaccgaggccaccaagaggctgctgcagttctatgcagagacctgcccagcccccgagcgcggaggtgccgtgcgggaccggctgctacagagcaacccggtgctggaggcctttggaaatgccaagaccctccggaacgataactccagcaggttcgggaagtacatggatgtgcagtttgacttcaagggtgcccccgtgggtggccacatcctcagttacctcctggaaaagtcacgagtggtgcaccagaatcatggggagcggaacttccacatcttctaccagctgctggaggggggcgaggaggagactcttcgcaggctgggcttggaacggaacccccagagctacctgtacctggtgaagggccagtgtgccaaagtctcctccatcaacgacaagagtgactggaaggtcgtcaggaaggctctgacagtcattgatttcaccgaggatgaagtggaggacctgctgagcatcgtggccagcgtccttcatttgggcaacatccactttgctgccaacgaggagagcaatgcccaggtcaccaccgagaaccagctcaagtatctgaccaggctcctcagcgtggaaggctcgacgctgcgagaagccctgacacacaggaagatcatcgccaagggggaggagctcctgagcccgctgaacctggagcaggccgcgtacgcacgagacgccctcgccaaggctgtgtacagccgcacttttacctggctcgtcgggaagatcaacaggtcgctggcctccaaggacgtggagagccccagctggcggagcaccacggttctcgggctcctggatatttatggctttgaagtgtttcagcataacagctttgagcagttctgcatcaattactgcaacgagaagctgcagcagctcttcatcgagctcacgctcaagtcggagcaggaggagtacgaggcagagggcatcgcgtgggagcccgtccaggccttgggatgacagacagcttgcccgcacactcgggccccactcaaggatgtagggccttttctggcccctgacccctccctggcatgggagcgtggggacggggctggccttgggaggagcggcaggggcatcacctccttctgctgcttctccctgctcctaccctcaagggcctgggggctgcccagctgcctctatgcccttctgggggtctcagcccactgctgacacttctgcaatccagagaaacactaaataaagcaatacgtgtttgccgaa

SEQ ID NO: 416543 - DNA, 153 bp, Homo sapiens
ccagggtgtccaggacctctgacctcactcctccccttaggcctcagagcttctgcgggagttgtgcataaagaacatggtgtggaaatactgccggagtatcagccctgagtggaagcagcaggtacggagagcggggctgggtgaggatga

SEQ ID NO: 416544 - DNA, 543 bp, Homo sapiens
attttctaggagactgtttctaactttggttttaggaacactataatagtgagtcagtataggtaagtggttaatgctaaagatttatagccaagttgacctggctaaccttggacaagctgtttaacctttttgagactcttttgtaaaatatttatttttattttccttcatttttaaaaatccagatcctgcacaatcttttatttataaaatttgggtacctaatagagtttttgtgaaggttaaatgagataatataaataagataccttagcaccatccctgctgtaaaatcatcacctagtggtaaatcttatatttgtagggaagtgtttgtagtatattggcaagaacatgggcaattagtattagaaagacttaaggtcactcacaaaacaaaaaagaaagacttacagtcaagttctggctatactactgaacagctaagtgaccttaggcatgttgcttaacttctctgagcctttttaaaaaaatctacaaagaaggggccaggcgcagtggctcacttctgtaatccca

SEQ ID NO: 416545 - DNA, 422 bp, Homo sapiens
gttagttgtcttataaccgatcagtggtatctcatctcactcagaataaaactcagagtctacagtggtctacaatgctttacattatttggccccccactataagtcttactttattttctattcctaatgtgttcctgacatgccagcctccttgctcttcttcatatactgcaagtgtgcctcctgctttagctggcctctctacctgaaatgttttcctcctcttgtctgctggataattctctcagctcatttaaggttgccaaaatctcactttctcaatgaatcccccattgaccactctaatattgaagaccccaccactttacatattgcagttctccggatcccccttgccttgtctacattttcttctttcaaaagcattttcacctcctacatattaaattttactaatt

SEQ ID NO: 416546 - DNA, 409 bp, Homo sapiens
attaaaatgaaagctaagactgatttattctagctctcaggatagaactaggaaaaataagcagagttttcagtgggttttgactaaatataaagaagatgaagtacaaataatatgtaatagtggagtggatatcacagttataaactttcagcctctgttagcatttaaacagaggatacctgaccactctgaggggtgttgtgattaggaatatgtgatttgagggggctaaaattagatgctgtgatttttcaaaagatattttttaatggctttgttgaatggcaggattttattttaaaaactcatgaaaatcttgatttttgatttgttaatctttgctttataactgagaattttaaaaatatctaggggaatggccgttagttatcatttaaaaaatttt

SEQ ID NO: 416547 - DNA, 379 bp, Homo sapiens
aagaaaagaaaaagaatctgcattttaacaagagtccttggtaattcacatgcacattgaagtttgagaagcctggctccaactgtctaaaatgtcctggcctcagcaattagcctagacagctgggactccatgtgtccctgtatatgtctgtacccctttcatgtgcctgctatcttgtactgcctgaccaagctatgtgcccttagatttgggaaatatgtatctcctgaaaatcaagtctgtgctttgtctttattgagcagtcagccctgtttcaacagtggtagctgccttcatctgcgtgctagagggctgggctggacttcagctttcacctaggaaatgagtcttgctgccctttccagaaagtgacaca

SEQ ID NO: 416548 - DNA, 2175 bp, Homo sapiens
gtgtgtgtgtgtgtgtgtgtaaatgggatcttgctgtgctgcccaggttggctggtcttgagttcaggtgatccacccacctcggcctctcaaagtgctgggattacaggtgtgagccaccattccgggccctaaaacagtttttttagctcgtcagctatcgttaatgttaatgtattttatgtgtggcccaagacaagacaattcttcttccaatgtggcccagggaagcccaaaggttggacacccctgaaaattacatatcttctccaacagagtgttttgttacaacagccagaagcctgatgaaagatttatactgcttgggacaagttttaatgattgttaatttttactttgaacaaatagtgaatgaaataatagatttgacattttttaagataacaagtgctaggaaatatgaagtgtgagtaaataaaaaggttcatatgttattagaactaatcattttgatgttatgcatagtgattactagaataattcccagagtttctttgacagagacgtcacattagtttaacttaccaaaacagacagaagaaatagaaaacttgagtagtcctattaaggaaataaaataattgaatcttttctacaaagaatattccagacctagatggcttcaatggtaaattctgtgaaacatttaagaaaaacaaaaaacaaacaaagaaaagaagttggagaagctttttcagagaatagagaagaaataaatacgtagacttattttatgatctcagcataacattgatcacattacatgccaagggcattataagtaagggaaacaataatttagtgtaattttattacattaaaattgaaaacttctgtctgggtgtggtggctcacacctgtaatcctagcactttgggaggccgaggtggagggatcacttgagctcaggagtttgagaccggcctgggcaacatggcaaaaccctgtctctactaaaaatactaaaataagctgggcatggtggcacatgcctgtagtcccagatacttgggaggctgaggcacaagaattgcttgaacctgggaggtggaggttgtagtgagccaagattacaccagtgcactccagcctgtgtgacagcgagactctgtctcaaaaaacaaaaaaagaaggaaaacttctgttcatcatgaacattcatgcaaaaatactgagcaaaattatagcaaaccaaagccaatgatatatgcaaaatggtaatacatcatgactaatttagatttttttctaggaatgcaaggttggtttaaattttaaaaatcagtcaatatgattaacaaaataaagtaaaacctctgttaaagtaaaaccattaacagaataaagtaatagctgcagcaacaattttgataaaatttagcactataaatgattaaaaaaaacttttggcaaaggaggaatagaatagaacttccttaatctgtccaaaggttatcaacagaacactccacagccaatattacgtaatagtgaagtattgaaaactttcctcttgatatcaagaatgagattaagatgatcattatgggccaggcacaatggctcatgcttgtaatagtagtactttgggagtccaaggcaggcagatcacttgacgacaggagttcgagaccagcccagccttcacggcaaaacctagtctgtactaaaaatacaaaaattagtagggtgtggtgatgcgctcctataatcccaactactcgggaggttgaggtgggagaattgttggaacccaggaggcagaagttgcagtgaatggaggttgtgatgagctgggattgcaccattgtactccagcctgagcagcagagcaagactctgtctcaaaaaaaaaaaaagaaaagaaaagaaagatcagtatcacccacttctgtaccggaaattaacagacaattatttaataaggaaataaaaaggagtaagaaactcaagatttgtaagacagaaatgctattttatatagacctccctacagtcaatctacaggttaactattataatttacgactcaatttatcaaagtctctaaacacagtcaatatctgcaaatcaatgatatctctgtattccagccataaaaatttcaaaagtgaatcttaaaaatataatttaaagtagtatcagacccatcaa

SEQ ID NO: 416549 - DNA, 916 bp, Homo sapiens
aattgtttgggttaaaatttgaggaaggttcatcttgtacgtatttaagagaattttgttggtgaaaatccttaaagcttacttttaggattgaggctttctgaataattgagcttcccaccctttgagtgctgaatgactgtattttcatcaagtatttaatatataactcttggataatcaaaactttgattccaagcattttagtaagataaaacaaactgtcacttttttcttacatattttaacaaatcagaaataatggttccttttaatttttatataggaagaggcatatttctacaaaaaattgagatacctgaagaatgttctttccttgttaatgtgtaattaacaaaatcagcaaaagactcattttatgaatccatgaaagagaagttttataaatacaaatttccagcaagtacactctataaataaaaatagatttggtcttggtgaagctttgtcttataaataaaaattatgttaaacatgtataattttaaaatatgaagtgaagaaagggttcctagttttggaaattggcagcatatgcagaagatatgaacaataggtcaatgaatattggatttacagcattctttcctaaaattgagagtttctgtaatttataaattggatatttcttggctcaattctttgtactattccatttgggtaaagctgtttttcagaagaatttagaactatttttttcttgataaaaaggcaatgaaatgatttaagatttgtctgcaaaataattgcatgacacaaggttttcatggctaaaaataaagggtattgttgatttgaggagttagccagtgacaatgatgcttaatgtgtttgttcctcatgaactcacatttctgagtaaactttgaaatatgattaatagttcagtaggtct

SEQ ID NO: 416550 - DNA, 3625 bp, Homo sapiens
ttgggcgcttcgctgatggtgtcggtgagcgcgtttcccgcctgagcgcaactagcggcgggtcgtgggcacctccaggctcagacgtgcagcttctggaatacgaggcgtcagctgctggcctcatccgatccttctctgagcgtttcccagaggatggacccgagttggaggagatcctcacacagctggccacagccgatgcccgattctggaagggccccagtgaggccccatctggccaagcttgaggaagatgtgtggccttgcccccaattccatcagaccaaggctgcaagtggccctccattcgtcaatgaggccaattcgaagtggttggatgcgcactacgacccaatggccaatatccacaccttttctgcctgcctagcgctggcagatttacatggggatggggaatacaagctggtggtaggggaccttggccctggtgggcagcagccccgcctgaaggtgctcaaaggaccactggtgatgaccgaaagcccgctacctgctctgccagctgctgctgccaccttcctcatggagcaacatgagccccggaccccagctctggcacttgcttcaggcccttgtgtctatgtgtataagaatctcagaccctacttcaagttcagcctgccccaattgcctccaaatcctctggaacaagacctttggaaccaggccaaagaggaccgaatcgaccccttaaccctgaaggagatgctggagagcatccgggagacggcagaggagcctttgtccatccagtcactcaggtttctgcagctggagctaagtgaaatggaggcatttgtaaaccaacacaagtccaactccatcaagcggcagacagtcatcaccaccatgaccaccttgaagaagaacctggctgacgaggatgctgtgtcttgcctggtgctgggcaccgagaacaaggagctcctggtgcttgaccccgaggccttcaccattttagccaagatgagccttcccagcgtccccgtcttcctagaggtttctggccagtttgatgttgagttccggcttgccgcggcctgccgcaatggaaacatctatattctgagaagagactccaagcaccccaagtactgcatcgagctgagcgcccagcctgtgggacttatccgggtacacaaggtcctagtggtgggcagcacccaagacagcctgcatggcttcacccacaaggggaagaagctgtggacagtgcagatgcccgcagccatcctgaccatgaacctcctggagcagcattcccggggcctgcaggccgtcatggctgggctggccaatggagaggtccgcatttatcgtgacaaggccctgctcaatgtcatccacaccccggatgcagtgaccagcctttgctttggccggtacgggcgggaggacaacaccctcatcatgaccactcgaggtggtggcctgatcatcaagatcctgaagcgtacagcagtgtttgtagagggaggaagtgaggtgggtcccccaccagcccaggccatgaaactcaatgtgccccgaaagacccggctttacgtggatcagacactgcgagagcgggaggctggcaccgccatgcaccgggccttccagacagacctatacctgctgcgcctacgtgctgcccgcgcctacctgcaggccctcgagtccagcctgagccccctgtccacgacagcccgagagccactcaagctgcacgccgtggttcagggccttggccccacctttaagctcacacttcacctgcagaacacctcaacaacccgtcctgtcctggggctgctggtctgcttcctgtacaacgaggcgctctattccctgccccgggccttcttcaaggtacccttgctggtgccagggctcaactaccccctggagacctttgtggagagtctcagtaacaagggcatctcagacatcatcaaggtgctggtgcttcgagaaggccaaagtgcacccctgctgagtgcccacgtcaacatgcctgggagcgaggggctggcggccgcctgagacctgagctgctgtgaaagcccctgcacaatcagccagggagaactgggcgggtttagtggccccaggcccactcctcatgcagcagtgtgctggggcgacagctcgtctcccctctcttaagcacccgcttcctcaccacccccactgttgggcctatagtagcaggttagtgagtacctagggcggctcaactcctcccacagcaccaacccagcatggtcccactgaagtcctactacgccctcccctccccagccttttccagaaaccatactgggctcagatcagagctccgaagcggtcaaagtgagctgagcaggacaggcccagcctttctccactgccacgtccctcatgcacatcactcatctcctgctgcaggccaaggccaaaattgggctagtcctggccagggaaatcagaagctcttcttgggtgagattgagcctcctgttgctccctggagttccggaggctgggctgcagcccactcagcttgcgggcaaaatacgtgctctcctctctccttgtcagctgagcaaacccagggaatagccctcctctccccaggaaacttctctgaaatcttagacttagccagtcttaggcctacgatgccacacaaaggttgttcagggagaagggggtgcaggaggcagagggtgccccgcagggagctggtggctccagccccactagagctcctaaagatcacacagcagctgctcctgacagggatgctcatgcccagaaagcaagcccaggagaggaaggcagagtgtgacagagcagagccagggccaggcgcaccaggagaggcgtttctggggctccagagaagtgccacgggaggcagaagtccagaactgcccatatagatgcccttctacatcctggagcccaaatcagtcatgtgggtgggaagttcccagggcagtggtcacatcgtgagaattagcaggaaaggcggggcctttcttgtcatagctatttctgaggatgaaatgggagacatatgcccagcacctgatgtaagtttatataatgtaatattatgtacctaccactaagaaatacatgaaccgtgccatgaggacagtaagtgttcataaagcaacatgaagcaagaaacagtgcagggtgcccagtgcacacactagagagaaattgtgaacattaaggacaaggagaattggtgtctttctaaaacatacttatttaaaaacacatacccacttactaatgtggaattacacagtttgtaacaagaaaacagtctctcccattctctagtactgctcccctacccagcagtcacttccagttcattcagctatttttaaaatgtgcttatatgactcttgcttgatatatcaatcttagacattacctgttgactccctgttgtcatacatgaggctttagctctcttttgtcagcaaccctcccccatccctagttattaggttaaaaaatactcagattactatttctattactatgtgaaagttaactgcggagccaagagttggactataattaaattaccttccttgtactttctttttaatgg

SEQ ID NO: 416551 - DNA, 871 bp, Homo sapiens
  misc_feature (11)..(11): n is a, c, g, or t
agcgggctggnagcgacgacgcctgcgaagatggccgctgcgtcctcatcggattccgacgcctgcggagctgagagcaatgaggccaattcgaagtggttggatgcgcactacgacccaatggccaatatccacaccttttctgcctgcctagcgctggcagatttacatggggatggggaatacaagctggtggtaggggaccttggccctggtgggcagcagccccgcctgaaggtgctcaaaggaccactggtgatgaccgaaagcccgctacctgctctgccagctgctgctgccaccttcctcatggagcaacatgagccccggaccccagctctggcacttgcttcaggcccttgtgtctatgtgtataagaatctcagaccctacttcaagttcagcctgccccaattgcctccaaatcctctggaacaagacctttggaaccaggccaaagaggaccgaatcgaccccttaaccctgaaggagatgctggagagcatccgggagacggcagaggagcctttgtccatccagtcactcaggtttctgcagctggagctaagtgaaatggaggcatttgtaaaccaacacaagtccaactccatcaagcggcagacagtcatcaccaccatgaccaccttgaagaagaacctggctgacgaggatgctgtgtcttgcctggtgctgggcaccgagaacaaggagctcctggtgcttgaccccgaggccttcaccattttagccaaggatgcagtgaacaggcttgctttggccggtacgggcgggaggacaaaacctcatcatgaccactcgaggtgtggctgatatcaggacctgagcgtacagcagggttgaagaggacgga

SEQ ID NO: 416552 - DNA, 947 bp, Homo sapiens
  misc_feature (11)..(11): n is a, c, g, or t
  misc_feature (839)..(839): n is a, c, g, or t
  misc_feature (885)..(885): n is a, c, g, or t
agcgggctggnagcgacgacgcctgcgaagatggccgctgcgtcctcatcggattccgacgcctgcggagctgagagcaatgaggccaattcgaagtggttggatgcgcactacgacccaatggccaatatccacaccttttctgcctgcctagcgctggcagatttacatggggatggggaatacaagctggtggtaggggaccttggccctggtgggcagcagccccgcctgaaggtgctcaaaggaccactggtgatgaccgaaagcccgctacctgctctgccagctgctgctgccaccttcctcatggagcaacatgagccccggaccccagctctggcacttgcttcaggcccttgtgtctatgtgtataagaatctcagaccctacttcaagttcagcctgccccaattgcctccaaatcctctggaacaagacctttggaaccaggccaaagagggggagacggcagaggagcctttgtccatccagtcactcaggtttctgcagctggagctaagtgaaatggaggcatttgtaaaccaacacaagtccaactccatcaagcggcagacagtcatcaccaccatgaccaccttgaagaagaacctggctgacgaggatgctgtgtcttgcctggtgctgggcaccgagaacaaggagctcctggtgcttgaccccgaggccttcaccattttagccaagatgagccttcccagcgtccccgtcttcctagaggtttctggccagtttgatgttgagttccggcttgccgcggcctgccgcaatggaaacatctatattctgagaagagactccaaggcacccaaggtacntgcatcgagctgagcgcccagcctgtgggacttatccgggtacacnaggtcctaagtggtggggcagcaacccaagaaaggctgctgggttcacccacaagggcacag

SEQ ID NO: 416553 - DNA, 912 bp, Homo sapiens
  misc_feature (11)..(11): n is a, c, g, or t
  misc_feature (804)..(804): n is a, c, g, or t
  misc_feature (850)..(850): n is a, c, g, or t
agcgggctggnagcgacgacgcctgcgaagatggccgctgcgtcctcatcggattccgacgcctgcggagctgagagcaatgaggccaattcgaagtggttggatgcgcactacgacccaatggccaatatccacaccttttctgcctgcctagctggtggtaggggaccttggccctggtgggcagcagccccgcctgaaggtgctcaaaggaccactggtgatgaccgaaagcccgctacctgctctgccagctgctgctgccaccttcctcatggagcaacatgagccccggaccccagctctggcacttgcttcaggcccttgtgtctatgtgtataagaatctcagaccctacttcaagttcagcctgccccaattgcctccaaatcctctggaacaagacctttggaaccaggccaaagagggggagacggcagaggagcctttgtccatccagtcactcaggtttctgcagctggagctaagtgaaatggaggcatttgtaaaccaacacaagtccaactccatcaagcggcagacagtcatcaccaccatgaccaccttgaagaagaacctggctgacgaggatgctgtgtcttgcctggtgctgggcaccgagaacaaggagctcctggtgcttgaccccgaggccttcaccattttagccaagatgagccttcccagcgtccccgtcttcctagaggtttctggccagtttgatgttgagttccggcttgccgcggcctgccgcaatggaaacatctatattctgagaagagactccaaggcacccaaggtacntgcatcgagctgagcgcccagcctgtgggacttatccgggtacacnaggtcctaagtggtggggcagcaacccaagaaaggctgctgggttcacccacaagggcacag

SEQ ID NO: 416554 - DNA, 3388 bp, Homo sapiens
  misc_feature (11)..(11): n is a, c, g, or t
agcgggctggnagcgacgacgcctgcgaagatggccgctgcgtcctcatcggattccgacgcctgcggagctgagagcaatgaggccaattcgaagtggttggatgcgcactacgacccaatggccaatatccacaccttttctgcctgcctagcgctggcagatttacatggggatggggaatacaagctggtggtaggggaccttggccctggtgggcagcagccccgcctgaaggtgctcaaaggaccactggtgatgaccgaaagcccgctacctgctctgccagctgctgctgccaccttcctcatggagcaacatgagccccggaccccagctctggcacttgcttcaggcccttgtgtctatgtgtataagaatctcagaccctacttcaagttcagcctgccccaattgcctccaaatcctctggaacaagacctttggaaccaggccaaagaggaccgaatcgaccccttaaccctgaaggagatgctggagagcatccgggagacggcagaggagcctttgtccatccagtcactcaggtttctgcagctggagctaagtgaaatggaggcatttgtaaaccaacacaagtccaactccatcaagcggcagacagtcatcaccaccatgaccaccttgaagaagaacctggctgacgaggatgctgtgtcttgcctggtgctgggcaccgagaacaaggagctcctggtgcttgaccccgaggccttcaccattttagccaagatgagccttcccagcgtccccgtcttcctagaggtttctggccagtttgatgttgagttccggcttgccgcggcctgccgcaatggaaacatctatattctgagaagagactccaagcaccccaagtactgcatcgagctgagcgcccagcctgtgggacttatccgggtacacaaggtcctagtggtgggcagcacccaagacagcctgcatggcttcacccacaaggggaagaagctgtggacagtgcagatgcccgcagccatcctgaccatgaacctcctggagcagcattcccggggcctgcaggccgtcatggctgggctggccaatggagaggtccgcatttatcgtgacaaggccctgctcaatgtcatccacaccccggatgcagtgaccagcctttgctttggccggtacgggcgggaggacaacaccctcatcatgaccactcgaggtggtggcctgatcatcaagatcctgaagcgtacagcagtgtttgtagagggaggaagtgaggtgggtcccccaccagcccaggccatgaaactcaatgtgccccgaaagacccggctttacgtggatcagacactgcgagagcgggaggctggcaccgccatgcaccgggccttccagacagacctatacctgctgcgcctacgtgctgcccgcgcctacctgcaggccctcgagtccagcctgagccccctgtccacgacagcccgagagccactcaagctgcacgccgtggttcagggccttggccccacctttaagctcacacttcacctgcagaacacctcaacaacccgtcctgtcctggggctgctggtctgcttcctgtacaacgaggcgctctattccctgccccgggccttcttcaaggtacccttgctggtgccagggctcaactaccccctggagacctttgtggagagtctcagtaacaagggcatctcagacatcatcaaggtgctggtgcttcgagaaggccaaagtgcacccctgctgagtgcccacgtcaacatgcctgggagcgaggggctggcggccgcctgagacctgagctgctgtgaaagcccctgcacaatcagccagggagaactgggcgggtttagtggccccaggcccactcctcatgcagcagtgtgctggggcgacagctcgtctcccctctcttaagcacccgcttcctcaccacccccactgttgggcctatagtagcaggttagtgagtacctagggcggctcaactcctcccacagcaccaacccagcatggtcccactgaagtcctactacgccctcccctccccagccttttccagaaaccatactgggctcagatcagagctccgaagcggtcaaagtgagctgagcaggacaggcccagcctttctccactgccacgtccctcatgcacatcactcatctcctgctgcaggccaaggccaaaattgggctagtcctggccagggaaatcagaagctcttcttgggtgagattgagcctcctgttgctccctggagttccggaggctgggctgcagcccactcagcttgcgggcaaaatacgtgctctcctctctccttgtcagctgagcaaacccagggaatagccctcctctccccaggaaacttctctgaaatcttagacttagccagtcttaggcctacgatgccacacaaaggttgttcagggagaagggggtgcaggaggcagagggtgccccgcagggagctggtggctccagccccactagagctcctaaagatcacacagcagctgctcctgacagggatgctcatgcccagaaagcaagcccaggagaggaaggcagagtgtgacagagcagagccagggccaggcgcaccaggagaggcgtttctggggctccagagaagtgccacgggaggcagaagtccagaactgcccatatagatgcccttctacatcctggagcccaaatcagtcatgtgggtgggaagttcccagggcagtggtcacatcgtgagaattagcaggaaaggcggggcctttcttgtcatagctatttctgaggatgaaatgggagacatatgcccagcacctgatgtaagtttatataatgtaatattatgtacctaccactaagaaatacatgaaccgtgccatgaggacagtaagtgttcataaagcaacatgaagcaagaaacagtgcagggtgcccagtgcacacactagagagaaattgtgaacattaaggacaaggagaattggtgtctttctaaaacatacttatttaaaaacacatacccacttactaatgtggaattacacagtttgtaacaagaaaacagtctctcccattctctagtactgctcccctacccagcagtcacttccagttcattcagctatttttaaaatgtgcttatatgactcttgcttgatatatcaatcttagacattacctgttgactccctgttgtcatacatgaggctttagctctcttttgtcagcaaccctcccccatccctagttattaggttaaaaaatactcagattactatttctattactatgtgaaagttaactgcggagccaagagttggactataattaaattaccttccttgtactttctttttaatgg

SEQ ID NO: 416555 - DNA, 3580 bp, Homo sapiens
  misc_feature (11)..(11): n is a, c, g, or t
agcgggctggnagcgacgacgcctgcgaagatggccgctgcgtcctcatcggattccgacgcctgcggagctgagagcaatgaggccaattcgaagtggttggatgcgcactacgacccaatggccaatatccacaccttttctgcctgcctagcgctggcagatttacatggggatggggaatacaagctggtggtaggggaccttggccctggtgggcagcagccccgcctgaaggtgctcaaaggaccactggtgatgaccgaaagcccgctacctgctctgccagctgctgctgccaccttcctcatggagcaacatgagccccggaccccagctctggcacttgcttcaggcccttgtgtctatgtgtataagaatctcagaccctacttcaagttcagcctgccccaattgcctccaaatcctctggaacaagacctttggaaccaggccaaagaggaccgaatcgaccccttaaccctgaaggagatgctggagagcatccgggagacggcagaggagcctttgtccatccagtcactcaggtttctgcagctggagctaagtgaaatggaggcatttgtaaaccaacacaagtccaactccatcaagcggcagacagtcatcaccaccatgaccaccttgaagaagaacctggctgacgaggatgctgtgtcttgcctggtgctgggcaccgagaacaaggagctcctggtgcttgaccccgaggccttcaccattttagccaagatgagccttcccagcgtccccgtcttcctagaggtttctggccagtttgatgttgagttccggcttgccgcggcctgccgcaatggaaacatctatattctgagaatgatcatacaagccaccatagtgaaggtgggcggaagacaagacaccatagtgaaggtgggaggaagacaagacaccatagtgaaggtgggaggaagacacacttgatgttttccaaggccacacatttactaaggtggcagaagtggaaataatcccagggtcatctgctttggggccagtgttcctcccagagactccaagcaccccaagtactgcatcgagctgagcgcccagcctgtgggacttatccgggtacacaaggtcctagtggtgggcagcacccaagacagcctgcatggcttcacccacaaggggaagaagctgtggacagtgcagatgcccgcagccatcctgaccatgaacctcctggagcagcattcccggggcctgcaggccgtcatggctgggctggccaatggagaggtccgcatttatcgtgacaaggccctgctcaatgtcatccacaccccggatgcagtgaccagcctttgctttggccggtacgggcgggaggacaacaccctcatcatgaccactcgaggtggtggcctgatcatcaagatcctgaagcgtacagcagtgtttgtagagggaggaagtgaggtgggtcccccaccagcccaggccatgaaactcaatgtgccccgaaagacccggctttacgtggatcagacactgcgagagcgggaggctggcaccgccatgcaccgggccttccagacagacctatacctgctgcgcctacgtgctgcccgcgcctacctgcaggccctcgagtccagcctgagccccctgtccacgacagcccgagagccactcaagctgcacgccgtggttcagggccttggccccacctttaagctcacacttcacctgcagaacacctcaacaacccgtcctgtcctggggctgctggtctgcttcctgtacaacgaggcgctctattccctgccccgggccttcttcaaggtacccttgctggtgccagggctcaactaccccctggagacctttgtggagagtctcagtaacaagggcatctcagacatcatcaaggtgctggtgcttcgagaaggccaaagtgcacccctgctgagtgcccacgtcaacatgcctgggagcgaggggctggcggccgcctgagacctgagctgctgtgaaagcccctgcacaatcagccagggagaactgggcgggtttagtggccccaggcccactcctcatgcagcagtgtgctggggcgacagctcgtctcccctctcttaagcacccgcttcctcaccacccccactgttgggcctatagtagcaggttagtgagtacctagggcggctcaactcctcccacagcaccaacccagcatggtcccactgaagtcctactacgccctcccctccccagccttttccagaaaccatactgggctcagatcagagctccgaagcggtcaaagtgagctgagcaggacaggcccagcctttctccactgccacgtccctcatgcacatcactcatctcctgctgcaggccaaggccaaaattgggctagtcctggccagggaaatcagaagctcttcttgggtgagattgagcctcctgttgctccctggagttccggaggctgggctgcagcccactcagcttgcgggcaaaatacgtgctctcctctctccttgtcagctgagcaaacccagggaatagccctcctctccccaggaaacttctctgaaatcttagacttagccagtcttaggcctacgatgccacacaaaggttgttcagggagaagggggtgcaggaggcagagggtgccccgcagggagctggtggctccagccccactagagctcctaaagatcacacagcagctgctcctgacagggatgctcatgcccagaaagcaagcccaggagaggaaggcagagtgtgacagagcagagccagggccaggcgcaccaggagaggcgtttctggggctccagagaagtgccacgggaggcagaagtccagaactgcccatatagatgcccttctacatcctggagcccaaatcagtcatgtgggtgggaagttcccagggcagtggtcacatcgtgagaattagcaggaaaggcggggcctttcttgtcatagctatttctgaggatgaaatgggagacatatgcccagcacctgatgtaagtttatataatgtaatattatgtacctaccactaagaaatacatgaaccgtgccatgaggacagtaagtgttcataaagcaacatgaagcaagaaacagtgcagggtgcccagtgcacacactagagagaaattgtgaacattaaggacaaggagaattggtgtctttctaaaacatacttatttaaaaacacatacccacttactaatgtggaattacacagtttgtaacaagaaaacagtctctcccattctctagtactgctcccctacccagcagtcacttccagttcattcagctatttttaaaatgtgcttatatgactcttgcttgatatatcaatcttagacattacctgttgactccctgttgtcatacatgaggctttagctctcttttgtcagcaaccctcccccatccctagttattaggttaaaaaatactcagattactatttctattactatgtgaaagttaactgcggagccaagagttggactataattaaattaccttccttgtactttctttttaatgg

SEQ ID NO: 416556 - DNA, 3353 bp, Homo sapiens
  misc_feature (11)..(11): n is a, c, g, or t
agcgggctggnagcgacgacgcctgcgaagatggccgctgcgtcctcatcggattccgacgcctgcggagctgagagcaatgaggccaattcgaagtggttggatgcgcactacgacccaatggccaatatccacaccttttctgcctgcctagctggtggtaggggaccttggccctggtgggcagcagccccgcctgaaggtgctcaaaggaccactggtgatgaccgaaagcccgctacctgctctgccagctgctgctgccaccttcctcatggagcaacatgagccccggaccccagctctggcacttgcttcaggcccttgtgtctatgtgtataagaatctcagaccctacttcaagttcagcctgccccaattgcctccaaatcctctggaacaagacctttggaaccaggccaaagaggaccgaatcgaccccttaaccctgaaggagatgctggagagcatccgggagacggcagaggagcctttgtccatccagtcactcaggtttctgcagctggagctaagtgaaatggaggcatttgtaaaccaacacaagtccaactccatcaagcggcagacagtcatcaccaccatgaccaccttgaagaagaacctggctgacgaggatgctgtgtcttgcctggtgctgggcaccgagaacaaggagctcctggtgcttgaccccgaggccttcaccattttagccaagatgagccttcccagcgtccccgtcttcctagaggtttctggccagtttgatgttgagttccggcttgccgcggcctgccgcaatggaaacatctatattctgagaagagactccaagcaccccaagtactgcatcgagctgagcgcccagcctgtgggacttatccgggtacacaaggtcctagtggtgggcagcacccaagacagcctgcatggcttcacccacaaggggaagaagctgtggacagtgcagatgcccgcagccatcctgaccatgaacctcctggagcagcattcccggggcctgcaggccgtcatggctgggctggccaatggagaggtccgcatttatcgtgacaaggccctgctcaatgtcatccacaccccggatgcagtgaccagcctttgctttggccggtacgggcgggaggacaacaccctcatcatgaccactcgaggtggtggcctgatcatcaagatcctgaagcgtacagcagtgtttgtagagggaggaagtgaggtgggtcccccaccagcccaggccatgaaactcaatgtgccccgaaagacccggctttacgtggatcagacactgcgagagcgggaggctggcaccgccatgcaccgggccttccagacagacctatacctgctgcgcctacgtgctgcccgcgcctacctgcaggccctcgagtccagcctgagccccctgtccacgacagcccgagagccactcaagctgcacgccgtggttcagggccttggccccacctttaagctcacacttcacctgcagaacacctcaacaacccgtcctgtcctggggctgctggtctgcttcctgtacaacgaggcgctctattccctgccccgggccttcttcaaggtacccttgctggtgccagggctcaactaccccctggagacctttgtggagagtctcagtaacaagggcatctcagacatcatcaaggtgctggtgcttcgagaaggccaaagtgcacccctgctgagtgcccacgtcaacatgcctgggagcgaggggctggcggccgcctgagacctgagctgctgtgaaagcccctgcacaatcagccagggagaactgggcgggtttagtggccccaggcccactcctcatgcagcagtgtgctggggcgacagctcgtctcccctctcttaagcacccgcttcctcaccacccccactgttgggcctatagtagcaggttagtgagtacctagggcggctcaactcctcccacagcaccaacccagcatggtcccactgaagtcctactacgccctcccctccccagccttttccagaaaccatactgggctcagatcagagctccgaagcggtcaaagtgagctgagcaggacaggcccagcctttctccactgccacgtccctcatgcacatcactcatctcctgctgcaggccaaggccaaaattgggctagtcctggccagggaaatcagaagctcttcttgggtgagattgagcctcctgttgctccctggagttccggaggctgggctgcagcccactcagcttgcgggcaaaatacgtgctctcctctctccttgtcagctgagcaaacccagggaatagccctcctctccccaggaaacttctctgaaatcttagacttagccagtcttaggcctacgatgccacacaaaggttgttcagggagaagggggtgcaggaggcagagggtgccccgcagggagctggtggctccagccccactagagctcctaaagatcacacagcagctgctcctgacagggatgctcatgcccagaaagcaagcccaggagaggaaggcagagtgtgacagagcagagccagggccaggcgcaccaggagaggcgtttctggggctccagagaagtgccacgggaggcagaagtccagaactgcccatatagatgcccttctacatcctggagcccaaatcagtcatgtgggtgggaagttcccagggcagtggtcacatcgtgagaattagcaggaaaggcggggcctttcttgtcatagctatttctgaggatgaaatgggagacatatgcccagcacctgatgtaagtttatataatgtaatattatgtacctaccactaagaaatacatgaaccgtgccatgaggacagtaagtgttcataaagcaacatgaagcaagaaacagtgcagggtgcccagtgcacacactagagagaaattgtgaacattaaggacaaggagaattggtgtctttctaaaacatacttatttaaaaacacatacccacttactaatgtggaattacacagtttgtaacaagaaaacagtctctcccattctctagtactgctcccctacccagcagtcacttccagttcattcagctatttttaaaatgtgcttatatgactcttgcttgatatatcaatcttagacattacctgttgactccctgttgtcatacatgaggctttagctctcttttgtcagcaaccctcccccatccctagttattaggttaaaaaatactcagattactatttctattactatgtgaaagttaactgcggagccaagagttggactataattaaattaccttccttgtactttctttttaatgg

SEQ ID NO: 416557 - DNA, 3493 bp, Homo sapiens
  misc_feature (11)..(11): n is a, c, g, or t
agcgggctggnagcgacgacgcctgcgaagatggccgctgcgtcctcatcggattccgacgcctgcggagctgagagcaatgaggccaattcgaagtggttggatgcgcactacgacccaatggccaatatccacaccttttctgcctgcctagcgctggcagatttacatggggatggggaatacaagctggtggtaggggaccttggccctggtgggcagcagccccgcctgaaggtgctcaaaggaccactggtgatgaccgaaagcccgctacctgctctgccagctgctgctgccaccttcctcatggagcaacatgagccccggaccccagctctggcacttgcttcaggcccttgtgtctatgtgtataagaatctcagaccctacttcaagttcagcctgccccaattgcctccaaatcctctggaacaagacctttggaaccaggccaaagaggaccgaatcgaccccttaaccctgaaggagatgctggagagcatccggtgagaggctgccttccccttcatacccccctcactccttcatcccatctgagccccagggccccattcttccattcggctgcatgctggcccctttccttgcagggagacggcagaggagcctttgtccatccagtcactcaggtttctgcagctggagctaagtgaaatggaggcatttgtaaaccaacacaagtccaactccatcaagcggcagacagtcatcaccaccatgaccaccttgaagaagaacctggctgacgaggatgctgtgtcttgcctggtgctgggcaccgagaacaaggagctcctggtgcttgaccccgaggccttcaccattttagccaagatgagccttcccagcgtccccgtcttcctagaggtttctggccagtttgatgttgagttccggcttgccgcggcctgccgcaatggaaacatctatattctgagaagagactccaagcaccccaagtactgcatcgagctgagcgcccagcctgtgggacttatccgggtacacaaggtcctagtggtgggcagcacccaagacagcctgcatggcttcacccacaaggggaagaagctgtggacagtgcagatgcccgcagccatcctgaccatgaacctcctggagcagcattcccggggcctgcaggccgtcatggctgggctggccaatggagaggtccgcatttatcgtgacaaggccctgctcaatgtcatccacaccccggatgcagtgaccagcctttgctttggccggtacgggcgggaggacaacaccctcatcatgaccactcgaggtggtggcctgatcatcaagatcctgaagcgtacagcagtgtttgtagagggaggaagtgaggtgggtcccccaccagcccaggccatgaaactcaatgtgccccgaaagacccggctttacgtggatcagacactgcgagagcgggaggctggcaccgccatgcaccgggccttccagacagacctatacctgctgcgcctacgtgctgcccgcgcctacctgcaggccctcgagtccagcctgagccccctgtccacgacagcccgagagccactcaagctgcacgccgtggttcagggccttggccccacctttaagctcacacttcacctgcagaacacctcaacaacccgtcctgtcctggggctgctggtctgcttcctgtacaacgaggcgctctattccctgccccgggccttcttcaaggtacccttgctggtgccagggctcaactaccccctggagacctttgtggagagtctcagtaacaagggcatctcagacatcatcaaggtgctggtgcttcgagaaggccaaagtgcacccctgctgagtgcccacgtcaacatgcctgggagcgaggggctggcggccgcctgagacctgagctgctgtgaaagcccctgcacaatcagccagggagaactgggcgggtttagtggccccaggcccactcctcatgcagcagtgtgctggggcgacagctcgtctcccctctcttaagcacccgcttcctcaccacccccactgttgggcctatagtagcaggttagtgagtacctagggcggctcaactcctcccacagcaccaacccagcatggtcccactgaagtcctactacgccctcccctccccagccttttccagaaaccatactgggctcagatcagagctccgaagcggtcaaagtgagctgagcaggacaggcccagcctttctccactgccacgtccctcatgcacatcactcatctcctgctgcaggccaaggccaaaattgggctagtcctggccagggaaatcagaagctcttcttgggtgagattgagcctcctgttgctccctggagttccggaggctgggctgcagcccactcagcttgcgggcaaaatacgtgctctcctctctccttgtcagctgagcaaacccagggaatagccctcctctccccaggaaacttctctgaaatcttagacttagccagtcttaggcctacgatgccacacaaaggttgttcagggagaagggggtgcaggaggcagagggtgccccgcagggagctggtggctccagccccactagagctcctaaagatcacacagcagctgctcctgacagggatgctcatgcccagaaagcaagcccaggagaggaaggcagagtgtgacagagcagagccagggccaggcgcaccaggagaggcgtttctggggctccagagaagtgccacgggaggcagaagtccagaactgcccatatagatgcccttctacatcctggagcccaaatcagtcatgtgggtgggaagttcccagggcagtggtcacatcgtgagaattagcaggaaaggcggggcctttcttgtcatagctatttctgaggatgaaatgggagacatatgcccagcacctgatgtaagtttatataatgtaatattatgtacctaccactaagaaatacatgaaccgtgccatgaggacagtaagtgttcataaagcaacatgaagcaagaaacagtgcagggtgcccagtgcacacactagagagaaattgtgaacattaaggacaaggagaattggtgtctttctaaaacatacttatttaaaaacacatacccacttactaatgtggaattacacagtttgtaacaagaaaacagtctctcccattctctagtactgctcccctacccagcagtcacttccagttcattcagctatttttaaaatgtgcttatatgactcttgcttgatatatcaatcttagacattacctgttgactccctgttgtcatacatgaggctttagctctcttttgtcagcaaccctcccccatccctagttattaggttaaaaaatactcagattactatttctattactatgtgaaagttaactgcggagccaagagttggactataattaaattaccttccttgtactttctttttaatgg

SEQ ID NO: 416558 - DNA, 2780 bp, Homo sapiens
gcggccgcctgagacctgggctgctgtgaaagcccctgcacaatcagccagggagaactgggcgggtttagtggccccaggcccactcctcatgcagcagtgtgctggggcgacagctcgtctcccctctcttaagcacccgcttcctcaccacccccactgttgggcctatagtagcaggttagtgagtacctagggtggctcaactcctcccacagcaccaacccagacagtgtgttgtttattccacagagactccaagcaccccaagtactgcatcgagctgagcgcccagcctgtgggacttatccgggtacacaaggtcctagtggtgggcagcacccaagacagcctgcatggcttcacccacaaggggaagaagctgtggacagtgcagatgcccgcagccatcctgaccatgaacctcctggagcagcattcccggggcctgcaggccgtcatggctgggctggccaatggagaggtccgcatttatcgtgacaaggccctgctcaatgtcatccacaccccggatgcagtgaccagcctttgctttggccggtacgggcgggaggacaacaccctcatcatgaccactcgaggtggtggcctgatcatcaagatcctgaagcgtacagcagtgtttgtagagggaggaagtgaggtgggtcccccaccagcccaggccatgaaactcaatgtgccccgaaagacccggctttacgtggatcagacactgcgagagcgggaggctggcaccgccatgcaccgggccttccagacagacctatacctgctgcgcctacgtgctgcccgcgcctacctgcaggccctcgagtccagcctgagccccctgtccacgacagcccgagagccactcaagctgcacgccgtggttcagggccttggccccacctttaagctcacacttcacctgcagaacacctcaacaacccgtcctgtcctggggctgctggtctgcttcctgtacaacgaggcgctctattccctgccccgggccttcttcaaggtacccttgctggtgccagggctcaactaccccctggagacctttgtggagagtctcagtaacaagggcatctcagacatcatcaaggtgctggtgcttcgagaaggccaaagtgcacccctgctgagtgcccacgtcaacatgcctgggagcgaggggctggcggccgcctgagacctgagctgctgtgaaagcccctgcacaatcagccagggagaactgggcgggtttagtggccccaggcccactcctcatgcagcagtgtgctggggcgacagctcgtctcccctctcttaagcacccgcttcctcaccacccccactgttgggcctatagtagcaggttagtgagtacctagggcggctcaactcctcccacagcaccaacccagcatggtcccactgaagtcctactacgccctcccctccccagccttttccagaaaccatactgggctcagatcagagctccgaagcggtcaaagtgagctgagcaggacaggcccagcctttctccactgccacgtccctcatgcacatcactcatctcctgctgcaggccaaggccaaaattgggctagtcctggccagggaaatcagaagctcttcttgggtgagattgagcctcctgttgctccctggagttccggaggctgggctgcagcccactcagcttgcgggcaaaatacgtgctctcctctctccttgtcagctgagcaaacccagggaatagccctcctctccccaggaaacttctctgaaatcttagacttagccagtcttaggcctacgatgccacacaaaggttgttcagggagaagggggtgcaggaggcagagggtgccccgcagggagctggtggctccagccccactagagctcctaaagatcacacagcagctgctcctgacagggatgctcatgcccagaaagcaagcccaggagaggaaggcagagtgtgacagagcagagccagggccaggcgcaccaggagaggcgtttctggggctccagagaagtgccacgggaggcagaagtccagaactgcccatatagatgcccttctacatcctggagcccaaatcagtcatgtgggtgggaagttcccagggcagtggtcacatcgtgagaattagcaggaaaggcggggcctttcttgtcatagctatttctgaggatgaaatgggagacatatgcccagcacctgatgtaagtttatataatgtaatattatgtacctaccactaagaaatacatgaaccgtgccatgaggacagtaagtgttcataaagcaacatgaagcaagaaacagtgcagggtgcccagtgcacacactagagagaaattgtgaacattaaggacaaggagaattggtgtctttctaaaacatacttatttaaaaacacatacccacttactaatgtggaattacacagtttgtaacaagaaaacagtctctcccattctctagtactgctcccctacccagcagtcacttccagttcattcagctatttttaaaatgtgcttatatgactcttgcttgatatatcaatcttagacattacctgttgactccctgttgtcatacatgaggctttagctctcttttgtcagcaaccctcccccatccctagttattaggttaaaaaatactcagattactatttctattactatgtgaaagttaactgcggagccaagagttggactataattaaattaccttccttgtactttctttttaatgg

SEQ ID NO: 416559 - DNA, 3298 bp, Homo sapiens
  misc_feature (11)..(11): n is a, c, g, or t
agcgggctggnagcgacgacgcctgcgaagatggccgctgcgtcctcatcggattccgacgcctgcggagctgagagcaatgaggccaattcgaagtggttggatgcgcactacgacccaatggccaatatccacaccttttctgcctgcctagcgctggcagatttacatggggatggggaatacaagctggtggtaggggaccttggccctggtgggcagcagccccgcctgaaggtgctcaaaggaccactggtgatgaccgaaagcccgctacctgctctgccagctgctgctgccaccttcctcatggagcaacatgagccccggaccccagctctggcacttgcttcaggcccttgtgtctatgtgtataagaatctcagaccctacttcaagttcagcctgccccaattgcctccaaatcctctggaacaagacctttggaaccaggccaaagaggaccgaatcgaccccttaaccctgaaggagatgctggagagcatccgggagacggcagaggagcctttgtccatccagtcactcaggtttctgcagctggagctaagtgaaatggaggcatttgtaaaccaacacaagtccaactccatcaagcggcagacagtcatcaccaccatgaccaccttgaagaagaacctggctgacgaggatgctgtgtcttgcctggtgctgggcaccgagaacaaggagctcctggtgcttgaccccgaggccttcaccattttagccaagatgagccttcccagcgtccccgtcttcctagaggtttctggccagtttgatgttgagttccggcttgccgcggcctgccgcaatggaaacatctatattctgagaagagactccaagcaccccaagtactgcatcgagctgagcgcccagcctgtgggacttatccgggtacacaaggtcctagtggtgggcagcacccaagacagcctgcatggcttcacccacaaggggaagaagctgtggacagtgcagatgcccgcagccatcctgaccatgaacctcctggagcagcattcccggggcctgcaggccgtcatggctgggctggccaatggagaggtccgcatttatcgtgacaaggccctgctcaatgtcatccacaccccggatgcagtgaccagcctttgctttggccggtacgggcgggaggacaacaccctcatcatgaccactcgaggtggtggcctgatcatcaagatcctgaagcgtacagcagtgtttgtagagggaggaagtgaggtgggtcccccaccagcccaggccatgaaactcaatgtgccccgaaagacccggctttacgtggatcagacactgcgagagcgggaggctggcaccgccatgcaccgggccttccagacagacctatacctgctgcgcctacgtgctgcccgcgcctacctgcaggccctcgagtccagcctgagccccctgtccacgacagcccgagagccactcaagctgcacgccgtggttcagggccttggccccacctttaagctcacacttcacctgcagaacacctcaacaacccgtcctgtcctggggctgctggtctgcttcctgtacaacgaggcgctctattccctgccccgggccttcttcaaggtacccttgctggtgccagggctcaactaccccctggagacctttgtggagagtctcagtaacaagggcatctcagacatcatcaaggtgctggtgcttcgagaaggccaaagtgcacccctgctgagtgcccacgtcaacatgcctgggagcgaggggctggcggccgcctgagacctgagctgctgtgaaagcccctgcacaatcagccagggagaactgggcgggtttagtggccccaggcccactcctcatgcagcagtgtgctggggcgacagctcgtctcccctctcttaagcacccgcttcctcaccacccccactgttgggcctatagtagcagccttttccagaaaccatactgggctcagatcagagctccgaagcggtcaaagtgagctgagcaggacaggcccagcctttctccactgccacgtccctcatgcacatcactcatctcctgctgcaggccaaggccaaaattgggctagtcctggccagggaaatcagaagctcttcttgggtgagattgagcctcctgttgctccctggagttccggaggctgggctgcagcccactcagcttgcgggcaaaatacgtgctctcctctctccttgtcagctgagcaaacccagggaatagccctcctctccccaggaaacttctctgaaatcttagacttagccagtcttaggcctacgatgccacacaaaggttgttcagggagaagggggtgcaggaggcagagggtgccccgcagggagctggtggctccagccccactagagctcctaaagatcacacagcagctgctcctgacagggatgctcatgcccagaaagcaagcccaggagaggaaggcagagtgtgacagagcagagccagggccaggcgcaccaggagaggcgtttctggggctccagagaagtgccacgggaggcagaagtccagaactgcccatatagatgcccttctacatcctggagcccaaatcagtcatgtgggtgggaagttcccagggcagtggtcacatcgtgagaattagcaggaaaggcggggcctttcttgtcatagctatttctgaggatgaaatgggagacatatgcccagcacctgatgtaagtttatataatgtaatattatgtacctaccactaagaaatacatgaaccgtgccatgaggacagtaagtgttcataaagcaacatgaagcaagaaacagtgcagggtgcccagtgcacacactagagagaaattgtgaacattaaggacaaggagaattggtgtctttctaaaacatacttatttaaaaacacatacccacttactaatgtggaattacacagtttgtaacaagaaaacagtctctcccattctctagtactgctcccctacccagcagtcacttccagttcattcagctatttttaaaatgtgcttatatgactcttgcttgatatatcaatcttagacattacctgttgactccctgttgtcatacatgaggctttagctctcttttgtcagcaaccctcccccatccctagttattaggttaaaaaatactcagattactatttctattactatgtgaaagttaactgcggagccaagagttggactataattaaattaccttccttgtactttctttttaatgg

SEQ ID NO: 416560 - DNA, 3596 bp, Homo sapiens
  misc_feature (11)..(11): n is a, c, g, or t
agcgggctggnagcgacgacgcctgcgaagatggccgctgcgtcctcatcggattccgacgcctgcggagctgagagcaatgaggccaattcgaagtggttggatgcgcactacgacccaatggccaatatccacaccttttctgcctgcctagcgctggcagatttacatggggatggggaatacaagctggtggtaggggaccttggccctggtgggcagcagccccgcctgaaggtgctcaaaggaccactggtgatgaccgaaagcccgctacctgctctgccagctgctgctgccaccttcctcatggagcaacatgagccccggaccccagctctggcacttgcttcaggcccttgtgtctatgtgtataagaatctcagaccctacttcaagttcagcctgccccaattgcctccaaatcctctggaacaagacctttggaaccaggccaaagaggaccgaatcgaccccttaaccctgaaggagatgctggagagcatccgggagacggcagaggagcctttgtccatccagtcactcaggtttctgcagctggagctaagtgaaatggaggcatttgtaaaccaacacaagtccaactccatcaagcggcagacagtcatcaccaccatgaccaccttgaagaagaacctggctgacgaggatgctgtgtcttgcctggtgctgggcaccgagaacaaggagctcctggtgcttgaccccgaggccttcaccattttagccaagatgagccttcccagcgtccccgtcttcctagaggtttctggccagtttgatgttgagttccggcttgccgcggcctgccgcaatggaaacatctatattctgagaagagactccaagcaccccaagtactgcatcgagctgagcgcccagcctgtgggacttatccgggtacacaaggtcctagtggtgggcagcacccaagacagcctgcatggcttcacccacaaggggaagaagctgtggacagtgcagatgcccgcagccatcctgaccatgaacctcctggagcagcattcccggggcctgcaggccgtcatggctgggctggccaatggagaggtccgcatttatcgtgacaaggccctgctcaatgtcatccacaccccggatgcagtgaccagcctttgctttggccggtacgggcgggaggacaacaccctcatcatgaccactcgaggtggtggcctgatcatcaagatcctgaagcgtacagcagtgtttgtagagggaggaagtgaggtgggtcccccaccagcccaggccatgaaactcaatgtgccccgaaagacccggctttacgtggatcagacactgcgagagcgggaggctggcaccgccatgcaccgggccttccagacagacctatacctgctgcgcctacgtgctgcccgcgcctacctgcaggccctcgagtccagcctgagccccctgtccacgacagcccgagagccactcaagctgcacgccgtggttcagggccttggccccacctttaagctcacacttcacctgcagaacacctcaacaacccgtcctgtcctggggctgctggtctgcttcctgtacaacgaggcgctctattccctgccccgggccttcttcaaggtacccttgctggtgccagggctcaactaccccctggagacctttgtggagagtctcagtaacaagggcatctcagacatcatcaaggtaggccccgcacttgtaccacgtggaaggtgagcaggaccctggggaggacagtaagggtgagtgccaacaaagaccttagggggctcctgggtgggggtgggggtatctgcacagtggagccctgtggcctgtcattagggccagcgcagaccaggcaaggggtcaggggtgtatgccccctgctgccatggccactcctccataggtgctggtgcttcgagaaggccaaagtgcacccctgctgagtgcccacgtcaacatgcctgggagcgaggggctggcggccgcctgagacctgagctgctgtgaaagcccctgcacaatcagccagggagaactgggcgggtttagtggccccaggcccactcctcatgcagcagtgtgctggggcgacagctcgtctcccctctcttaagcacccgcttcctcaccacccccactgttgggcctatagtagcaggttagtgagtacctagggcggctcaactcctcccacagcaccaacccagcatggtcccactgaagtcctactacgccctcccctccccagccttttccagaaaccatactgggctcagatcagagctccgaagcggtcaaagtgagctgagcaggacaggcccagcctttctccactgccacgtccctcatgcacatcactcatctcctgctgcaggccaaggccaaaattgggctagtcctggccagggaaatcagaagctcttcttgggtgagattgagcctcctgttgctccctggagttccggaggctgggctgcagcccactcagcttgcgggcaaaatacgtgctctcctctctccttgtcagctgagcaaacccagggaatagccctcctctccccaggaaacttctctgaaatcttagacttagccagtcttaggcctacgatgccacacaaaggttgttcagggagaagggggtgcaggaggcagagggtgccccgcagggagctggtggctccagccccactagagctcctaaagatcacacagcagctgctcctgacagggatgctcatgcccagaaagcaagcccaggagaggaaggcagagtgtgacagagcagagccagggccaggcgcaccaggagaggcgtttctggggctccagagaagtgccacgggaggcagaagtccagaactgcccatatagatgcccttctacatcctggagcccaaatcagtcatgtgggtgggaagttcccagggcagtggtcacatcgtgagaattagcaggaaaggcggggcctttcttgtcatagctatttctgaggatgaaatgggagacatatgcccagcacctgatgtaagtttatataatgtaatattatgtacctaccactaagaaatacatgaaccgtgccatgaggacagtaagtgttcataaagcaacatgaagcaagaaacagtgcagggtgcccagtgcacacactagagagaaattgtgaacattaaggacaaggagaattggtgtctttctaaaacatacttatttaaaaacacatacccacttactaatgtggaattacacagtttgtaacaagaaaacagtctctcccattctctagtactgctcccctacccagcagtcacttccagttcattcagctatttttaaaatgtgcttatatgactcttgcttgatatatcaatcttagacattacctgttgactccctgttgtcatacatgaggctttagctctcttttgtcagcaaccctcccccatccctagttattaggttaaaaaatactcagattactatttctattactatgtgaaagttaactgcggagccaagagttggactataattaaattaccttccttgtactttctttttaatgg

SEQ ID NO: 416561 - DNA, 1770 bp, Homo sapiens
  misc_feature (11)..(11): n is a, c, g, or t
agcgggctggnagcgacgacgcctgcgaagatggccgctgcgtcctcatcggattccgacgcctgcggagctgagagcaatgaggccaattcgaagtggttggatgcgcactacgacccaatggccaatatccacaccttttctgcctgcctagcgctggcagatttacatggggatggggaatacaagctggtggtaggggaccttggccctggtgggcagcagccccgcctgaaggtgctcaaaggaccactggtgatgaccgaaagcccgctacctgctctgccagctgctgctgccaccttcctcatggagcaacatgagccccggaccccagctctggcacttgcttcaggcccttgtgtctatgtgtataagaatctcagaccctacttcaagttcagcctgccccaattgcctccaaatcctctggaacaagacctttggaaccaggccaaagaggaccgaatcgaccccttaaccctgaaggagatgctggagagcatccgggagacggcagaggagcctttgtccatccagtcactcaggtttctgcagctggagctaagtgaaatggaggcatttgtaaaccaacacaagtccaactccatcaagcggcagacagtcatcaccaccatgaccaccttgaagaagaacctggctgacgaggatgctgtgtcttgcctggtgctgggcaccgagaacaaggagctcctggtgcttgaccccgaggccttcaccattttagccaagatgagccttcccagcgtccccgtcttcctagaggtttctggccagtttgatgttgagttccggcttgccgcggcctgccgcaatggaaacatctatattctgagaagagactccaagcaccccaagtactgcatcgagctgagcgcccagcctgtgggacttatccgggtacacaaggtcctagtggtgggcagcacccaagacagcctgcatggcttcacccacaaggggaagaagctgtggacagtgcagatgcccgcagccatcctgaccatgaacctcctggagcagcattcccggggcctgcaggccgtcatggctgggctggccaatggagaggtccgcatttatcgtgacaaggccctgctcaatgtcatccacaccccggatgcagtgaccagcctttgctttggccggtacgggcgggaggacaacaccctcatcatgaccactcgaggtggtggcctgatcatcaagatcctgaagcgtacagcagtgtttgtagagggaggaagtgaggtgggtcccccaccagcccaggccatgaaactcaatgtgccccgaaagacccggctttacgtggatcagacactgcgagagcgggaggctggcaccggtgagcctcagactgggtcctttcccttcttcctcctccactgctcctacacagcaaagctgggggaatgctgcccagcctccctgtgcactgggaggagatctcggccaactaggtaggtcactcacctctgcaaatccagggacagcctaggaggtacacgttgcctgcaaatcactgttcctcaggctggaaggtgctgtgggtgacagcaagagcccttagaattcagggaagggagcagtcacttccaaacgcaggaattctcatgaggaaagtagaattttgactgggcatggtggctcacgcctgtaatcccaacactttggcagaggtgggaggacagcatgagcccaggagttcaagacctacctgggtaacataatgatacttctttctca

SEQ ID NO: 416562 - DNA, 1225 bp, Homo sapiens
  misc_feature (11)..(11): n is a, c, g, or t
agcgggctggnagcgacgacgcctgcgaagatggccgctgcgtcctcatcggattccgacgcctgcggagctgagagcaatgaggccaattcgaagtggttggatgcgcactacgacccaatggccaatatccacaccttttctgcctgcctagcgctggcagatttacatggggatggggaatacaagctggtggtaggggaccttggccctggtgggcagcagccccgcctgaaggtgctcaaaggaccactggtgatgaccgaaagcccgctacctgctctgccagctgctgctgccaccttcctcatggagcaacatgagccccggaccccagctctggcacttgcttcaggcccttgtgtctatgtgtataagaatctcagaccctacttcaagttcagcctgccccaattgcctccaaatcctctggaacaagacctttggaaccaggccaaagaggaccgaatcgaccccttaaccctgaaggagatgctggagagcatccgggagacggcagaggagcctttgtccatccagtcactcaggtttctgcagctggagctaagtgaaatggaggcatttgtaaaccaacacaagtccaactccatcaagcggcagacagtcatcaccaccatgaccaccttgaagaagaacctggctgacgaggatgctgtgtcttgcctggtgctgggcaccgagaacaaggagctcctggtgcttgaccccgaggccttcaccattttagccaagatgagccttcccagcgtccccgtcttcctagaggtttctggccagtttgatgttgagttccggcttgccgcggcctgccgcaatggaaacatctatattctgagaaggtagccacatccgtggtctccggggccgggaggaacatctcagaaaactggtggcttcagaggcttgcaagatgagagtgggctttaaggctggaatttggaaatgcaaagagctgagaacttcataaaggaggctgagcccacaaacacaggggaggatacctggaggcttgtgagataggggctggcacagtgagagactaggctgggtggctatagtacaggagtgatcagaaatgagaggacaggctgggcgctgtggctcacgcctgtaatcccagcactttgggaggccgaggcaagcggatcacctgaggtcaggagttcaagaccagcctggccaacatggtgaaaccccgtctcta

SEQ ID NO: 416563 - DNA, 742 bp, Homo sapiens
  misc_feature (11)..(11): n is a, c, g, or t
agcgggctggnagcgacgacgcctgcgaagatggccgctgcgtcctcatcggattccgacgcctgcggagctgagagcaatgaggccaattcgaagtggttggatgcgcactacgacccaatggccaatatccacaccttttctgcctgcctagcgctggcagatttacatggggatggggaatacaagctggtggtaggggaccttggccctggtgggcagcagccccgcctgaaggtgctcaaaggaccactggtgatgaccgaaagcccgctacctgctctgccagctgctgctgccaccttcctcatggagcaacatgagccccggaccccagctctggcacttgcttcaggcccttgtgtctatgtgtataagaatctcagaccctacttcaagttcagcctgccccaattgcctccaaatcctctggaacaagacctttggaaccaggccaaagaggaccgaatcgaccccttaaccctgaaggagatgctggagagcatccgggagacggcagaggagcctttgtccatccagtcactcaggtttctgcagctggagctaagtgaaatggaggcatttgtaaaccaacacaagtccaactccatcaagcggcaggtaatacccccttctctttttatttccctgtaaaaaaatttacatttttttaaaagaccacttaacatcagtggtaaattctataagcaaacccaaccagtatctctttgctatatccctt

SEQ ID NO: 416564 - DNA, 1128 bp, Homo sapiens
tatccatcatattgaggtaccataatttatttaccctgccacctattgtacatttaaactgtttttcattttttgctattaataccaatgctatagacctttttacccaaatatccttgcatgcttgtttgtttgtttttgagacaatcttgttctcttgcccaggctgaagtgcagtggtacaatctcagcttactgcaacctatgccacctgggctcaaacagtcctctcacctcatcttctcatctgtgggaccaccacgcccagctaagttttgtacttttggtagagacaaagttttgccatgttggacaggctggtcttgaactcctgagctcaagcgatccacccgcctcagcctctcaaagtgttgggattacaggtgtgggccaccacacccagctgcacggttgtttaagtacatccttaggatgcagtcctagaagtggcatcgtttagtcaaaaggcacagactaaaaggcttttgctaaatgttgccccaagtttccctcctgaaaaactgtatgagtttaaactgggtgtaagtgaggagattgggactttagaccaggcactcactcagaggagttactgacagggcagggagggacgggggctccagagaaattggagtgtttgcgcttcttgtttgcagatgagccttcccagcgtccccgtcttcctagaggtttctggccagtttgatgttgagttccggcttgccgcggcctgccgcaatggaaacatctatattctgagaaggtagccacatccgtggtctccggggccgggaggaacatctcagaaaactggtggcttcagaggcttgcaagatgagagtgggctttaaggctggaatttggaaatgcaaagagctgagaacttcataaaggaggctgagcccacaaacacaggggaggatacctggaggcttgtgagataggggctggcacagtgagagactaggctgggtggctatagtacaggagtgatcagaaatgagaggacaggctgggcgctgtggctcacgcctgtaatcccagcactttgggaggccgaggcaagcggatcacctgaggtcaggagttcaagaccagcctggccaacatggtgaaaccccgtctcta

SEQ ID NO: 416565 - DNA, 847 bp, Homo sapiens
  misc_feature (11)..(11): n is a, c, g, or t
agcgggctggnagcgacgacgcctgcgaagatggccgctgcgtcctcatcggattccgacgcctgcggagctgagagcaatgaggccaattcgaagtggttggatgcgcactacgacccaatggccaatatccacaccttttctgcctgcctagcgctggcagatttacatggggatggggaatacaagctggtggtaggggaccttggccctggtgggcagcagccccgcctgaaggtgctcaaaggaccactggtgatgaccgaaagcccgctacctgctctgccagctgctgctgccaccttcctcatggagcaacatgagccccggaccccagctctggcacttgcttcaggcccttgtgtctatgtgtataagaatctcagaccctacttcaagttcagcctgccccaattgcctccaaatcctctggaacaagacctttggaaccaggccaaagagggggagacggcagaggagcctttgtccatccagtcactcaggtttctgcagctggagctaagtgaaatggaggcatttgtaaaccaacacaagtccaactccatcaagcggcagacagtcatcaccaccatgaccaccttgaagaagaacctggctgacgaggatgctgtgtcttgcctggtgctgggcaccgagaacaaggagctcctggtgcttgaccccgaggccttcaccattttagccaaggtcagcgtcaggtctggccctgggcccgctggaggcccaggctgcattctctccccatgctccacagttagttctgggtaatatatatgttccttgtagaaaaattagaaactagataagcattaaaaaagatatatat

SEQ ID NO: 416566 - DNA, 1300 bp, Homo sapiens
ccacgcgtccggggaaaccgaggcctaagatgtgcatatgtgtgtctggaggtcgctcggtgagccagtggcggagcctggacttgtacccagacgttctgtaccttatgttcagagtgacctgtaccagcttcctcaaagtttttttttcccctcccatgggactcactccccaactgtctttcccccacttccagcaatgaggccaattcgaagtggttggatgcgcactacgacccaatggccaatatccacaccttttctgcctgcctagcgctggcagatttacatggggatggggaatacaagctggtggtaggggaccttggccctggtgggcagcagccccgcctgaaggtgctcaaaggaccactggtgatgaccgaaagcccgctacctgctctgccagctgctgctgccaccttcctcatggagcaacatgagccccggaccccagctctggcacttgcttcaggcccttgtgtctatgtgtataagaatctcagaccctacttcaagttcagcctgccccaattgcctccaaatcctctggaacaagacctttggaaccaggccaaagagggggagacggcagaggagcctttgtccatccagtcactcaggtttctgcagctggagctaagtgaaatggaggcatttgtaaaccaacacaagtccaactccatcaagcggcagacagtcatcaccaccatgaccaccttgaagaagaacctggctgacgaggatgctgtgtcttgcctggtgctgggcaccgagaacaaggagctcctggtgcttgaccccgaggccttcaccattttagccaagatgagccttcccagcgtccccgtcttcctagaggtttctggccagtttgatgttgagttccggcttgccgcggcctgccgcaatggaaacatctatattctgagaaggtagccacatccgtggtctccggggccgggaggaacatctcagaaaactggtggcttcagaggcttgcaagatgagagtgggctttaaggctggaatttggaaatgcaaagagctgagaacttcataaaggaggctgagcccacaaacacaggggaggatacctggaggcttgtgagataggggctggcacagtgagagactaggctgggtggctatagtacaggagtgatcagaaatgagaggacaggctgggcgctgtggctcacgcctgtaatcccagcactttgggaggccgaggcaagcggatcacctgaggtcaggagttcaagaccagcctggccaacatggtgaaaccccgtctcta

SEQ ID NO: 416567 - DNA, 1026 bp, Homo sapiens
caacatggtgaaactaaaaatacaaaaagtagctgggcacggtggcgtgcgcctgtaatcccagctagttgggaggctgaggcaggagaattgcttgaacctgcgaggcagaggttgcggtgagccgagattgtgccactgcgctcctgcctgggcgacagagcgagaacctgtctcaagaaaaaaaaagactgcatagtttttgatcatatggatggctcataattgacttagacaatcctcttttgttagaaagttagatttgttgcaataaacacctttgtacttaaatcttctgtcacatctctgatatttcctcttcatcctcctttgccctctttcttccctcatgtggcattctgggagtatcttgggggtggtgtgtggaggttccctgggtgacccctggagtccttctgtagacagtcatcaccaccatgaccaccttgaagaagaacctggctgacgaggatgctgtgtcttgcctggtgctgggcaccgagaacaaggagctcctggtgcttgaccccgaggccttcaccattttagccaagatgagccttcccagcgtccccgtcttcctagaggtttctggccagtttgatgttgagttccggcttgccgcggcctgccgcaatggaaacatctatattctgagaaggtagccacatccgtggtctccggggccgggaggaacatctcagaaaactggtggcttcagaggcttgcaagatgagagtgggctttaaggctggaatttggaaatgcaaagagctgagaacttcataaaggaggctgagcccacaaacacaggggaggatacctggaggcttgtgagataggggctggcacagtgagagactaggctgggtggctatagtacaggagtgatcagaaatgagaggacaggctgggcgctgtggctcacgcctgtaatcccagcactttgggaggccgaggcaagcggatcacctgaggtcaggagttcaagaccagcctggccaacatggtgaaaccccgtctcta

SEQ ID NO: 416568 - DNA, 1278 bp, Homo sapiens
  misc_feature (1170)..(1170): n is a, c, g, or t
  misc_feature (1216)..(1216): n is a, c, g, or t
ttgggcgcttcgctgatggtgtcggtgagcgcgtttcccgcctgagcgcaactagcggcgggtcgtgggcacctccaggctcagacgtgcagcttctggaatacgaggcgtcagctgctggcctcatccgatccttctctgagcgtttcccagaggatggacccgagttggaggagatcctcacacagctggccacagccgatgcccgattctggaagggccccagtgaggccccatctggccaagcttgaggaagatgtgtggccttgcccccaattccatcagaccaaggctgcaagtggccctccattcgtcaatgaggccaattcgaagtggttggatgcgcactacgacccaatggccaatatccacaccttttctgcctgcctagctggtggtaggggaccttggccctggtgggcagcagccccgcctgaaggtgctcaaaggaccactggtgatgaccgaaagcccgctacctgctctgccagctgctgctgccaccttcctcatggagcaacatgagccccggaccccagctctggcacttgcttcaggcccttgtgtctatgtgtataagaatctcagaccctacttcaagttcagcctgccccaattgcctccaaatcctctggaacaagacctttggaaccaggccaaagagggggagacggcagaggagcctttgtccatccagtcactcaggtaaggaccctgtggagggccagggtttgggaggctccagggagaggaagcagccgccagaatgtgccagaatgatggaggagggcagcgaggccggggcctgcagatgccagttctctgtgtgtctaggtttctgcagctggagctaagtgaaatggaggcatttgtaaaccaacacaagtccaactccatcaagcggcagacagtcatcaccaccatgaccaccttgaagaagaacctggctgacgaggatgctgtgtcttgcctggtgctgggcaccgagaacaaggagctcctggtgcttgaccccgaggccttcaccattttagccaagatgagccttcccagcgtccccgtcttcctagaggtttctggccagtttgatgttgagttccggcttgccgcggcctgccgcaatggaaacatctatattctgagaagagactccaaggcacccaaggtacntgcatcgagctgagcgcccagcctgtgggacttatccgggtacacnaggtcctaagtggtggggcagcaacccaagaaaggctgctgggttcacccacaagggcacag

SEQ ID NO: 416569 - DNA, 455 bp, Homo sapiens
ggccaactcaaagtgggaaagacattggcgtgtgctcctcgaatagagaggaactaactgtactttctggaaagggaaactaaaattgagaggccagtaaactaaaaactgcattgacacagggcaaagctcttcatccttttctcataataaagtgcctaagtccacttgtcctggctagtccagccaaaggtaaactcactgaaaactctgttaaatgctagatgatcatacaagccaccatagtgaaggtgggcggaagacaagacaccatagtgaaggtgggaggaagacaagacaccatagtgaaggtgggaggaagacacacttgatgttttccaaggccacacatttactaaggtggcagaagtggaaataatcccagggtcatctgctttggggccagtgttcctcccaggtgagtccatgaggtttagacagaggagggtcagcca

SEQ ID NO: 416570 - DNA, 444 bp, Homo sapiens
gggttttttttttcccctttaaaaaaaaattttttgtgggggtaggagcaggatggaaatactttgctgcccttgccatcttttaggatgggcccccaggagactgaggtcttcctgggccctcattgctgcttatcgtaccccccatcacctgcacatgggacagaccgggctggagggtgaccttggctgtgtacgtcccagcaaaagagctctggcccgcatctcgctgtgccctgaagggggatgaagggcgatgcctcgcccgaggctttgggctgctgcactgcatgctgggactgctcctactctctgtcccacccctcacccagctgtggtccggctttgggagagtggtgaattgcgctgcccgaactcggagcggagcagggtagggaccgtgtacagcttgataacccttaataaaaagggagtttgaccaga

SEQ ID NO: 416571 - DNA, 443 bp, Homo sapiens
agtaggagcagtcccagcatgcagtgcagctgggtgaggggtgggacagagagtaggagcagtcccagcatgcagtccagctgtggtccggctttgggagagtggtgaattgcgctgcccgaactcggagcggagcagggtagggaccgtgtacagcttgataacccttaataaaaagggagtttgaccagaaaaaaaaaaaaaaaaaaaaaaaaaaaaaaaaaaaaaaaaaaccccggggcggcctttattttccgggggcgcggaaaaaaaggggtgtaatataaaagggggcgcaccatggggccatatcgcgttgtgttctccgggacccccagtttttttttgtcacaaggggggaaaatctctggcggcgggtctccccacatatatagagagagagagtcgcagatatatatatatttccagaaaacccgggttac

SEQ ID NO: 416572 - DNA, 3770 bp, Homo sapiens
agcgggcggacacccggcctagcgccgcgggtcgcgccgagccgagccgagccgagcggagccggcggagcctctggaatcacccgggtcgctgttcctgagcagctgcagagcatcgagggctggagaggagcacatactgtccatggagctggtggtcaaggtggacagggggcggtggtgatggcgcagtttgacactgaataccagcgcctagaggcctcctatagtgattcacccccaggggaggaggacctgttggtgcacgtcgccgaggggagcaagtcaccttggcaccatattgaaaaccttgacctcttcttctctcgagtttataatctgcaccagaagaatggcttcacatgtatgctcatcggggagatctttgagctcatgcagttcctctttgtggttgccttcactaccttcctggtcagctgcgtggactatgacatcctatttgccaacaagatggtgaaccacagtcttcaccctactgaacccgtcaaggtcactctgccagacgcctttttgcctgctcaagtctgtagtgccaggattcaggaaaatggctcccttatcaccatcctggtcattgctggtgtcttctggatccaccggcttatcaagttcatctataacatttgctgctactgggagatccactccttctacctgcacgctctgcgcatccctatgtctgcccttccgtattgcacgtggcaagaagtgcaggcccggatcgtgcagacgcagaaggagcaccagatctgcatccacaaacgtgagctgacagaactggacatctaccaccgcatcctccgtttccagaactacatggtggcactggttaacaaatccctcctgcctctgcgcttccgcctgcctggcctcggggaagctgtcttcttcacccgtggtctcaagtacaactttgagctgatcctcttctggggacctggctctctgtttctcaatgaatggagcctcaaggccgagtacaaacgtggggggcaacggctagagctggcccagcgcctcagcaaccgcatcctgtggattggcatcgctaacttcctgctgtgccccctcatcctcatatggcaaatcctctatgccttcttcagctatgctgaggtgctgaagcgggagccgggggccctgggagcacgctgctggtcactctatggccgctgctacctccgccacttcaacgagctggagcacgagctgcagtcccgcctcaaccgtggctacaagcccgcctccaagtacatgaattgcttcttgtcacctcttttgacactgctggccaagaatggagccttcttcgctggctccatcctggctgtgcttattgccctcaccatttatgacgaagatgtgttggctgtggaacatgtgctgaccaccgtcacactcctgggggtcaccgtgaccgtgtgcaggtcctttatcccggaccagcacatggtgttctgccctgagcagctgctccgcgtgatcctcgctcacatccactacatgcctgaccactggcagggtaatgcccaccgctcgcagacccgggacgagtttgcccagctcttccagtacaaggcagtgttcattttggaagagttgctgagccccattgtcacacccctcatcctcatcttctgcctgcgcccacgggccctggagattatagacttcttccgaaacttcaccgtggaggtcgttggtgtgggagatacctgctcctttgctcagatggatgttcgccagcatggtcatccccagtggctatctgctgggcagacagaggcctcagtgtaccagcaagctgaggatggaaagacagagttgtcactcatgcactttgccatcaccaaccctggctggcagccaccacgtgagagcacagccttcctaggcttcctcaaggagcaggttcagcgggatggagcagctgctagcctcgcccaagggggtctgctccctgaaaatgccctctttacgtctatccagtccttacaatctgagtctgagcccctgagccttatcgcaaatgtggtagctggctcatcctgccggggccctccactgcccagagacctgcagggctccaggcacagggctgaagtcgcctctgccctgcgctccttctccccgctgcaacccgggcaggcgcccacaggccgggctcacagcaccatgacaggctctggggtggatgccaggacagccagctccgggagcagcgtgtgggaaggacagctgcagagcctggtgctgtcagaatatgcatccacagagatgagcctgcatgccctctatatgcaccagctccacaagcagcaggcccaggctgaacctgagcggcatgtatggcaccgccgggagagtgatgagagtggagaaagcgcccctgatgaagggggagagggcgcccgggccccccagtctatccctcgctctgctagctatccctgtgcagcaccccggcctggagctcctgagaccaccgccctgcatgggggcttccagaggcgctacggtggcatcacagatcctggcacagtgcccagggttccctctcatttctctcggctgcctcttggagggtgggcagaagatgggcagtcggcatcaaggcaccctgagcccgtgcccgaagagggctcggaggatgagctaccccctcaggtgcacaaggtatagacaaggctgagcagggttcctgtggcccaggatggaggccaccgctgccctgccatcccgtctgcctgccatgggacggctcctctgagtgttccctggccccacgtgtgtggtgtttgtgtgtctgtgcctggccaagggaggtgccaacactgggcttgccacagccccaggagaggaatttggggcctaggaaccgagggcacacgggactctagcctcatccccaggacccccttggctcagagtgtggtgctagaaactggtccccagcccagccccagtactgccacctttacacctacccctgcaagtccccagagggctgcccacgatagaagctgccaagcagggagaacctgtgccaactgtggagtggggaggttgggcctggaccctcaacccctgcaaccttccctagccccctcaatagatgagcaggtcaggctgtggcccttacctcacccgcagttctcgcccagtgctgcagccggctcacctctctccgcttcttgcacatcactggcctgtgtgtgctgcttgctcctgttctgttcgcttgctcccgttccgttcggcttttgctttgcgttagggtgaagaccctagcgtccagctcccctcaacgctatattttgacactaaaaaagaaggtttctaaattgtaggagcaggatggaaatactttgctgcccttgccatcttttaggatgggcccccaggagactgaggtcttcctgggccctcattgctgcttatcgtaccccccatcacctgcacatgggacagaccgggctggagggtgaccttggctgtgtacgtcccagcaaaagagctctggcccgcatctcgctgtgccctgaagggggatgaagggcgatgcctcgcccgaggctttgggctgctgcactgcatgctgggactgctcctactctctgtcccacccctcacccagctgtggtccggctttgggagagtggtgaattgcgctgcccgaactcggagcggagcagggtagggaccgtgtacagcttgataacccttaataaaaagggagtttgaccaga

SEQ ID NO: 416573 - DNA, 4002 bp, Homo sapiens
cgcgcgaggttgtccgctgttgggagctgccagcccttggcctggggccgggcgaccctggggcgaggtggactccggtccacggtcgccgcggctgggtgtggggaggcaagccaacccacccgggctatcagctgtaaggctgactcgatccctgcaacatccgcaggaacccctgagcccaggcccagccggccggggctccacgggccctggtccacactgaccctgtgagtggtgacttccctgaggggcagggctctcactagcccagggaatcccaccggggccaggctgggccaagatccacggcccccaggggctgcacggacagcagctgcagagcatcgagggctggagaggagcacatactgtccatggagctggtggtcaaggtggacagggggcggtggtgatggcgcagtttgacactgaataccagcgcctagaggcctcctatagtgattcacccccaggggaggaggacctgttggtgcacgtcgccgaggggagcaagtcaccttggcaccatattgaaaaccttgacctcttcttctctcgagtttataatctgcaccagaagaatggcttcacatgtatgctcatcggggagatctttgagctcatgcagttcctctttgtggttgccttcactaccttcctggtcagctgcgtggactatgacatcctatttgccaacaagatggtgaaccacagtcttcaccctactgaacccgtcaaggtcactctgccagacgcctttttgcctgctcaagtctgtagtgccaggattcaggaaaatggctcccttatcaccatcctggtcattgctggtgtcttctggatccaccggcttatcaagttcatctataacatttgctgctactgggagatccactccttctacctgcacgctctgcgcatccctatgtctgcccttccgtattgcacgtggcaagaagtgcaggcccggatcgtgcagacgcagaaggagcaccagatctgcatccacaaacgtgagctgacagaactggacatctaccaccgcatcctccgtttccagaactacatggtggcactggttaacaaatccctcctgcctctgcgcttccgcctgcctggcctcggggaagctgtcttcttcacccgtggtctcaagtacaactttgagctgatcctcttctggggacctggctctctgtttctcaatgaatggagcctcaaggccgagtacaaacgtggggggcaacggctagagctggcccagcgcctcagcaaccgcatcctgtggattggcatcgctaacttcctgctgtgccccctcatcctcatatggcaaatcctctatgccttcttcagctatgctgaggtgctgaagcgggagccgggggccctgggagcacgctgctggtcactctatggccgctgctacctccgccacttcaacgagctggagcacgagctgcagtcccgcctcaaccgtggctacaagcccgcctccaagtacatgaattgcttcttgtcacctcttttgacactgctggccaagaatggagccttcttcgctggctccatcctggctgtgcttattgccctcaccatttatgacgaagatgtgttggctgtggaacatgtgctgaccaccgtcacactcctgggggtcaccgtgaccgtgtgcaggtcctttatcccggaccagcacatggtgttctgccctgagcagctgctccgcgtgatcctcgctcacatccactacatgcctgaccactggcagggtaatgcccaccgctcgcagacccgggacgagtttgcccagctcttccagtacaaggcagtgttcattttggaagagttgctgagccccattgtcacacccctcatcctcatcttctgcctgcgcccacgggccctggagattatagacttcttccgaaacttcaccgtggaggtcgttggtgtgggagatacctgctcctttgctcagatggatgttcgccagcatggtcatccccagtggctatctgctgggcagacagaggcctcagtgtaccagcaagctgaggatggaaagacagagttgtcactcatgcactttgccatcaccaaccctggctggcagccaccacgtgagagcacagccttcctaggcttcctcaaggagcaggttcagcgggatggagcagctgctagcctcgcccaagggggtctgctccctgaaaatgccctctttacgtctatccagtccttacaatctgagtctgagcccctgagccttatcgcaaatgtggtagctggctcatcctgccggggccctccactgcccagagacctgcagggctccaggcacagggctgaagtcgcctctgccctgcgctccttctccccgctgcaacccgggcaggcgcccacaggccgggctcacagcaccatgacaggctctggggtggatgccaggacagccagctccgggagcagcgtgtgggaaggacagctgcagagcctggtgctgtcagaatatgcatccacagagatgagcctgcatgccctctatatgcaccagctccacaagcagcaggcccaggctgaacctgagcggcatgtatggcaccgccgggagagtgatgagagtggagaaagcgcccctgatgaagggggagagggcgcccgggccccccagtctatccctcgctctgctagctatccctgtgcagcaccccggcctggagctcctgagaccaccgccctgcatgggggcttccagaggcgctacggtggcatcacagatcctggcacagtgcccagggttccctctcatttctctcggctgcctcttggagggtgggcagaagatgggcagtcggcatcaaggcaccctgagcccgtgcccgaagagggctcggaggatgagctaccccctcaggtgcacaaggtatagacaaggctgagcagggttcctgtggcccaggatggaggccaccgctgccctgccatcccgtctgcctgccatgggacggctcctctgagtgttccctggccccacgtgtgtggtgtttgtgtgtctgtgcctggccaagggaggtgccaacactgggcttgccacagccccaggagaggaatttggggcctaggaaccgagggcacacgggactctagcctcatccccaggacccccttggctcagagtgtggtgctagaaactggtccccagcccagccccagtactgccacctttacacctacccctgcaagtccccagagggctgcccacgatagaagctgccaagcagggagaacctgtgccaactgtggagtggggaggttgggcctggaccctcaacccctgcaaccttccctagccccctcaatagatgagcaggtcaggctgtggcccttacctcacccgcagttctcgcccagtgctgcagccggctcacctctctccgcttcttgcacatcactggcctgtgtgtgctgcttgctcctgttctgttcgcttgctcccgttccgttcggcttttgctttgcgttagggtgaagaccctagcgtccagctcccctcaacgctatattttgacactaaaaaagaaggtttctaaattgtaggagcaggatggaaatactttgctgcccttgccatcttttaggatgggcccccaggagactgaggtcttcctgggccctcattgctgcttatcgtaccccccatcacctgcacatgggacagaccgggctggagggtgaccttggctgtgtacgtcccagcaaaagagctctggcccgcatctcgctgtgccctgaagggggatgaagggcgatgcctcgcccgaggctttgggctgctgcactgcatgctgggactgctcctactctctgtcccacccctcacccagctgtggtccggctttgggagagtggtgaattgcgctgcccgaactcggagcggagcagggtagggaccgtgtacagcttgataacccttaataaaaagggagtttgaccaga

SEQ ID NO: 416574 - DNA, 3718 bp, Homo sapiens
agcgggcggacacccggcctagcgccgcgggtcgcgccgagccgagccgagccgagcggagccggcggagcctctggaatcacccgggtcgctgttcctgaggtggtcaaggtggacagggggcggtggtgatggcgcagtttgacactgaataccagcgcctagaggcctcctatagtgattcacccccaggggaggaggacctgttggtgcacgtcgccgaggggagcaagtcaccttggcaccatattgaaaaccttgacctcttcttctctcgagtttataatctgcaccagaagaatggcttcacatgtatgctcatcggggagatctttgagctcatgcagttcctctttgtggttgccttcactaccttcctggtcagctgcgtggactatgacatcctatttgccaacaagatggtgaaccacagtcttcaccctactgaacccgtcaaggtcactctgccagacgcctttttgcctgctcaagtctgtagtgccaggattcaggaaaatggctcccttatcaccatcctggtcattgctggtgtcttctggatccaccggcttatcaagttcatctataacatttgctgctactgggagatccactccttctacctgcacgctctgcgcatccctatgtctgcccttccgtattgcacgtggcaagaagtgcaggcccggatcgtgcagacgcagaaggagcaccagatctgcatccacaaacgtgagctgacagaactggacatctaccaccgcatcctccgtttccagaactacatggtggcactggttaacaaatccctcctgcctctgcgcttccgcctgcctggcctcggggaagctgtcttcttcacccgtggtctcaagtacaactttgagctgatcctcttctggggacctggctctctgtttctcaatgaatggagcctcaaggccgagtacaaacgtggggggcaacggctagagctggcccagcgcctcagcaaccgcatcctgtggattggcatcgctaacttcctgctgtgccccctcatcctcatatggcaaatcctctatgccttcttcagctatgctgaggtgctgaagcgggagccgggggccctgggagcacgctgctggtcactctatggccgctgctacctccgccacttcaacgagctggagcacgagctgcagtcccgcctcaaccgtggctacaagcccgcctccaagtacatgaattgcttcttgtcacctcttttgacactgctggccaagaatggagccttcttcgctggctccatcctggctgtgcttattgccctcaccatttatgacgaagatgtgttggctgtggaacatgtgctgaccaccgtcacactcctgggggtcaccgtgaccgtgtgcaggtcctttatcccggaccagcacatggtgttctgccctgagcagctgctccgcgtgatcctcgctcacatccactacatgcctgaccactggcagggtaatgcccaccgctcgcagacccgggacgagtttgcccagctcttccagtacaaggcagtgttcattttggaagagttgctgagccccattgtcacacccctcatcctcatcttctgcctgcgcccacgggccctggagattatagacttcttccgaaacttcaccgtggaggtcgttggtgtgggagatacctgctcctttgctcagatggatgttcgccagcatggtcatccccagtggctatctgctgggcagacagaggcctcagtgtaccagcaagctgaggatggaaagacagagttgtcactcatgcactttgccatcaccaaccctggctggcagccaccacgtgagagcacagccttcctaggcttcctcaaggagcaggttcagcgggatggagcagctgctagcctcgcccaagggggtctgctccctgaaaatgccctctttacgtctatccagtccttacaatctgagtctgagcccctgagccttatcgcaaatgtggtagctggctcatcctgccggggccctccactgcccagagacctgcagggctccaggcacagggctgaagtcgcctctgccctgcgctccttctccccgctgcaacccgggcaggcgcccacaggccgggctcacagcaccatgacaggctctggggtggatgccaggacagccagctccgggagcagcgtgtgggaaggacagctgcagagcctggtgctgtcagaatatgcatccacagagatgagcctgcatgccctctatatgcaccagctccacaagcagcaggcccaggctgaacctgagcggcatgtatggcaccgccgggagagtgatgagagtggagaaagcgcccctgatgaagggggagagggcgcccgggccccccagtctatccctcgctctgctagctatccctgtgcagcaccccggcctggagctcctgagaccaccgccctgcatgggggcttccagaggcgctacggtggcatcacagatcctggcacagtgcccagggttccctctcatttctctcggctgcctcttggagggtgggcagaagatgggcagtcggcatcaaggcaccctgagcccgtgcccgaagagggctcggaggatgagctaccccctcaggtgcacaaggtatagacaaggctgagcagggttcctgtggcccaggatggaggccaccgctgccctgccatcccgtctgcctgccatgggacggctcctctgagtgttccctggccccacgtgtgtggtgtttgtgtgtctgtgcctggccaagggaggtgccaacactgggcttgccacagccccaggagaggaatttggggcctaggaaccgagggcacacgggactctagcctcatccccaggacccccttggctcagagtgtggtgctagaaactggtccccagcccagccccagtactgccacctttacacctacccctgcaagtccccagagggctgcccacgatagaagctgccaagcagggagaacctgtgccaactgtggagtggggaggttgggcctggaccctcaacccctgcaaccttccctagccccctcaatagatgagcaggtcaggctgtggcccttacctcacccgcagttctcgcccagtgctgcagccggctcacctctctccgcttcttgcacatcactggcctgtgtgtgctgcttgctcctgttctgttcgcttgctcccgttccgttcggcttttgctttgcgttagggtgaagaccctagcgtccagctcccctcaacgctatattttgacactaaaaaagaaggtttctaaattgtaggagcaggatggaaatactttgctgcccttgccatcttttaggatgggcccccaggagactgaggtcttcctgggccctcattgctgcttatcgtaccccccatcacctgcacatgggacagaccgggctggagggtgaccttggctgtgtacgtcccagcaaaagagctctggcccgcatctcgctgtgccctgaagggggatgaagggcgatgcctcgcccgaggctttgggctgctgcactgcatgctgggactgctcctactctctgtcccacccctcacccagctgtggtccggctttgggagagtggtgaattgcgctgcccgaactcggagcggagcagggtagggaccgtgtacagcttgataacccttaataaaaagggagtttgaccaga

SEQ ID NO: 416575 - DNA, 3950 bp, Homo sapiens
cgcgcgaggttgtccgctgttgggagctgccagcccttggcctggggccgggcgaccctggggcgaggtggactccggtccacggtcgccgcggctgggtgtggggaggcaagccaacccacccgggctatcagctgtaaggctgactcgatccctgcaacatccgcaggaacccctgagcccaggcccagccggccggggctccacgggccctggtccacactgaccctgtgagtggtgacttccctgaggggcagggctctcactagcccagggaatcccaccggggccaggctgggccaagatccacggcccccaggggctgcacggacaggtggtcaaggtggacagggggcggtggtgatggcgcagtttgacactgaataccagcgcctagaggcctcctatagtgattcacccccaggggaggaggacctgttggtgcacgtcgccgaggggagcaagtcaccttggcaccatattgaaaaccttgacctcttcttctctcgagtttataatctgcaccagaagaatggcttcacatgtatgctcatcggggagatctttgagctcatgcagttcctctttgtggttgccttcactaccttcctggtcagctgcgtggactatgacatcctatttgccaacaagatggtgaaccacagtcttcaccctactgaacccgtcaaggtcactctgccagacgcctttttgcctgctcaagtctgtagtgccaggattcaggaaaatggctcccttatcaccatcctggtcattgctggtgtcttctggatccaccggcttatcaagttcatctataacatttgctgctactgggagatccactccttctacctgcacgctctgcgcatccctatgtctgcccttccgtattgcacgtggcaagaagtgcaggcccggatcgtgcagacgcagaaggagcaccagatctgcatccacaaacgtgagctgacagaactggacatctaccaccgcatcctccgtttccagaactacatggtggcactggttaacaaatccctcctgcctctgcgcttccgcctgcctggcctcggggaagctgtcttcttcacccgtggtctcaagtacaactttgagctgatcctcttctggggacctggctctctgtttctcaatgaatggagcctcaaggccgagtacaaacgtggggggcaacggctagagctggcccagcgcctcagcaaccgcatcctgtggattggcatcgctaacttcctgctgtgccccctcatcctcatatggcaaatcctctatgccttcttcagctatgctgaggtgctgaagcgggagccgggggccctgggagcacgctgctggtcactctatggccgctgctacctccgccacttcaacgagctggagcacgagctgcagtcccgcctcaaccgtggctacaagcccgcctccaagtacatgaattgcttcttgtcacctcttttgacactgctggccaagaatggagccttcttcgctggctccatcctggctgtgcttattgccctcaccatttatgacgaagatgtgttggctgtggaacatgtgctgaccaccgtcacactcctgggggtcaccgtgaccgtgtgcaggtcctttatcccggaccagcacatggtgttctgccctgagcagctgctccgcgtgatcctcgctcacatccactacatgcctgaccactggcagggtaatgcccaccgctcgcagacccgggacgagtttgcccagctcttccagtacaaggcagtgttcattttggaagagttgctgagccccattgtcacacccctcatcctcatcttctgcctgcgcccacgggccctggagattatagacttcttccgaaacttcaccgtggaggtcgttggtgtgggagatacctgctcctttgctcagatggatgttcgccagcatggtcatccccagtggctatctgctgggcagacagaggcctcagtgtaccagcaagctgaggatggaaagacagagttgtcactcatgcactttgccatcaccaaccctggctggcagccaccacgtgagagcacagccttcctaggcttcctcaaggagcaggttcagcgggatggagcagctgctagcctcgcccaagggggtctgctccctgaaaatgccctctttacgtctatccagtccttacaatctgagtctgagcccctgagccttatcgcaaatgtggtagctggctcatcctgccggggccctccactgcccagagacctgcagggctccaggcacagggctgaagtcgcctctgccctgcgctccttctccccgctgcaacccgggcaggcgcccacaggccgggctcacagcaccatgacaggctctggggtggatgccaggacagccagctccgggagcagcgtgtgggaaggacagctgcagagcctggtgctgtcagaatatgcatccacagagatgagcctgcatgccctctatatgcaccagctccacaagcagcaggcccaggctgaacctgagcggcatgtatggcaccgccgggagagtgatgagagtggagaaagcgcccctgatgaagggggagagggcgcccgggccccccagtctatccctcgctctgctagctatccctgtgcagcaccccggcctggagctcctgagaccaccgccctgcatgggggcttccagaggcgctacggtggcatcacagatcctggcacagtgcccagggttccctctcatttctctcggctgcctcttggagggtgggcagaagatgggcagtcggcatcaaggcaccctgagcccgtgcccgaagagggctcggaggatgagctaccccctcaggtgcacaaggtatagacaaggctgagcagggttcctgtggcccaggatggaggccaccgctgccctgccatcccgtctgcctgccatgggacggctcctctgagtgttccctggccccacgtgtgtggtgtttgtgtgtctgtgcctggccaagggaggtgccaacactgggcttgccacagccccaggagaggaatttggggcctaggaaccgagggcacacgggactctagcctcatccccaggacccccttggctcagagtgtggtgctagaaactggtccccagcccagccccagtactgccacctttacacctacccctgcaagtccccagagggctgcccacgatagaagctgccaagcagggagaacctgtgccaactgtggagtggggaggttgggcctggaccctcaacccctgcaaccttccctagccccctcaatagatgagcaggtcaggctgtggcccttacctcacccgcagttctcgcccagtgctgcagccggctcacctctctccgcttcttgcacatcactggcctgtgtgtgctgcttgctcctgttctgttcgcttgctcccgttccgttcggcttttgctttgcgttagggtgaagaccctagcgtccagctcccctcaacgctatattttgacactaaaaaagaaggtttctaaattgtaggagcaggatggaaatactttgctgcccttgccatcttttaggatgggcccccaggagactgaggtcttcctgggccctcattgctgcttatcgtaccccccatcacctgcacatgggacagaccgggctggagggtgaccttggctgtgtacgtcccagcaaaagagctctggcccgcatctcgctgtgccctgaagggggatgaagggcgatgcctcgcccgaggctttgggctgctgcactgcatgctgggactgctcctactctctgtcccacccctcacccagctgtggtccggctttgggagagtggtgaattgcgctgcccgaactcggagcggagcagggtagggaccgtgtacagcttgataacccttaataaaaagggagtttgaccaga

SEQ ID NO: 416576 - DNA, 3724 bp, Homo sapiens
tagggtattcgtgctggtgctaagggtattcgtgctggtgcttagggtattcgtgcaaagtgctaagggaattcagtgctggtgctaagggaattcgtgatggagctggtggtcaaggtggacagggggcggtggtgatggcgcagtttgacactgaataccagcgcctagaggcctcctatagtgattcacccccaggggaggaggacctgttggtgcacgtcgccgaggggagcaagtcaccttggcaccatattgaaaaccttgacctcttcttctctcgagtttataatctgcaccagaagaatggcttcacatgtatgctcatcggggagatctttgagctcatgcagttcctctttgtggttgccttcactaccttcctggtcagctgcgtggactatgacatcctatttgccaacaagatggtgaaccacagtcttcaccctactgaacccgtcaaggtcactctgccagacgcctttttgcctgctcaagtctgtagtgccaggattcaggaaaatggctcccttatcaccatcctggtcattgctggtgtcttctggatccaccggcttatcaagttcatctataacatttgctgctactgggagatccactccttctacctgcacgctctgcgcatccctatgtctgcccttccgtattgcacgtggcaagaagtgcaggcccggatcgtgcagacgcagaaggagcaccagatctgcatccacaaacgtgagctgacagaactggacatctaccaccgcatcctccgtttccagaactacatggtggcactggttaacaaatccctcctgcctctgcgcttccgcctgcctggcctcggggaagctgtcttcttcacccgtggtctcaagtacaactttgagctgatcctcttctggggacctggctctctgtttctcaatgaatggagcctcaaggccgagtacaaacgtggggggcaacggctagagctggcccagcgcctcagcaaccgcatcctgtggattggcatcgctaacttcctgctgtgccccctcatcctcatatggcaaatcctctatgccttcttcagctatgctgaggtgctgaagcgggagccgggggccctgggagcacgctgctggtcactctatggccgctgctacctccgccacttcaacgagctggagcacgagctgcagtcccgcctcaaccgtggctacaagcccgcctccaagtacatgaattgcttcttgtcacctcttttgacactgctggccaagaatggagccttcttcgctggctccatcctggctgtgcttattgccctcaccatttatgacgaagatgtgttggctgtggaacatgtgctgaccaccgtcacactcctgggggtcaccgtgaccgtgtgcaggtcctttatcccggaccagcacatggtgttctgccctgagcagctgctccgcgtgatcctcgctcacatccactacatgcctgaccactggcagggtaatgcccaccgctcgcagacccgggacgagtttgcccagctcttccagtacaaggcagtgttcattttggaagagttgctgagccccattgtcacacccctcatcctcatcttctgcctgcgcccacgggccctggagattatagacttcttccgaaacttcaccgtggaggtcgttggtgtgggagatacctgctcctttgctcagatggatgttcgccagcatggtcatccccagtggctatctgctgggcagacagaggcctcagtgtaccagcaagctgaggatggaaagacagagttgtcactcatgcactttgccatcaccaaccctggctggcagccaccacgtgagagcacagccttcctaggcttcctcaaggagcaggttcagcgggatggagcagctgctagcctcgcccaagggggtctgctccctgaaaatgccctctttacgtctatccagtccttacaatctgagtctgagcccctgagccttatcgcaaatgtggtagctggctcatcctgccggggccctccactgcccagagacctgcagggctccaggcacagggctgaagtcgcctctgccctgcgctccttctccccgctgcaacccgggcaggcgcccacaggccgggctcacagcaccatgacaggctctggggtggatgccaggacagccagctccgggagcagcgtgtgggaaggacagctgcagagcctggtgctgtcagaatatgcatccacagagatgagcctgcatgccctctatatgcaccagctccacaagcagcaggcccaggctgaacctgagcggcatgtatggcaccgccgggagagtgatgagagtggagaaagcgcccctgatgaagggggagagggcgcccgggccccccagtctatccctcgctctgctagctatccctgtgcagcaccccggcctggagctcctgagaccaccgccctgcatgggggcttccagaggcgctacggtggcatcacagatcctggcacagtgcccagggttccctctcatttctctcggctgcctcttggagggtgggcagaagatgggcagtcggcatcaaggcaccctgagcccgtgcccgaagagggctcggaggatgagctaccccctcaggtgcacaaggtatagacaaggctgagcagggttcctgtggcccaggatggaggccaccgctgccctgccatcccgtctgcctgccatgggacggctcctctgagtgttccctggccccacgtgtgtggtgtttgtgtgtctgtgcctggccaagggaggtgccaacactgggcttgccacagccccaggagaggaatttggggcctaggaaccgagggcacacgggactctagcctcatccccaggacccccttggctcagagtgtggtgctagaaactggtccccagcccagccccagtactgccacctttacacctacccctgcaagtccccagagggctgcccacgatagaagctgccaagcagggagaacctgtgccaactgtggagtggggaggttgggcctggaccctcaacccctgcaaccttccctagccccctcaatagatgagcaggtcaggctgtggcccttacctcacccgcagttctcgcccagtgctgcagccggctcacctctctccgcttcttgcacatcactggcctgtgtgtgctgcttgctcctgttctgttcgcttgctcccgttccgttcggcttttgctttgcgttagggtgaagaccctagcgtccagctcccctcaacgctatattttgacactaaaaaagaaggtttctaaattgtaggagcaggatggaaatactttgctgcccttgccatcttttaggatgggcccccaggagactgaggtcttcctgggccctcattgctgcttatcgtaccccccatcacctgcacatgggacagaccgggctggagggtgaccttggctgtgtacgtcccagcaaaagagctctggcccgcatctcgctgtgccctgaagggggatgaagggcgatgcctcgcccgaggctttgggctgctgcactgcatgctgggactgctcctactctctgtcccacccctcacccagctgtggtccggctttgggagagtggtgaattgcgctgcccgaactcggagcggagcagggtagggaccgtgtacagcttgataacccttaataaaaagggagtttgaccaga

SEQ ID NO: 416577 - DNA, 2356 bp, Homo sapiens
ggattacggctattcgttcgaccacgcctcgcaggtcctttatcccggaccagcacatggtgttctgccctgagcagctgctccgcgtgatcctcgctcacatccactacatgcctgaccactggcagggtaatgcccaccgctcgcagacccgggacgagtttgcccagctcttccagtacaaggcagtgttcattttggaagagttgctgagccccattgtcacacccctcatcctcatcttctgcctgcgcccacgggccctggagattatagacttcttccgaaacttcaccgtggaggtcgttggtgtgggagatacctgctcctttgctcagatggatgttcgccagcatggtcatccccagtggctatctgctgggcagacagaggcctcagtgtaccagcaagctgaggatggaaagacagagttgtcactcatgcactttgccatcaccaaccctggctggcagccaccacgtgagagcacagccttcctaggcttcctcaaggagcaggttcagcgggatggagcagctgctagcctcgcccaagggggtctgctccctgaaaatgccctctttacgtctatccagtccttacaatctgagtctgagcccctgagccttatcgcaaatgtggtagctggctcatcctgccggggccctccactgcccagagacctgcagggctccaggcacagggctgaagtcgcctctgccctgcgctccttctccccgctgcaacccgggcaggcgcccacaggccgggctcacagcaccatgacaggctctggggtggatgccaggacagccagctccgggagcagcgtgtgggaaggacagctgcagagcctggtgctgtcagaatatgcatccacagagatgagcctgcatgccctctatatgcaccagctccacaagcagcaggcccaggctgaacctgagcggcatgtatggcaccgccgggagagtgatgagagtggagaaagcgcccctgatgaagggggagagggcgcccgggccccccagtctatccctcgctctgctagctatccctgtgcagcaccccggcctggagctcctgagaccaccgccctgcatgggggcttccagaggcgctacggtggcatcacagatcctggcacagtgcccagggttccctctcatttctctcggctgcctcttggagggtgggcagaagatgggcagtcggcatcaaggcaccctgagcccgtgcccgaagagggctcggaggatgagctaccccctcaggtgcacaaggtatagacaaggctgagcagggttcctgtggcccaggatggaggccaccgctgccctgccatcccgtctgcctgccatgggacggctcctctgagtgttccctggccccacgtgtgtggtgtttgtgtgtctgtgcctggccaagggaggtgccaacactgggcttgccacagccccaggagaggaatttggggcctaggaaccgagggcacacgggactctagcctcatccccaggacccccttggctcagagtgtggtgctagaaactggtccccagcccagccccagtactgccacctttacacctacccctgcaagtccccagagggctgcccacgatagaagctgccaagcagggagaacctgtgccaactgtggagtggggaggttgggcctggaccctcaacccctgcaaccttccctagccccctcaatagatgagcaggtcaggctgtggcccttacctcacccgcagttctcgcccagtgctgcagccggctcacctctctccgcttcttgcacatcactggcctgtgtgtgctgcttgctcctgttctgttcgcttgctcccgttccgttcggcttttgctttgcgttagggtgaagaccctagcgtccagctcccctcaacgctatattttgacactaaaaaagaaggtttctaaattgtaggagcaggatggaaatactttgctgcccttgccatcttttaggatgggcccccaggagactgaggtcttcctgggccctcattgctgcttatcgtaccccccatcacctgcacatgggacagaccgggctggagggtgaccttggctgtgtacgtcccagcaaaagagctctggcccgcatctcgctgtgccctgaagggggatgaagggcgatgcctcgcccgaggctttgggctgctgcactgcatgctgggactgctcctactctctgtcccacccctcacccagctgtggtccggctttgggagagtggtgaattgcgctgcccgaactcggagcggagcagggtagggaccgtgtacagcttgataacccttaataaaaagggagtttgaccaga

SEQ ID NO: 416578 - DNA, 2327 bp, Homo sapiens
cctagtcaggcgggtggtaatcggacgatggtgttctgccctgagcagctgctccgcgtgatcctcgctcacatccactacatgcctgaccactggcagggtaatgcccaccgctcgcagacccgggacgagtttgcccagctcttccagtacaaggcagtgttcattttggaagagttgctgagccccattgtcacacccctcatcctcatcttctgcctgcgcccacgggccctggagattatagacttcttccgaaacttcaccgtggaggtcgttggtgtgggagatacctgctcctttgctcagatggatgttcgccagcatggtcatccccagtggctatctgctgggcagacagaggcctcagtgtaccagcaagctgaggatggaaagacagagttgtcactcatgcactttgccatcaccaaccctggctggcagccaccacgtgagagcacagccttcctaggcttcctcaaggagcaggttcagcgggatggagcagctgctagcctcgcccaagggggtctgctccctgaaaatgccctctttacgtctatccagtccttacaatctgagtctgagcccctgagccttatcgcaaatgtggtagctggctcatcctgccggggccctccactgcccagagacctgcagggctccaggcacagggctgaagtcgcctctgccctgcgctccttctccccgctgcaacccgggcaggcgcccacaggccgggctcacagcaccatgacaggctctggggtggatgccaggacagccagctccgggagcagcgtgtgggaaggacagctgcagagcctggtgctgtcagaatatgcatccacagagatgagcctgcatgccctctatatgcaccagctccacaagcagcaggcccaggctgaacctgagcggcatgtatggcaccgccgggagagtgatgagagtggagaaagcgcccctgatgaagggggagagggcgcccgggccccccagtctatccctcgctctgctagctatccctgtgcagcaccccggcctggagctcctgagaccaccgccctgcatgggggcttccagaggcgctacggtggcatcacagatcctggcacagtgcccagggttccctctcatttctctcggctgcctcttggagggtgggcagaagatgggcagtcggcatcaaggcaccctgagcccgtgcccgaagagggctcggaggatgagctaccccctcaggtgcacaaggtatagacaaggctgagcagggttcctgtggcccaggatggaggccaccgctgccctgccatcccgtctgcctgccatgggacggctcctctgagtgttccctggccccacgtgtgtggtgtttgtgtgtctgtgcctggccaagggaggtgccaacactgggcttgccacagccccaggagaggaatttggggcctaggaaccgagggcacacgggactctagcctcatccccaggacccccttggctcagagtgtggtgctagaaactggtccccagcccagccccagtactgccacctttacacctacccctgcaagtccccagagggctgcccacgatagaagctgccaagcagggagaacctgtgccaactgtggagtggggaggttgggcctggaccctcaacccctgcaaccttccctagccccctcaatagatgagcaggtcaggctgtggcccttacctcacccgcagttctcgcccagtgctgcagccggctcacctctctccgcttcttgcacatcactggcctgtgtgtgctgcttgctcctgttctgttcgcttgctcccgttccgttcggcttttgctttgcgttagggtgaagaccctagcgtccagctcccctcaacgctatattttgacactaaaaaagaaggtttctaaattgtaggagcaggatggaaatactttgctgcccttgccatcttttaggatgggcccccaggagactgaggtcttcctgggccctcattgctgcttatcgtaccccccatcacctgcacatgggacagaccgggctggagggtgaccttggctgtgtacgtcccagcaaaagagctctggcccgcatctcgctgtgccctgaagggggatgaagggcgatgcctcgcccgaggctttgggctgctgcactgcatgctgggactgctcctactctctgtcccacccctcacccagctgtggtccggctttgggagagtggtgaattgcgctgcccgaactcggagcggagcagggtagggaccgtgtacagcttgataacccttaataaaaagggagtttgaccaga

SEQ ID NO: 416579 - DNA, 3830 bp, Homo sapiens
agcgggcggacacccggcctagcgccgcgggtcgcgccgagccgagccgagccgagcggagccggcggagcctctggaatcacccgggtcgctgttcctgagcagctgcagagcatcgagggctggagaggagcacatactgtccatggagctggtggtcaaggtggacagggggcggtggtgatggcgcagtttgacactgaataccagcgcctagaggcctcctatagtgattcacccccaggggaggaggacctgttggtgcacgtcgccgaggggagcaagtcaccttggcaccatattgaaaaccttgacctcttcttctctcgagtttataatctgcaccagaagaatggcttcacatgtatgctcatcggggagatctttgagctcatgcagttcctctttgtggttgccttcactaccttcctggtcagctgcgtggactatgacatcctatttgccaacaagatggtgaaccacagtcttcaccctactgaacccgtcaaggtcactctgccagacgcctttttgcctgctcaagtctgtagtgccaggattcaggaaaatggctcccttatcaccatcctggtcattgctggtgtcttctggatccaccggcttatcaagttcatctataacatttgctgctactgggagatccactccttctacctgcacgctctgcgcatccctatgtctgcccttccgtattgcacgtggcaagaagtgcaggcccggatcgtgcagacgcagaaggagcaccagatctgcatccacaaacgtgagctgacagaactggacatctaccaccgcatcctccgtttccagaactacatggtggcactggttaacaaatccctcctgcctctgcgcttccgcctgcctggcctcggggaagctgtcttcttcacccgtggtctcaagtacaactttgagctgatcctcttctggggacctggctctctgtttctcaatgaatggagcctcaaggccgagtacaaacgtggggggcaacggctagagctggcccagcgcctcagcaaccgcatcctgtggattggcatcgctaacttcctgctgtgccccctcatcctcatatggcaaatcctctatgccttcttcagctatgctgaggtgctgaagcgggagccgggggccctgggagcacgctgctggtcactctatggccgctgctacctccgccacttcaacgagctggagcacgagctgcagtcccgcctcaaccgtggctacaagcccgcctccaagtacatgaattgcttcttgtcacctcttttgacactgctggccaagaatggagccttcttcgctggctccatcctggctgtgcttattgccctcaccatttatgacgaagatgtgttggctgtggaacatgtgctgaccaccgtcacactcctgggggtcaccgtgaccgtgtgcaggtcctttatcccggaccagcacatggtgttctgccctgagcagctgctccgcgtgatcctcgctcacatccactacatgcctgaccactggcagggtaatgcccaccgctcgcagacccgggacgagtttgcccagctcttccagtacaaggcagtgttcattttggaagagttgctgagccccattgtcacacccctcatcctcatcttctgcctgcgcccacgggccctggagattatagacttcttccgaaacttcaccgtggaggtcgttggtgtgggagatacctgctcctttgctcagatggatgttcgccagcatggtcatccccagtggctatctgctgggcagacagaggcctcagtgtaccagcaagctgaggatggaaagacagagttgtcactcatgcactttgccatcaccaaccctggctggcagccaccacgtgagagcacagccttcctaggcttcctcaaggagcaggttcagcgggatggagcagctgctagcctcgcccaagggggtctgctccctgaaaatgccctctttacgtctatccagtccttacaatctgagtctgagcccctgagccttatcgcaaatgtggtagctggctcatcctgccggggccctccactgcccagagacctgcagggctccaggcacagggctgaagtcgcctctgccctgcgctccttctccccgctgcaacccgggcaggcgcccacaggccgggctcacagcaccatgacaggctctggggtggatgccaggacagccagctccgggagcagcgtgtgggaaggacagctgcagagcctggtgctgtcagaatatgcatccacagagatgagcctgcatgccctctatatgcaccagctccacaagcagcaggcccaggctgaacctgagcggcatgtatggcaccgccgggagagtgatgagagtggagaaagcgcccctgatgaagggggagagggcgcccgggccccccagtctatccctcgctctgctagctatccctgtgcagcaccccggcctggagctcctgagaccaccgccctgcatgggggcttccagaggcgctacggtggcatcacagatcctggcacagtgcccagggttccctctcatttctctcggctgcctcttggagggtgggcagaagatgggcagtcggcatcaaggcaccctgagcccgtgcccgaagagggctcggaggatgagctaccccctcaggtgcacaaggtatagacaaggctgagcagggttcctgtggcccaggatggaggccaccgctgccctgccatcccgtctgcctgccatgggacggctcctctgagtgttccctggccccacgtgtgtggtgtttgtgtgtctgtgcctggccaagggaggtgccaacactgggcttgccacagccccaggagaggaatttggggcctaggaaccgagggcacacgggactctagcctcatccccaggacccccttggctcagagtgtggtgctagaaactggtccccagcccagccccagtactgccacctttacacctacccctgcaagtccccagagggctgcccacgatagaagctgccaagcagggagaacctgtgccaactgtggagtggggaggttgggcctggaccctcaacccctgcaaccttccctagccccctcaatagatgagcaggtcaggctgtggcccttacctcacccgcagttctcgcccagtgctgcagccggctcacctctctccgcttcttgcacatcactggcctgtgtgtgctgcttgctcctgttctgttcgcttgctcccgttccgttcggcttttgctttgcgttagggtgaagaccctagcgtccagctcccctcaacgctatattttgacactaaaaaagaaggtttctaaattgtaggagcaggatggaaatactttgctgcccttgccatcttttaggatgggcccccaggagactgaggtcttcctgggccctcattgctgcttatcgtaccccccatcacctgcacatgggacagaccgggctggagggtgaccttggctgtgtacgtcccagcaaaagagctctggcccgcatctcgctgtgccctgaagggggatgaagggcgatgcctcgcccgaggctttgggctgctgcactgcatgctgggactgctcctactctctgtcccacccctcacccagctgtggtccggctttgggagagtggtgaattgcgctgcccgaactcggagcggagcagggtagggaccgtgtacagcttgataacccttaataaaaagggagtttgaccagaaaaaaacacccgccccccaccacgccccccccacatacacacacaccaaccacaaccagc

SEQ ID NO: 416580 - DNA, 3555 bp, Homo sapiens
agcgggcggacacccggcctagcgccgcgggtcgcgccgagccgagccgagccgagcggagccggcggagcctctggaatcacccgggtcgctgttcctgagcagctgcagagcatcgagggctggagaggagcacatactgtccatggagctggtggtcaaggtggacagggggcggtggtgatggcgcagtttgacactgaataccagcgcctagaggcctcctatagtgattcacccccaggggaggaggacctgttggtgcacgtcgccgaggggagcaagtcaccttggcaccatattgaaaaccttgacctcttcttctctcgagtttataatctgcaccagaagaatggcttcacatgtatgctcatcggggagatctttgagctcatgcagttcctctttgtggttgccttcactaccttcctggtcagctgcgtggactatgacatcctatttgccaacaagatggtgaaccacagtcttcaccctactgaacccgtcaaggtcactctgccagacgcctttttgcctgctcaagtctgtagtgccaggattcaggaaaatggctcccttatcaccatcctggtcattgctggtgtcttctggatccaccggcttatcaagttcatctataacatttgctgctactgggagatccactccttctacctgcacgctctgcgcatccctatgtctgcccttccgtattgcacgtggcaagaagtgcaggcccggatcgtgcagacgcagaaggagcaccagatctgcatccacaaacgtgagctgacagaactggacatctaccaccgcatcctccgtttccagaactacatggtggcactggttaacaaatccctcctgcctctgcgcttccgcctgcctggcctcggggaagctgtcttcttcacccgtggtctcaagtacaactttgagctgatcctcttctggggacctggctctctgtttctcaatgaatggagcctcaaggccgagtacaaacgtggggggcaacggctagagctggcccagcgcctcagcaaccgcatcctgtggattggcatcgctaacttcctgctgtgccccctcatcctcatatggcaaatcctctatgccttcttcagctatgctgaggtgctgaagcgggagccgggggccctgggagcacgctgctggtcactctatggccgctgctacctccgccacttcaacgagctggagcacgagctgcagtcccgcctcaaccgtggctacaagcccgcctccaagtacatgaattgcttcttgtcacctcttttgacactgctggccaagaatggagccttcttcgctggctccatcctggctgtgcttattgccctcaccatttatgacgaagatgtgttggctgtggaacatgtgctgaccaccgtcacactcctgggggtcaccgtgaccgtgtgcaggtcctttatcccggaccagcacatggtgttctgccctgagcagctgctccgcgtgatcctcgctcacatccactacatgcctgaccactggcagggtaatgcccaccgctcgcagacccgggacgagtttgcccagctcttccagtacaaggcagtgttcattttggaagagttgctgagccccattgtcacacccctcatcctcatcttctgcctgcgcccacgggccctggagattatagacttcttccgaaacttcaccgtggaggtcgttggtgtgggagatacctgctcctttgctcagatggatgttcgccagcatggtcatccccagtggctatctgctgggcagacagaggcctcagtgtaccagcaagctgaggatggaaagacagagttgtcactcatgcactttgccatcaccaaccctggctggcagccaccacgtgagagcacagccttcctaggcttcctcaaggagcaggttcagcgggatggagcagctgctagcctcgcccaagggggtctgctccctgaaaatgtctggggtggatgccaggacagccagctccgggagcagcgtgtgggaaggacagctgcagagcctggtgctgtcagaatatgcatccacagagatgagcctgcatgccctctatatgcaccagctccacaagcagcaggcccaggctgaacctgagcggcatgtatggcaccgccgggagagtgatgagagtggagaaagcgcccctgatgaagggggagagggcgcccgggccccccagtctatccctcgctctgctagctatccctgtgcagcaccccggcctggagctcctgagaccaccgccctgcatgggggcttccagaggcgctacggtggcatcacagatcctggcacagtgcccagggttccctctcatttctctcggctgcctcttggagggtgggcagaagatgggcagtcggcatcaaggcaccctgagcccgtgcccgaagagggctcggaggatgagctaccccctcaggtgcacaaggtatagacaaggctgagcagggttcctgtggcccaggatggaggccaccgctgccctgccatcccgtctgcctgccatgggacggctcctctgagtgttccctggccccacgtgtgtggtgtttgtgtgtctgtgcctggccaagggaggtgccaacactgggcttgccacagccccaggagaggaatttggggcctaggaaccgagggcacacgggactctagcctcatccccaggacccccttggctcagagtgtggtgctagaaactggtccccagcccagccccagtactgccacctttacacctacccctgcaagtccccagagggctgcccacgatagaagctgccaagcagggagaacctgtgccaactgtggagtggggaggttgggcctggaccctcaacccctgcaaccttccctagccccctcaatagatgagcaggtcaggctgtggcccttacctcacccgcagttctcgcccagtgctgcagccggctcacctctctccgcttcttgcacatcactggcctgtgtgtgctgcttgctcctgttctgttcgcttgctcccgttccgttcggcttttgctttgcgttagggtgaagaccctagcgtccagctcccctcaacgctatattttgacactaaaaaagaaggtttctaaattgtaggagcaggatggaaatactttgctgcccttgccatcttttaggatgggcccccaggagactgaggtcttcctgggccctcattgctgcttatcgtaccccccatcacctgcacatgggacagaccgggctggagggtgaccttggctgtgtacgtcccagcaaaagagctctggcccgcatctcgctgtgccctgaagggggatgaagggcgatgcctcgcccgaggctttgggctgctgcactgcatgctgggactgctcctactctctgtcccacccctcacccagctgtggtccggctttgggagagtggtgaattgcgctgcccgaactcggagcggagcagggtagggaccgtgtacagcttgataacccttaataaaaagggagtttgaccaga

SEQ ID NO: 416581 - DNA, 1641 bp, Homo sapiens
ggagggcacggcagccctcagcagcttgtgtgggtctcagagaagttcacagctgctgtctgtctctgttgggagagacagggtggatgccaggacagccagctccgggagcagcgtgtgggaaggacagctgcagagcctggtgctgtcagaatatgcatccacagagatgagcctgcatgccctctatatgcaccagctccacaagcagcaggcccaggctgaacctgagcggcatgtatggcaccgccgggagagtgatgagagtggagaaagcgcccctgatgaagggggagagggcgcccgggccccccagtctatccctcgctctgctagctatccctgtgcagcaccccggcctggagctcctgagaccaccgccctgcatgggggcttccagaggcgctacggtggcatcacagatcctggcacagtgcccagggttccctctcatttctctcggctgcctcttggagggtgggcagaagatgggcagtcggcatcaaggcaccctgagcccgtgcccgaagagggctcggaggatgagctaccccctcaggtgcacaaggtatagacaaggctgagcagggttcctgtggcccaggatggaggccaccgctgccctgccatcccgtctgcctgccatgggacggctcctctgagtgttccctggccccacgtgtgtggtgtttgtgtgtctgtgcctggccaagggaggtgccaacactgggcttgccacagccccaggagaggaatttggggcctaggaaccgagggcacacgggactctagcctcatccccaggacccccttggctcagagtgtggtgctagaaactggtccccagcccagccccagtactgccacctttacacctacccctgcaagtccccagagggctgcccacgatagaagctgccaagcagggagaacctgtgccaactgtggagtggggaggttgggcctggaccctcaacccctgcaaccttccctagccccctcaatagatgagcaggtcaggctgtggcccttacctcacccgcagttctcgcccagtgctgcagccggctcacctctctccgcttcttgcacatcactggcctgtgtgtgctgcttgctcctgttctgttcgcttgctcccgttccgttcggcttttgctttgcgttagggtgaagaccctagcgtccagctcccctcaacgctatattttgacactaaaaaagaaggtttctaaattgtaggagcaggatggaaatactttgctgcccttgccatcttttaggatgggcccccaggagactgaggtcttcctgggccctcattgctgcttatcgtaccccccatcacctgcacatgggacagaccgggctggagggtgaccttggctgtgtacgtcccagcaaaagagctctggcccgcatctcgctgtgccctgaagggggatgaagggcgatgcctcgcccgaggctttgggctgctgcactgcatgctgggactgctcctactctctgtcccacccctcacccagctgtggtccggctttgggagagtggtgaattgcgctgcccgaactcggagcggagcagggtagggaccgtgtacagcttgataacccttaataaaaagggagtttgaccaga

SEQ ID NO: 416582 - DNA, 1951 bp, Homo sapiens
tgcagctgccgtttccctgagactttctctgatcactctcagtaaaaggctcccttgcccaccctcctgaatcttcctgtcttagttttctccatagcatttagcaccatgtgacatatcatgttttttccttatttatttgcttattccatatctcctctaccagtatataagcctcacaagggctggcatttctgtctgttttgttcactgctatctccccacacctaaaagagtgcctggcacttagaccgtcagtcagtttgttcctgaatcaaatgaataggtaaaatgagggccattacaacacaggcttcttccggggatctgctgtgaatgtaacctgtaaagatcagaggtatattacacactattaacataataggtgctctgaggcaaggattctcagggaaggggtaaagcgggaactgactgataccaggttggagggcagctgtttcagatggacatccgtctgtcccccactaacgagccccccatttctccagctccacaagcagcaggcccaggctgaacctgagcggcatgtatggcaccgccgggagagtgatgagagtggagaaagcgcccctgatgaagggggagagggcgcccgggccccccagtctatccctcgctctgctagctatccctgtgcagcaccccggcctggagctcctgagaccaccgccctgcatgggggcttccagaggcgctacggtggcatcacagatcctggcacagtgcccagggttccctctcatttctctcggctgcctcttggagggtgggcagaagatgggcagtcggcatcaaggcaccctgagcccgtgcccgaagagggctcggaggatgagctaccccctcaggtgcacaaggtatagacaaggctgagcagggttcctgtggcccaggatggaggccaccgctgccctgccatcccgtctgcctgccatgggacggctcctctgagtgttccctggccccacgtgtgtggtgtttgtgtgtctgtgcctggccaagggaggtgccaacactgggcttgccacagccccaggagaggaatttggggcctaggaaccgagggcacacgggactctagcctcatccccaggacccccttggctcagagtgtggtgctagaaactggtccccagcccagccccagtactgccacctttacacctacccctgcaagtccccagagggctgcccacgatagaagctgccaagcagggagaacctgtgccaactgtggagtggggaggttgggcctggaccctcaacccctgcaaccttccctagccccctcaatagatgagcaggtcaggctgtggcccttacctcacccgcagttctcgcccagtgctgcagccggctcacctctctccgcttcttgcacatcactggcctgtgtgtgctgcttgctcctgttctgttcgcttgctcccgttccgttcggcttttgctttgcgttagggtgaagaccctagcgtccagctcccctcaacgctatattttgacactaaaaaagaaggtttctaaattgtaggagcaggatggaaatactttgctgcccttgccatcttttaggatgggcccccaggagactgaggtcttcctgggccctcattgctgcttatcgtaccccccatcacctgcacatgggacagaccgggctggagggtgaccttggctgtgtacgtcccagcaaaagagctctggcccgcatctcgctgtgccctgaagggggatgaagggcgatgcctcgcccgaggctttgggctgctgcactgcatgctgggactgctcctactctctgtcccacccctcacccagctgtggtccggctttgggagagtggtgaattgcgctgcccgaactcggagcggagcagggtagggaccgtgtacagcttgataacccttaataaaaagggagtttgaccaga

SEQ ID NO: 416583 - DNA, 3255 bp, Homo sapiens
  misc_feature (3253)..(3253): n is a, c, g, or t
agcgggcggacacccggcctagcgccgcgggtcgcgccgagccgagccgagccgagcggagccggcggagcctctggaatcacccgggtcgctgttcctgagcagctgcagagcatcgagggctggagaggagcacatactgtccatggagctggtggtcaaggtggacagggggcggtggtgatggcgcagtttgacactgaataccagcgcctagaggcctcctatagtgattcacccccaggggaggaggacctgttggtgcacgtcgccgaggggagcaagtcaccttggcaccatattgaaaaccttgacctcttcttctctcgagtttataatctgcaccagaagaatggcttcacatgtatgctcatcggggagatctttgagctcatgcagttcctctttgtggttgccttcactaccttcctggtcagctgcgtggactatgacatcctatttgccaacaagatggtgaaccacagtcttcaccctactgaacccgtcaaggtcactctgccagacgcctttttgcctgctcaagtctgtagtgccaggattcaggaaaatggctcccttatcaccatcctggtcattgctggtgtcttctggatccaccggcttatcaagttcatctataacatttgctgctactgggagatccactccttctacctgcacgctctgcgcatccctatgtctgcccttccgtattgcacgtggcaagaagtgcaggcccggatcgtgcagacgcagaaggagcaccagatctgcatccacaaacgtgagctgacagaactggacatctaccaccgcatcctccgtttccagaactacatggtggcactggttaacaaatccctcctgcctctgcgcttccgcctgcctggcctcggggaagctgtcttcttcacccgtggtctcaagtacaactttgagctgatcctcttctggggacctggctctctgtttctcaatgaatggagcctcaaggccgagtacaaacgtggggggcaacggctagagctggcccagcgcctcagcaaccgcatcctgtggattggcatcgctaacttcctgctgtgccccctcatcctcatatggcaaatcctctatgccttcttcagctatgctgaggtgctgaagcgggagccgggggccctgggagcacgctgctggtcactctatggccgctgctacctccgccacttcaacgagctggagcacgagctgcagtcccgcctcaaccgtggctacaagcccgcctccaagtacatgaattgcttcttgtcacctcttttgacactgctggccaagaatggagccttcttcgctggctccatcctggctgtgcttattgccctcaccatttatgacgaagatgtgttggctgtggaacatgtgctgaccaccgtcacactcctgggggtcaccgtgaccgtgtgcaggtcctttatcccggaccagcacatggtgttctgccctgagcagctgctccgcgtgatcctcgctcacatccactacatgcctgaccactggcagggtaatgcccaccgctcgcagacccgggacgagtttgcccagctcttccagtacaaggcagtgttcattttggaagagttgctgagccccattgtcacacccctcatcctcatcttctgcctgcgcccacgggccctggagattatagacttcttccgaaacttcaccgtggaggtcgttggtgtgggagatacctgctcctttgctcagatggatgttcgccagcatggtcatccccagtggctatctgctgggcagacagaggcctcagtgtaccagcaagctgaggatggaaagacagagttgtcactcatgcactttgccatcaccaaccctggctggcagccaccacgtgagagcacagccttcctaggcttcctcaaggagcaggttcagcgggatggagcagctgctagcctcgcccaagggggtctgctccctgaaaatgccctctttacgtctatccagtccttacaatctgagtctgagcccctgagccttatcgcaaatgtggtagctggctcatcctgccggggccctccactgcccagagacctgcagggctccaggcacagggctgaagtcgcctctgccctgcgctccttctccccgctgcaacccgggcaggcgcccacaggccgggctcacagcaccatgacaggctctggggtggatgccaggacagccagctccgggagcagcgtgtgggaaggacagctgcagagcctggtgctgtcagaatatgcatccacagagatgagcctgcatgccctctatatgcaccagctccacaagcagcaggcccaggctgaacctgagcggcatgtatggcaccgccgggagagtgatgagagtggagaaagcgcccctgatgaagggggagagggcgcccgggccccccagtctatccctcgctctgctagctatccctgtgcagcaccccggcctggagctcctgagaccaccgccctgcatgggggcttccagaggcgctacggtggcatcacagatcctggcacagtgcccagggttccctctcatttctctcggctgcctcttggagggtgggcagaagatgggcagtcggcatcaaggcaccctgagcccgtgcccgaagagggctcggaggatgagctaccccctcaggtgcacaaggtatagacaaggctgagcagggttcctgtggcccaggatggaggccaccgctgccctgccatcccgtctgcctgccatgggacggctcctctgagtgttccctggccccacgtgtgtggtgtttgtgtgtctgtgcctggccaagggaggtgccaacactgggcttgccacagccccaggagaggaatttggggcctaggaaccgagggcacacgggactctagcctcatccccaggacccccttggctcagagtgtggtgctagaaactggtccccagcccagccccagtactgccacctttacacctacccctgcaagtccccagagggctgcccacgatagaagctgccaagcagggagaacctgtgccaactgtggagtggggaggttgggcctggaccctcaacccctgcaaccttccctagccccctcaatagatgagcaggtcaggctgtggcccttacctcacccgcagttctcgcccagtgctgcagccggctcacctctctccgcttcttgcacatcaccactcacccacacagcaccatgcaccnca

SEQ ID NO: 416584 - DNA, 1166 bp, Homo sapiens
ttaagatccagtgtccatggaaacattcccacatgccgtgactctggactatatcagtttttggaaagcagggttcctctgcctgctaacaaggtatagacaaggctgagcagggttcctgtggcccaggatggaggccaccgctgccctgccatcccgtctgcctgccatgggacggctcctctgagtgttccctggccccacgtgtgtggtgtttgtgtgtctgtgcctggccaagggaggtgccaacactgggcttgccacagccccaggagaggaatttggggcctaggaaccgagggcacacgggactctagcctcatccccaggacccccttggctcagagtgtggtgctagaaactggtccccagcccagccccagtactgccacctttacacctacccctgcaagtccccagagggctgcccacgatagaagctgccaagcagggagaacctgtgccaactgtggagtggggaggttgggcctggaccctcaacccctgcaaccttccctagccccctcaatagatgagcaggtcaggctgtggcccttacctcacccgcagttctcgcccagtgctgcagccggctcacctctctccgcttcttgcacatcactggcctgtgtgtgctgcttgctcctgttctgttcgcttgctcccgttccgttcggcttttgctttgcgttagggtgaagaccctagcgtccagctcccctcaacgctatattttgacactaaaaaagaaggtttctaaattgtaggagcaggatggaaatactttgctgcccttgccatcttttaggatgggcccccaggagactgaggtcttcctgggccctcattgctgcttatcgtaccccccatcacctgcacatgggacagaccgggctggagggtgaccttggctgtgtacgtcccagcaaaagagctctggcccgcatctcgctgtgccctgaagggggatgaagggcgatgcctcgcccgaggctttgggctgctgcactgcatgctgggactgctcctactctctgtcccacccctcacccagctgtggtccggctttgggagagtggtgaattgcgctgcccgaactcggagcggagcagggtagggaccgtgtacagcttgataacccttaataaaaagggagtttgaccaga

SEQ ID NO: 416585 - DNA, 2940 bp, Homo sapiens
agcgggcggacacccggcctagcgccgcgggtcgcgccgagccgagccgagccgagcggagccggcggagcctctggaatcacccgggtcgctgttcctgagcagctgcagagcatcgagggctggagaggagcacatactgtccatggagctggtggtcaaggtggacagggggcggtggtgatggcgcagtttgacactgaataccagcgcctagaggcctcctatagtgattcacccccaggggaggaggacctgttggtgcacgtcgccgaggggagcaagtcaccttggcaccatattgaaaaccttgacctcttcttctctcgagtttataatctgcaccagaagaatggcttcacatgtatgctcatcggggagatctttgagctcatgcagttcctctttgtggttgccttcactaccttcctggtcagctgcgtggactatgacatcctatttgccaacaagatggtgaaccacagtcttcaccctactgaacccgtcaaggtcactctgccagacgcctttttgcctgctcaagtctgtagtgccaggattcaggaaaatggctcccttatcaccatcctggtcattgctggtgtcttctggatccaccggcttatcaagttcatctataacatttgctgctactgggagatccactccttctacctgcacgctctgcgcatccctatgtctgcccttccgtattgcacgtggcaagaagtgcaggcccggatcgtgcagacgcagaaggagcaccagatctgcatccacaaacgtgagctgacagaactggacatctaccaccgcatcctccgtttccagaactacatggtggcactggttaacaaatccctcctgcctctgcgcttccgcctgcctggcctcggggaagctgtcttcttcacccgtggtctcaagtacaactttgagctgatcctcttctggggacctggctctctgtttctcaatgaatggagcctcaaggccgagtacaaacgtggggggcaacggctagagctggcccagcgcctcagcaaccgcatcctgtggattggcatcgctaacttcctgctgtgccccctcatcctcatatggcaaatcctctatgccttcttcagctatgctgaggtgctgaagcgggagccgggggccctgggagcacgctgctggtcactctatggccgctgctacctccgccacttcaacgagctggagcacgagctgcagtcccgcctcaaccgtggctacaagcccgcctccaagtacatgaattgcttcttgtcacctcttttgacactgctggccaagaatggagccttcttcgctggctccatcctggctgtgcttattgccctcaccatttatgacgaagatgtgttggctgtggaacatgtgctgaccaccgtcacactcctgggggtcaccgtgaccgtgtgcaggtcctttatcccggaccagcacatggtgttctgccctgagcagctgctccgcgtgatcctcgctcacatccactacatgcctgaccactggcagggtaatgcccaccgctcgcagacccgggacgagtttgcccagctcttccagtacaaggcagtgttcattttggaagagttgctgagccccattgtcacacccctcatcctcatcttctgcctgcgcccacgggccctggagattatagacttcttccgaaacttcaccgtggaggtcgttggtgtgggagatacctgctcctttgctcagatggatgttcgccagcatggtcatccccagtggctatctgctgggcagacagaggcctcagtgtaccagcaagctgaggatggaaagacagagttgtcactcatgcactttgccatcaccaaccctggctggcagccaccacgtgagagcacagccttcctaggcttcctcaaggagcaggttcagcgggatggagcagctgctagcctcgcccaagggggtctgctccctgaaaatgccctctttacgtctatccagtccttacaatctgagtctgagcccctgagccttatcgcaaatgtggtagctggctcatcctgccggggccctccactgcccagagacctgcagggctccaggcacagggctgaagtcgcctctgccctgcgctccttctccccgctgcaacccgggcaggcgcccacaggccgggctcacagcaccatgacaggctctggggtggatgccaggacagccagctccgggagcagcgtgtgggaaggacagctgcagagcctggtgctgtcagaatatgcatccacagagatgagcctgcatgccctctatatgcaccagctccacaagcagcaggcccaggctgaacctgagcggcatgtatggcaccgccgggagagtgatgagagtggagaaagcgcccctgatgaagggggagagggcgcccgggccccccagtctatccctcgctctgctagctatccctgtgcagcaccccggcctggagctcctgagaccaccgccctgcatgggggcttccagaggcgctacggtggcatcacagatcctggcacagtgcccagggttccctctcatttctctcggctgcctcttggagggtgggcagaagatgggcagtcggcatcaaggcaccctgagcccgtgcccgaagagggctcggaggatgagctaccccctcaggtgcacaaggtatagacaaggctgagcagggttcctgtggcccaggatggaggccaccgctgccctgccatcccgtctgcctgccatgggacggctcctctgagtgttccctggccccacgtgtgtggtgtttgtgtgtctataccttgtgcacctgagggggtagctcatcctccgagccctcttcgggcacgggctcagggtgccttgatgccgactgcccatcttctgcccaccccacagagagagcgt

SEQ ID NO: 416586 - DNA, 2110 bp, Homo sapiens
agcgggcggacacccggcctagcgccgcgggtcgcgccgagccgagccgagccgagcggagccggcggagcctctggaatcacccgggtcgctgttcctgagcagctgcagagcatcgagggctggagaggagcacatactgtccatggagctggtggtcaaggtggacagggggcggtggtgatggcgcagtttgacactgaataccagcgcctagaggcctcctatagtgattcacccccaggggaggaggacctgttggtgcacgtcgccgaggggagcaagtcaccttggcaccatattgaaaaccttgacctcttcttctctcgagtttataatctgcaccagaagaatggcttcacatgtatgctcatcggggagatctttgagctcatgcagttcctctttgtggttgccttcactaccttcctggtcagctgcgtggactatgacatcctatttgccaacaagatggtgaaccacagtcttcaccctactgaacccgtcaaggtcactctgccagacgcctttttgcctgctcaagtctgtagtgccaggattcaggaaaatggctcccttatcaccatcctggtcattgctggtgtcttctggatccaccggcttatcaagttcatctataacatttgctgctactgggagatccactccttctacctgcacgctctgcgcatccctatgtctgcccttccgtattgcacgtggcaagaagtgcaggcccggatcgtgcagacgcagaaggagcaccagatctgcatccacaaacgtgagctgacagaactggacatctaccaccgcatcctccgtttccagaactacatggtggcactggttaacaaatccctcctgcctctgcgcttccgcctgcctggcctcggggaagctgtcttcttcacccgtggtctcaagtacaactttgagctgatcctcttctggggacctggctctctgtttctcaatgaatggagcctcaaggccgagtacaaacgtggggggcaacggctagagctggcccagcgcctcagcaaccgcatcctgtggattggcatcgctaacttcctgctgtgccccctcatcctcatatggcaaatcctctatgccttcttcagctatgctgaggtgctgaagcgggagccgggggccctgggagcacgctgctggtcactctatggccgctgctacctccgccacttcaacgagctggagcacgagctgcagtcccgcctcaaccgtggctacaagcccgcctccaagtacatgaattgcttcttgtcacctcttttgacactgctggccaagaatggagccttcttcgctggctccatcctggctgtgcttattgccctcaccatttatgacgaagatgtgttggctgtggaacatgtgctgaccaccgtcacactcctgggggtcaccgtgaccgtgtgcaggtcctttatcccggaccagcacatggtgttctgccctgagcagctgctccgcgtgatcctcgctcacatccactacatgcctgaccactggcagggtaatccctctttacgtctatccagtccttacaatctgagtctgagcccctgagccttatcgcaaatgtggtagctggctcatcctgccggggccctccactgcccagagacctgcagggctccaggcacagggctgaagtcgcctctgccctgcgctccttctccccgctgcaacccgggcaggcgcccacaggccgggctcacagcaccatgacaggctctggggtggatgccaggacagccagctccgggagcagcgtgtgggaaggacagctgcagagcctggtgctgtcagaatatgcatccacagagatgagcctgcatgccctctatatgcaccagctccacaaagcagcaggcaccaagctacaacctcgaaacggcatgctatcgcgcacccgcagcggacgacgtgccataaacacgttggcagaacacgcgccccctagaaacgaaacgcgcaacacaacagaagaggcaccgacggaccaacgaccagacccacaaaccccacacgccataccagtctaaccccactccacatggcacaaagcacacacacgacc

SEQ ID NO: 416587 - DNA, 1875 bp, Homo sapiens
agcgggcggacacccggcctagcgccgcgggtcgcgccgagccgagccgagccgagcggagccggcggagcctctggaatcacccgggtcgctgttcctgagcagctgcagagcatcgagggctggagaggagcacatactgtccatggagctggtggtcaaggtggacagggggcggtggtgatggcgcagtttgacactgaataccagcgcctagaggcctcctatagtgattcacccccaggggaggaggacctgttggtgcacgtcgccgaggggagcaagtcaccttggcaccatattgaaaaccttgacctcttcttctctcgagtttataatctgcaccagaagaatggcttcacatgtatgctcatcggggagatctttgagctcatgcagttcctctttgtggttgccttcactaccttcctggtcagctgcgtggactatgacatcctatttgccaacaagatggtgaaccacagtcttcaccctactgaacccgtcaaggtcactctgccagacgcctttttgcctgctcaagtctgtagtgccaggattcaggaaaatggctcccttatcaccatcctggtcattgctggtgtcttctggatccaccggcttatcaagttcatctataacatttgctgctactgggagatccactccttctacctgcacgctctgcgcatccctatgtctgcccttccgtattgcacgtggcaagaagtgcaggcccggatcgtgcagacgcagaaggagcaccagatctgcatccacaaacgtgagctgacagaactggacatctaccaccgcatcctccgtttccagaactacatggtggcactggttaacaaatccctcctgcctctgcgcttccgcctgcctggcctcggggaagctgtcttcttcacccgtggtctcaagtacaactttgagctgatcctcttctggggacctggctctctgtttctcaatgaatggagcctcaaggccgagtacaaacgtggggggcaacggctagagctggcccagcgcctcagcaaccgcatcctgtggattggcatcgctaacttcctgctgtgccccctcatcctcatatggcaaatcctctatgccttcttcagctatgctgaggtgctgaagcgggagccgggggccctgggagcacgctgctggtcactctatggccgctgctacctccgccacttcaacgagctggagcacgagctgcagtcccgcctcaaccgtggctacaagcccgcctccaagtacatgaattgcttcttgtcacctcttttgacactgctggccaagaatggagccttcttcgctggctccatcctggctgtgcttattgccctcaccatttatgacgaagatgtgttggctgtggaacatgtgctgaccaccgtcacactcctgggggtcaccgtgaccgtgtgcaggtcctttatcccggaccagcacatggtgttctgccctgagcagctgctccgcgtgatcctcgctcacatccactacatgcctgaccactggcagggtaatgcccaccgctcgcagacccgggacgagtttgcccagctcttccagtacaaggcagtgttcattttggaagagttgctgagccccattgtcacacccctcatcctcatcttctgcctgcgcccacgggccctggagattatagacttcttccgaaacttcaccgtggaggtcgttggtgtgggagatacctgctcctttgctcagatggatgttcgccagcatggtcatccccaggtactgggagaggagggagccaggtggcctgggatgatgctggaacatacagtgtctttgggaaaaccgcaaaaagacacctctcctgagtca

SEQ ID NO: 416588 - DNA, 1945 bp, Homo sapiens
agcgggcggacacccggcctagcgccgcgggtcgcgccgagccgagccgagccgagcggagccggcggagcctctggaatcacccgggtcgctgttcctgagcagctgcagagcatcgagggctggagaggagcacatactgtccatggagctggtggtcaaggtggacagggggcggtggtgatggcgcagtttgacactgaataccagcgcctagaggcctcctatagtgattcacccccaggggaggaggacctgttggtgcacgtcgccgaggggagcaagtcaccttggcaccatattgaaaaccttgacctcttcttctctcgagtttataatctgcaccagaagaatggcttcacatgtatgctcatcggggagatctttgagctcatgcagttcctctttgtggttgccttcactaccttcctggtcagctgcgtggactatgacatcctatttgccaacaagatggtgaaccacagtcttcaccctactgaacccgtcaaggtcactctgccagacgcctttttgcctgctcaagtctgtagtgccaggattcaggaaaatggctcccttatcaccatcctggtcattgctggtgtcttctggatccaccggcttatcaagttcatctataacatttgctgctactgggagatccactccttctacctgcacgctctgcgcatccctatgtctgcccttccgtattgcacgtggcaagaagtgcaggcccggatcgtgcagacgcagaaggagcaccagatctgcatccacaaacgtgagctgacagaactggacatctaccaccgcatcctccgtttccagaactacatggtggcactggttaacaaatccctcctgcctctgcgcttccgcctgcctggcctcggggaagctgtcttcttcacccgtggtctcaagtacaactttgagctgatcctcttctggggacctggctctctgtttctcaatgaatggagcctcaaggccgagtacaaacgtggggggcaacggctagagctggcccagcgcctcagcaaccgcatcctgtggattggcatcgctaacttcctgctgtgccccctcatcctcatatggcaaatcctctatgccttcttcagctatgctgaggtgctgaagcgggagccgggggccctgggagcacgctgctggtcactctatggccgctgctacctccgccacttcaacgagctggagcacgagctgcagtcccgcctcaaccgtggctacaagcccgcctccaagtacatgaattgcttcttgtcacctcttttgacactgctggccaagaatggagccttcttcgctggctccatcctggctgtgcttattgccctcaccatttatgacgaagatgtgttggctgtggaacatgtgctgaccaccgtcacactcctgggggtcaccgtgaccgtgtgcaggtcctttatcccggaccagcacatggtgttctgccctgagcagctgctccgcgtgatcctcgctcacatccactacatgcctgaccactggcagggtaatgcccaccgctcgcagacccgggacgagtttgcccagctcttccagtacaaggcagtgttcattttggaagagttgctgagccccattgtcacacccctcattccctgagaatcctggttgttagtaaagtgcttatttttgtagttaaaaaaaaaaaaaaaaaaaaaaaaaaaaaaaaaaaaaaaaaccccggggcggcctttattttccgggggcgcggaaaaaaaggggtgtaatataaaagggggcgcaccatggggccatatcgcgttgtgttctccgggacccccagtttttttttgtcacaaggggggaaaatctctggcggcgggtctccccacatatatagagagagagagtcgcagatatatatatatttccagaaaacccgggttac

SEQ ID NO: 416589 - DNA, 793 bp, Homo sapiens
ccagaactacatggtggcactggttaacaaatccctcctgcctctgcgcttccgcctgcctggcctcggggaagctgtcttcttcacccgtggtctcaagtacaactttgagctgatcctcttctggggacctggctctctgtttctcaatgaatggagcctcaaggccgagtacaaacgtggggggcaacggctagagctggcccagcgcctcagcaaccgcatcctgtggattggcatcgctaacttcctgctgtgccccctcatcctcatatggcaaatcctctatgccttcttcagctatgctgaggtgctgaagcgggagccgggggccctgggagcacgctgctggtcactctatggccgctgctacctccgccacttcaacgagctggagcacgagctgcagtcccgcctcaaccgtggctacaagcccgcctccaagtacatgaattgcttcttgtcacctcttttgacactgctggccaagaatggagccttcttcgctggctccatcctggctgtgcttattgccctcaccatttatgacgaagatgtgttggctgtggaacatgtgctgaccaccgtcacactcctgggggtcaccgtgaccgtgtgcaggtgggccaggccacaggcgggagcaagccggctagcattcctgggaaaggcatacatctcaccatgatcctgatcccactaggtcctttatcccggaccagcacatggtgttctgccctgagcagctgctccgcgtgatcctcgctcacatccactacatgcctgaccactg

SEQ ID NO: 416590 - DNA, 501 bp, Homo sapiens
gtagagaaaatagcatggactttctcagccaggtacacttaggttcaaattcatctctggcatttagaatttgagtgacctggaggagtaaactcacttcatgtctccaaatcacattgttctcatctctgaaatgaactgctttactgagtagttgtgagcatttagctctatagctgcacataatagaaactttttattttaaaaaaagctcattagttatctaaaaggtaatactctctggaaggggtggttatgaaaatacattgctgcatcggggtgtccagtctggagaggtataagtgttcaaaatacttgaggtttcttatattttgaattaatagctatgggaaatgcctctcttagcttgtaaatgctctggaacttttcttcatagtatctcattcttgagtagtcatgttgggggtagtttttacttataaaagtaatacatgcctgcactccagcctgggcgacagagcgagactccgtctcaaaaaa

SEQ ID NO: 416591 - DNA, 1424 bp, Homo sapiens
cgcctccgcgggaccacagagctgggatagcgcgcgaggccctcggtcggacgggacgctcgggattcagggactgcctcggcacacgggaagttgccctacaggcgcgggagaaagcgcaggcggcggcttggcagggagaggcaggctgcagtgcacattgggtcaggcacacgcgaggggcagcccccgagggccgtcccagagtcccccgcgccgccggggtcctaacggggtgcaccgtcttccgccgcacgtggattcagcgcgatgcccaaatccaagcgcgacaagaaagtctccttaaccaaaactgccaagaaaggcttggaattgaaacaaaacctgatagaagagcttcggaaatgtgtggacacctacaagtaccttttcatcttctctgtggccaacatgaggaacagcaagctgaaggacatccggaacgcctggaagcacagccggatgttctttggcaaaaacaaggtgatgatggtggccttgggtcggagcccatctgatgaatacaaagacaacctgcaccaggtcagcaaaaggttgaggggtgaggtgggtctcctgttcaccaaccgcacaaaggaggaggtgaatgagtggttcacgaaatacacagaaatggactacgcccgagctggtaacaaagcagctttcactgtgagcctggatccagggcccctggagcagttcccccactccatggagccacagctcaggcagctgggcctgcccaccgccctcaagagaggtgtggtgactctgctgtctgactacgaggtgtgcaaggagggcgatgtgctgaccccagagcaggctcgcgtcctgaagctttttgggtatgagatggctgaattcaaggtgaccatcaaatacatgtgggattcacagtcgggaaggttccagcagatgggagacgacttgccagagagcgcatctgagtccacagaagagtcagactcagaagatgatgactgaaagggactcgggactgaaggtctcctggaagcttctgggtctcactggaccatcaggactgctgccgcccctctggagagagcagctttttatttgtctgtagacagggaacatgatgggcactgacctcctgtaaagaataaaactgtgggccgggcgcggtggctcacgcctggaatcccagcactttgggaagccgaggtgggcagatcataaggtcaggagattaagaccatcctggctaacacggtgaaaccccgtctctactaaaaatagaaaaaaaaactagttgggcatagtggcatgtgcctgtagtcccagctactcaggaggctgaggcaggagaatcacttgaacccgggaggtggaggttgccgtgagttgagattggaccactgctctccagcctgggcaacagagtaaaactctgtccc

SEQ ID NO: 416592 - DNA, 750 bp, Homo sapiens
cggagagggagcggtcagagacgattctcatgaagtgcaggttgaggtatgttggctattgtgttacgtatgctgatcgtaatgatatgtagagggtatattgagttttttgttttttgttctatgtttgtgttgttttttgggttgtttttttttttttttattggtctctcatcatctctctcctttttgtttttattagtctccttaaccaaaactgccaagaaaggcttggaattgaaacaaaacctgatagaagaggtaagaggttgttcttttctagagcttgcaattgtttggtttataaaggtaggtataggactgttggccagggataggactgttggccaggggaacatactagtggggaaaaaaaaaaaatctccaagctgccaatccaggcctttttcctccagcagcagcaccagcaaaaacttccatagtgatgatttccagctttgactagctcatactctgtgccctgtcctgcactgtgtttcttatgcgttgttccactccatcctcataacatccctgtgatgtgggtactaggtgatgatgttgctgttttgcatttggggtcactgaagcttacagagatttgttagcctgcccaatgtcaaaaaacaggaggccaggaacggtgggccacgcctgtaatcccagcactttgggaggccaagtgggtcagacagcttgagtctgggagctcaagagcagcctgggcaacatgacaaaacctcatctcta

SEQ ID NO: 416593 - DNA, 2290 bp, Homo sapiens
cgcctccgcgggaccacagagctgggatagcgcgcgaggccctcggtcggacgggacgctcgggattcagggactgcctcggcacacgggaagttgccctacaggcgcgggagaaagcgcaggcggcggcttggcagggagaggcaggctgcagtgcacattgggtcaggcacacgcgaggggcagcccccgagggccgtcccagagtcccccgcgccgccggggtcctaacggggtgcaccgtcttccgccgcacgtggattcagcgcgatgcccaaatccaagcgcgacaagaaagtctccttaaccaaaactgccaagaaaggcttggaattgaaacaaaacctgatagaagagcttcggaaatgtgtggacacctacaagtaccttttcatcttctctgtggccaacatgaggaacagcaagctgaaggacatccggaacgcctggaagcacagccggatgttctttggcaaaaacaaggtgatgatggtggccttgggtcggagcccatctgatgaatacaaagacaacctgcaccaggtcagcaaaaggttgaggggtgaggtgggtctcctgttcaccaaccgcacaaaggaggaggtgaatgagtggttcacgaaatacacagaaatggactacgcccgagctggtaacaaagcagctttcactgtgagcctggatccagggcccctggagcagttcccccactccatggagccacagctcaggcagctgggcctgcccaccgccctcaagagaggtgtggtgactctgctgtctgactacgaggtgtgcaaggagggcgatgtgctgaccccagagcaggctcgcgtcctgaagctttttgggtatgagatggctgaattcaaggtgaccatcaaatacatgtgggattcacagtcgggaaggttccagcagatgggagacgacttgccagagagcgcatctgagtccacagaagagtcagactcagaagatgatgactgaaagggactcgggactgaaggtctcctggaagcttctgggtctcactggaccatcaggactgctgccgcccctctggagagagcagctttttatttgtctgtagacagggaacatgatgggcactgacctcctgtaaagaataaaactgtgggccgggcgcggtggctcacgcctggaatcccagcactttgggaagccgaggtgggcagatcataaggtcaggagattaagaccatcctggctaacacggtgaaaccccgtctctactaaaaatagaaaaaaaaactagttgggcatagtggcatgtgcctgtagtcccagctactcaggaggctgaggcaggagaatcacttgaacccgggaggtggaggttgccgtgagttgagattggaccactgctctccagcctgggcaacagagtaaaactctgtcccaaaaaaaaaaaaagaatacaaccttgcaggatgtctctcctggagacagcaagagggagaggagggagagggctctttcttagaaaagaggcctttggtgagcccagaagtttgaaaccagcctgggcaattcagcaagatcccgtctctacaaaaaataaaaaaaaattagtcgtggtgccacttgcctgtggtccccactgcttgggaggctgaggtgggagaattgcttaagcctgagagttggaggctcagtgagccatgatcatgccactgcactccagcctgggtggccattgaattctgcgtggattgcctcagtttgccttgtcagccaacttccactggctgccttggcactgccatgacagcacagctccacaccagagctggggtttctcttcagtcctgggtaccccttggcagagggatttgctgaggaaaattaggtatccttcctagccctccacacacttccaaaccagggctgcggatctgatggatgccaggaagacagccttgggctgagagtgacatcactgcaagagttgagagccagcgtctaaagtgtccacggcatcctgggaggttttatccttggtgactctaatggtagatttttgtccaccttgttctatttgcttttgtttgtttttgatttttctgttttaaaattttaaggagagatggggtttcaccatgttgcccaggctggtctcaaactcctgagctcaagcgatctacccaccttggcctcccaaagtgctgggattataggtgtgagccaccgcatccagcccacattgttctatttgtatttcatgaaagcagttctgaatgagagtaaatcagcttcagggtgaaca

SEQ ID NO: 416594 - DNA, 1223 bp, Homo sapiens
cgcctccgcgggaccacagagctgggatagcgcgcgaggccctcggtcggacgggacgctcgggattcagggactgcctcggcacacgggaagttgccctacaggcgcgggagaaagcgcaggcggcggcttggcagggagaggcaggctgcagtgcacattgggtcaggcacacgcgaggggcagcccccgagggccgtcccagagtcccccgcgccgccggggtcctaacggggtgcaccgtcttccgccgcacgtggattcagcgcgatgcccaaatccaagcgcgacaagaaagtctccttaaccaaaactgccaagaaaggcttggaattgaaacaaaacctgatagaagagcttcggaaatgtgtggacacctacaagtaccttttcatcttctctgtggccaacatgaggaacagcaagctgaaggacatccggaacgcctggaagcacagccggatgttctttggcaaaaacaaggtgatgatggtggccttgggtcggagcccatctgatgaatacaaagacaacctgcaccaggtcagcaaaaggttgaggggtgaggtgggtctcctgttcaccaaccgcacaaaggaggaggtgaatgagtggttcacgaaatacacagaaatggactacgcccgagctggtaacaaagcagctttcactgtgagcctggatccagggcccctggagcagttcccccactccatggagccacagctcaggcagctgggcctgcccaccgccctcaagagaggtgtggtgactctgctgtctgactacgaggtgtgcaaggagggcgatgtgctgaccccagagcaggctcgcgtcctgaagctttttgggtatgagatggctgaattcaaggtgaccatcaaatacatgtgggattcacagtcgggaaggttccagcagatgggagacgacttgccagagagcgcatctgagtccacagaagagtcagactcagaagatgatgactgaaagggactcgggactgaaggtctcctggaagcttctgggtctcactggaccatcaggactgctgccgcccctctggagagagcagctttttatttgtctgtagacagggaacatgatgggcactgacctcctgtaaagaataaaactgtggccaccgcatccagcccacattgttctatttgtatttcatgaaagcagttctgaatgagagtaaatcagcttcagggtgaaca

SEQ ID NO: 416595 - DNA, 2233 bp, Homo sapiens
  misc_feature (236)..(236): n is a, c, g, or t
tcacagtccattaaattcttcccctctcttcttttagcaaacttgtaacatccttttatatcctttcttaacagaaggaaattaagcaaacaaaccagtcttttgccttttctttctctgtttcactcccccttcttattttatttatttattgaattgccatatacggccagttaaaactgctgccggacagtaacatatcccggatgagggtttcgcaaatccaagcgcgacangaaagtctccttaaccaaaactgccaagaaaggcttggaattgaaacaaaacctgatagaagagcttcggaaatgtgtggacacctacaagtaccttttcatcttctctgtggccaacatgaggaacagcaagctgaaggacatccggaacgcctggaagcacagccggatgttctttggcaaaaacaaggtgatgatggtggccttgggtcggagcccatctgatgaatacaaagacaacctgcaccaggtcagcaaaaggttgaggggtgaggtgggtctcctgttcaccaaccgcacaaaggaggaggtgaatgagtggttcacgaaatacacagaaatggactacgcccgagctggtaacaaagcagctttcactgtgagcctggatccagggcccctggagcagttcccccactccatggagccacagctcaggcagctgggcctgcccaccgccctcaagagaggtgtggtgactctgctgtctgactacgaggtgtgcaaggagggcgatgtgctgaccccagagcaggctcgcgtcctgaagctttttgggtatgagatggctgaattcaaggtgaccatcaaatacatgtgggattcacagtcgggaaggttccagcagatgggagacgacttgccagagagcgcatctgagtccacagaagagtcagactcagaagatgatgactgaaagggactcgggactgaaggtctcctggaagcttctgggtctcactggaccatcaggactgctgccgcccctctggagagagcagctttttatttgtctgtagacagggaacatgatgggcactgacctcctgtaaagaataaaactgtgggccgggcgcggtggctcacgcctggaatcccagcactttgggaagccgaggtgggcagatcataaggtcaggagattaagaccatcctggctaacacggtgaaaccccgtctctactaaaaatagaaaaaaaaactagttgggcatagtggcatgtgcctgtagtcccagctactcaggaggctgaggcaggagaatcacttgaacccgggaggtggaggttgccgtgagttgagattggaccactgctctccagcctgggcaacagagtaaaactctgtcccaaaaaaaaaaaaagaatacaaccttgcaggatgtctctcctggagacagcaagagggagaggagggagagggctctttcttagaaaagaggcctttggtgagcccagaagtttgaaaccagcctgggcaattcagcaagatcccgtctctacaaaaaataaaaaaaaattagtcgtggtgccacttgcctgtggtccccactgcttgggaggctgaggtgggagaattgcttaagcctgagagttggaggctcagtgagccatgatcatgccactgcactccagcctgggtggccattgaattctgcgtggattgcctcagtttgccttgtcagccaacttccactggctgccttggcactgccatgacagcacagctccacaccagagctggggtttctcttcagtcctgggtaccccttggcagagggatttgctgaggaaaattaggtatccttcctagccctccacacacttccaaaccagggctgcggatctgatggatgccaggaagacagccttgggctgagagtgacatcactgcaagagttgagagccagcgtctaaagtgtccacggcatcctgggaggttttatccttggtgactctaatggtagatttttgtccaccttgttctatttgcttttgtttgtttttgatttttctgttttaaaattttaaggagagatggggtttcaccatgttgcccaggctggtctcaaactcctgagctcaagcgatctacccaccttggcctcccaaagtgctgggattataggtgtgagccaccgcatccagcccacattgttctatttgtatttcatgaaagcagttctgaatgagagtaaatcagcttcagggtgaaca

SEQ ID NO: 416596 - DNA, 2105 bp, Homo sapiens
cgcctccgcgggaccacagagctgggatagcgcgcgaggccctcggtcggacgggacgctcgggattcagggactgcctcggcacacgggaagttgccctacaggcgcgggagaaagcgcaggcggcggcttggcagggagaggcaggctgcagtgcacattgggtcaggcacacgcgaggggcagcccccgagggccgtcccagagtcccccgcgccgccggggtcctaacggggtgcaccgtcttccgccgcacgtggattcagcgcgatgcccaaatccaagcgcgacaagaaaggtgatgatggtggccttgggtcggagcccatctgatgaatacaaagacaacctgcaccaggtcagcaaaaggttgaggggtgaggtgggtctcctgttcaccaaccgcacaaaggaggaggtgaatgagtggttcacgaaatacacagaaatggactacgcccgagctggtaacaaagcagctttcactgtgagcctggatccagggcccctggagcagttcccccactccatggagccacagctcaggcagctgggcctgcccaccgccctcaagagaggtgtggtgactctgctgtctgactacgaggtgtgcaaggagggcgatgtgctgaccccagagcaggctcgcgtcctgaagctttttgggtatgagatggctgaattcaaggtgaccatcaaatacatgtgggattcacagtcgggaaggttccagcagatgggagacgacttgccagagagcgcatctgagtccacagaagagtcagactcagaagatgatgactgaaagggactcgggactgaaggtctcctggaagcttctgggtctcactggaccatcaggactgctgccgcccctctggagagagcagctttttatttgtctgtagacagggaacatgatgggcactgacctcctgtaaagaataaaactgtgggccgggcgcggtggctcacgcctggaatcccagcactttgggaagccgaggtgggcagatcataaggtcaggagattaagaccatcctggctaacacggtgaaaccccgtctctactaaaaatagaaaaaaaaactagttgggcatagtggcatgtgcctgtagtcccagctactcaggaggctgaggcaggagaatcacttgaacccgggaggtggaggttgccgtgagttgagattggaccactgctctccagcctgggcaacagagtaaaactctgtcccaaaaaaaaaaaaagaatacaaccttgcaggatgtctctcctggagacagcaagagggagaggagggagagggctctttcttagaaaagaggcctttggtgagcccagaagtttgaaaccagcctgggcaattcagcaagatcccgtctctacaaaaaataaaaaaaaattagtcgtggtgccacttgcctgtggtccccactgcttgggaggctgaggtgggagaattgcttaagcctgagagttggaggctcagtgagccatgatcatgccactgcactccagcctgggtggccattgaattctgcgtggattgcctcagtttgccttgtcagccaacttccactggctgccttggcactgccatgacagcacagctccacaccagagctggggtttctcttcagtcctgggtaccccttggcagagggatttgctgaggaaaattaggtatccttcctagccctccacacacttccaaaccagggctgcggatctgatggatgccaggaagacagccttgggctgagagtgacatcactgcaagagttgagagccagcgtctaaagtgtccacggcatcctgggaggttttatccttggtgactctaatggtagatttttgtccaccttgttctatttgcttttgtttgtttttgatttttctgttttaaaattttaaggagagatggggtttcaccatgttgcccaggctggtctcaaactcctgagctcaagcgatctacccaccttggcctcccaaagtgctgggattataggtgtgagccaccgcatccagcccacattgttctatttgtatttcatgaaagcagttctgaatgagagtaaatcagcttcagggtgaaca

SEQ ID NO: 416597 - DNA, 1807 bp, Homo sapiens
ccacccctcgcatcacaccataccgcagcggtcatacggctaggtacagcctgggtttgggtcagcaaaaggttgaggggtgaggtgggtctcctgttcaccaaccgcacaaaggaggaggtgaatgagtggttcacgaaatacacagaaatggactacgcccgagctggtaacaaagcagctttcactgtgagcctggatccagggcccctggagcagttcccccactccatggagccacagctcaggcagctgggcctgcccaccgccctcaagagaggtgtggtgactctgctgtctgactacgaggtgtgcaaggagggcgatgtgctgaccccagagcaggctcgcgtcctgaagctttttgggtatgagatggctgaattcaaggtgaccatcaaatacatgtgggattcacagtcgggaaggttccagcagatgggagacgacttgccagagagcgcatctgagtccacagaagagtcagactcagaagatgatgactgaaagggactcgggactgaaggtctcctggaagcttctgggtctcactggaccatcaggactgctgccgcccctctggagagagcagctttttatttgtctgtagacagggaacatgatgggcactgacctcctgtaaagaataaaactgtgggccgggcgcggtggctcacgcctggaatcccagcactttgggaagccgaggtgggcagatcataaggtcaggagattaagaccatcctggctaacacggtgaaaccccgtctctactaaaaatagaaaaaaaaactagttgggcatagtggcatgtgcctgtagtcccagctactcaggaggctgaggcaggagaatcacttgaacccgggaggtggaggttgccgtgagttgagattggaccactgctctccagcctgggcaacagagtaaaactctgtcccaaaaaaaaaaaaagaatacaaccttgcaggatgtctctcctggagacagcaagagggagaggagggagagggctctttcttagaaaagaggcctttggtgagcccagaagtttgaaaccagcctgggcaattcagcaagatcccgtctctacaaaaaataaaaaaaaattagtcgtggtgccacttgcctgtggtccccactgcttgggaggctgaggtgggagaattgcttaagcctgagagttggaggctcagtgagccatgatcatgccactgcactccagcctgggtggccattgaattctgcgtggattgcctcagtttgccttgtcagccaacttccactggctgccttggcactgccatgacagcacagctccacaccagagctggggtttctcttcagtcctgggtaccccttggcagagggatttgctgaggaaaattaggtatccttcctagccctccacacacttccaaaccagggctgcggatctgatggatgccaggaagacagccttgggctgagagtgacatcactgcaagagttgagagccagcgtctaaagtgtccacggcatcctgggaggttttatccttggtgactctaatggtagatttttgtccaccttgttctatttgcttttgtttgtttttgatttttctgttttaaaattttaaggagagatggggtttcaccatgttgcccaggctggtctcaaactcctgagctcaagcgatctacccaccttggcctcccaaagtgctgggattataggtgtgagccaccgcatccagcccacattgttctatttgtatttcatgaaagcagttctgaatgagagtaaatcagcttcagggtgaaca

SEQ ID NO: 416598 - DNA, 1142 bp, Homo sapiens
  misc_feature (1093)..(1093): n is a, c, g, or t
  misc_feature (1096)..(1096): n is a, c, g, or t
  misc_feature (1102)..(1103): n is a, c, g, or t
cgcctccgcgggaccacagagctgggatagcgcgcgaggccctcggtcggacgggacgctcgggattcagggactgcctcggcacacgggaagttgccctacaggcgcgggagaaagcgcaggcggcggcttggcagggagaggcaggctgcagtgcacattgggtcaggcacacgcgaggggcagcccccgagggccgtcccagagtcccccgcgccgccggggtcctaacggggtgcaccgtcttccgccgcacgtggattcagcgcgatgcccaaatccaagcgcgacaagaaaggtgatgatggtggccttgggtcggagcccatctgatgaatacaaagacaacctgcaccaggtcagcaaaaggttgaggggtgaggtgggtctcctgttcaccaaccgcacaaaggaggaggtgaatgagtggttcacgaaatacacagaaatggactacgcccgagctggtaacaaagcagctttcactgtgagcctggatccagggcccctggagcagttcccccactccatggagccacagctcaggcagctgggcctgcccaccgccctcaagagaggtgtggtgactctgctgtctgactacgaggtgtgcaaggagggcgatgtgctgaccccagagcaggctcgcgtcctgaagctttttgggtatgagatggctgaattcaaggtgaccatcaaatacatgtgggattcacagtcgggaaggttccagcagatgggagacgacttgccagagagcgcatctgagtccacagaagagtcagactcagaagatgatgactgaaagggactcgggactgaaggtctcctggaagcttctgggtctcactggaccatcaggactgctgccgcccctctggagagagcagctttttatttgtctgtagacagggaacatgatgggcactgacctcctgtaaagaataaaactgtgggccgggcgcggtggctcacgcctggaatcccagcactttgggaagccgaggtgggcagatcataaggtcaggagattaagaccatcctggctaacacggtgaaaccccgtctctactaaaaatagaaaaaaatagtnggntatggnntgctgtgtcagaataggagtgggggggaaaaatgacggg

SEQ ID NO: 416599 - DNA, 2165 bp, Homo sapiens
  misc_feature (236)..(236): n is a, c, g, or t
tcacagtccattaaattcttcccctctcttcttttagcaaacttgtaacatccttttatatcctttcttaacagaaggaaattaagcaaacaaaccagtcttttgccttttctttctctgtttcactcccccttcttattttatttatttattgaattgccatatacggccagttaaaactgctgccggacagtaacatatcccggatgagggtttcgcaaatccaagcgcgacangaaagtctccttaaccaaaactgccaagaaaggcttggaattgaaacaaaacctgatagaagagcttcggaaatgtgtggacacctacaagtaccttttcatcttctctgtggccaacatgaggaacagcaagctgaaggacatccggaacgcctggaagcacagccggatgttctttggcaaaaacaaggtgatgatggtggccttgggtcggagcccatctgatgaatacaaagacaacctgcaccaggtggttcacgaaatacacagaaatggactacgcccgagctggtaacaaagcagctttcactgtgagcctggatccagggcccctggagcagttcccccactccatggagccacagctcaggcagctgggcctgcccaccgccctcaagagaggtgtggtgactctgctgtctgactacgaggtgtgcaaggagggcgatgtgctgaccccagagcaggctcgcgtcctgaagctttttgggtatgagatggctgaattcaaggtgaccatcaaatacatgtgggattcacagtcgggaaggttccagcagatgggagacgacttgccagagagcgcatctgagtccacagaagagtcagactcagaagatgatgactgaaagggactcgggactgaaggtctcctggaagcttctgggtctcactggaccatcaggactgctgccgcccctctggagagagcagctttttatttgtctgtagacagggaacatgatgggcactgacctcctgtaaagaataaaactgtgggccgggcgcggtggctcacgcctggaatcccagcactttgggaagccgaggtgggcagatcataaggtcaggagattaagaccatcctggctaacacggtgaaaccccgtctctactaaaaatagaaaaaaaaactagttgggcatagtggcatgtgcctgtagtcccagctactcaggaggctgaggcaggagaatcacttgaacccgggaggtggaggttgccgtgagttgagattggaccactgctctccagcctgggcaacagagtaaaactctgtcccaaaaaaaaaaaaagaatacaaccttgcaggatgtctctcctggagacagcaagagggagaggagggagagggctctttcttagaaaagaggcctttggtgagcccagaagtttgaaaccagcctgggcaattcagcaagatcccgtctctacaaaaaataaaaaaaaattagtcgtggtgccacttgcctgtggtccccactgcttgggaggctgaggtgggagaattgcttaagcctgagagttggaggctcagtgagccatgatcatgccactgcactccagcctgggtggccattgaattctgcgtggattgcctcagtttgccttgtcagccaacttccactggctgccttggcactgccatgacagcacagctccacaccagagctggggtttctcttcagtcctgggtaccccttggcagagggatttgctgaggaaaattaggtatccttcctagccctccacacacttccaaaccagggctgcggatctgatggatgccaggaagacagccttgggctgagagtgacatcactgcaagagttgagagccagcgtctaaagtgtccacggcatcctgggaggttttatccttggtgactctaatggtagatttttgtccaccttgttctatttgcttttgtttgtttttgatttttctgttttaaaattttaaggagagatggggtttcaccatgttgcccaggctggtctcaaactcctgagctcaagcgatctacccaccttggcctcccaaagtgctgggattataggtgtgagccaccgcatccagcccacattgttctatttgtatttcatgaaagcagttctgaatgagagtaaatcagcttcagggtgaaca

SEQ ID NO: 416600 - DNA, 1800 bp, Homo sapiens
ccagcagccaaggtctgtgatgggggaaggcccagggccacgggacacttgggggagcctgactcatgggctggtggcgtggccaggagcatctcctcctaccacttctcttttcccttaggtggttcacgaaatacacagaaatggactacgcccgagctggtaacaaagcagctttcactgtgagcctggatccagggcccctggagcagttcccccactccatggagccacagctcaggcagctgggcctgcccaccgccctcaagagaggtgtggtgactctgctgtctgactacgaggtgtgcaaggagggcgatgtgctgaccccagagcaggctcgcgtcctgaagctttttgggtatgagatggctgaattcaaggtgaccatcaaatacatgtgggattcacagtcgggaaggttccagcagatgggagacgacttgccagagagcgcatctgagtccacagaagagtcagactcagaagatgatgactgaaagggactcgggactgaaggtctcctggaagcttctgggtctcactggaccatcaggactgctgccgcccctctggagagagcagctttttatttgtctgtagacagggaacatgatgggcactgacctcctgtaaagaataaaactgtgggccgggcgcggtggctcacgcctggaatcccagcactttgggaagccgaggtgggcagatcataaggtcaggagattaagaccatcctggctaacacggtgaaaccccgtctctactaaaaatagaaaaaaaaactagttgggcatagtggcatgtgcctgtagtcccagctactcaggaggctgaggcaggagaatcacttgaacccgggaggtggaggttgccgtgagttgagattggaccactgctctccagcctgggcaacagagtaaaactctgtcccaaaaaaaaaaaaagaatacaaccttgcaggatgtctctcctggagacagcaagagggagaggagggagagggctctttcttagaaaagaggcctttggtgagcccagaagtttgaaaccagcctgggcaattcagcaagatcccgtctctacaaaaaataaaaaaaaattagtcgtggtgccacttgcctgtggtccccactgcttgggaggctgaggtgggagaattgcttaagcctgagagttggaggctcagtgagccatgatcatgccactgcactccagcctgggtggccattgaattctgcgtggattgcctcagtttgccttgtcagccaacttccactggctgccttggcactgccatgacagcacagctccacaccagagctggggtttctcttcagtcctgggtaccccttggcagagggatttgctgaggaaaattaggtatccttcctagccctccacacacttccaaaccagggctgcggatctgatggatgccaggaagacagccttgggctgagagtgacatcactgcaagagttgagagccagcgtctaaagtgtccacggcatcctgggaggttttatccttggtgactctaatggtagatttttgtccaccttgttctatttgcttttgtttgtttttgatttttctgttttaaaattttaaggagagatggggtttcaccatgttgcccaggctggtctcaaactcctgagctcaagcgatctacccaccttggcctcccaaagtgctgggattataggtgtgagccaccgcatccagcccacattgttctatttgtatttcatgaaagcagttctgaatgagagtaaatcagcttcagggtgaaca

SEQ ID NO: 416601 - DNA, 1647 bp, Homo sapiens
agtccttggagttgcacagctggattctgtgatcattgcttcacctcctattgaagatggagttaatctttccttggagcatttacagccttactgggaggaattagaaaacttagttcagagcaaaaagattgttgccataggtacctctgatctagacaaagggaaacaccggtgtttccctttgtctcttgcagaagctttttgggtatgagatggctgaattcaaggtgaccatcaaatacatgtgggattcacagtcgggaaggttccagcagatgggagacgacttgccagagagcgcatctgagtccacagaagagtcagactcagaagatgatgactgaaagggactcgggactgaaggtctcctggaagcttctgggtctcactggaccatcaggactgctgccgcccctctggagagagcagctttttatttgtctgtagacagggaacatgatgggcactgacctcctgtaaagaataaaactgtgggccgggcgcggtggctcacgcctggaatcccagcactttgggaagccgaggtgggcagatcataaggtcaggagattaagaccatcctggctaacacggtgaaaccccgtctctactaaaaatagaaaaaaaaactagttgggcatagtggcatgtgcctgtagtcccagctactcaggaggctgaggcaggagaatcacttgaacccgggaggtggaggttgccgtgagttgagattggaccactgctctccagcctgggcaacagagtaaaactctgtcccaaaaaaaaaaaaagaatacaaccttgcaggatgtctctcctggagacagcaagagggagaggagggagagggctctttcttagaaaagaggcctttggtgagcccagaagtttgaaaccagcctgggcaattcagcaagatcccgtctctacaaaaaataaaaaaaaattagtcgtggtgccacttgcctgtggtccccactgcttgggaggctgaggtgggagaattgcttaagcctgagagttggaggctcagtgagccatgatcatgccactgcactccagcctgggtggccattgaattctgcgtggattgcctcagtttgccttgtcagccaacttccactggctgccttggcactgccatgacagcacagctccacaccagagctggggtttctcttcagtcctgggtaccccttggcagagggatttgctgaggaaaattaggtatccttcctagccctccacacacttccaaaccagggctgcggatctgatggatgccaggaagacagccttgggctgagagtgacatcactgcaagagttgagagccagcgtctaaagtgtccacggcatcctgggaggttttatccttggtgactctaatggtagatttttgtccaccttgttctatttgcttttgtttgtttttgatttttctgttttaaaattttaaggagagatggggtttcaccatgttgcccaggctggtctcaaactcctgagctcaagcgatctacccaccttggcctcccaaagtgctgggattataggtgtgagccaccgcatccagcccacattgttctatttgtatttcatgaaagcagttctgaatgagagtaaatcagcttcagggtgaaca

SEQ ID NO: 416602 - DNA, 1271 bp, Homo sapiens
  misc_feature (87)..(87): n is a, c, g, or t
  misc_feature (103)..(103): n is a, c, g, or t
  misc_feature (206)..(206): n is a, c, g, or t
ggcacgaggcaaggattaaaccttcccaggattccgtggacactttagacgctggctctcaactcttgcagtgatgtcacttcttcnccccaaggctgtcttncctggcatcccattcagattccgcagcccctggttttggaaagtgtgtggaggggctaggaaggatacctaattttcctcagcaaaatccctctgccaagggntacccaggactgaggtgaaaccccgtctctactaaaaatagaaaaaaaaactagttgggcatagtggcatgtgcctgtagtcccagctactcaggaggctgaggcaggagaatcacttgaacccgggaggtggaggttgccgtgagttgagattggaccactgctctccagcctgggcaacagagtaaaactctgtcccaaaaaaaaaaaaagaatacaaccttgcaggatgtctctcctggagacagcaagagggagaggagggagagggctctttcttagaaaagaggcctttggtgagcccagaagtttgaaaccagcctgggcaattcagcaagatcccgtctctacaaaaaataaaaaaaaattagtcgtggtgccacttgcctgtggtccccactgcttgggaggctgaggtgggagaattgcttaagcctgagagttggaggctcagtgagccatgatcatgccactgcactccagcctgggtggccattgaattctgcgtggattgcctcagtttgccttgtcagccaacttccactggctgccttggcactgccatgacagcacagctccacaccagagctggggtttctcttcagtcctgggtaccccttggcagagggatttgctgaggaaaattaggtatccttcctagccctccacacacttccaaaccagggctgcggatctgatggatgccaggaagacagccttgggctgagagtgacatcactgcaagagttgagagccagcgtctaaagtgtccacggcatcctgggaggttttatccttggtgactctaatggtagatttttgtccaccttgttctatttgcttttgtttgtttttgatttttctgttttaaaattttaaggagagatggggtttcaccatgttgcccaggctggtctcaaactcctgagctcaagcgatctacccaccttggcctcccaaagtgctgggattataggtgtgagccaccgcatccagcccacattgttctatttgtatttcatgaaagcagttctgaatgagagtaaatcagcttcagggtgaaca

SEQ ID NO: 416603 - DNA, 1082 bp, Homo sapiens
gctttcatatgggagaaatttttcctgtagatgtatctgtgatgttggtggggtaggacacttcggctttgatcctgggtgtgtgcagtagtgtagtctctatatgatttctaggctgaggcaggagaatcacttgaacccgggaggtggaggttgccgtgagttgagattggaccactgctctccagcctgggcaacagagtaaaactctgtcccaaaaaaaaaaaaagaatacaaccttgcaggatgtctctcctggagacagcaagagggagaggagggagagggctctttcttagaaaagaggcctttggtgagcccagaagtttgaaaccagcctgggcaattcagcaagatcccgtctctacaaaaaataaaaaaaaattagtcgtggtgccacttgcctgtggtccccactgcttgggaggctgaggtgggagaattgcttaagcctgagagttggaggctcagtgagccatgatcatgccactgcactccagcctgggtggccattgaattctgcgtggattgcctcagtttgccttgtcagccaacttccactggctgccttggcactgccatgacagcacagctccacaccagagctggggtttctcttcagtcctgggtaccccttggcagagggatttgctgaggaaaattaggtatccttcctagccctccacacacttccaaaccagggctgcggatctgatggatgccaggaagacagccttgggctgagagtgacatcactgcaagagttgagagccagcgtctaaagtgtccacggcatcctgggaggttttatccttggtgactctaatggtagatttttgtccaccttgttctatttgcttttgtttgtttttgatttttctgttttaaaattttaaggagagatggggtttcaccatgttgcccaggctggtctcaaactcctgagctcaagcgatctacccaccttggcctcccaaagtgctgggattataggtgtgagccaccgcatccagcccacattgttctatttgtatttcatgaaagcagttctgaatgagagtaaatcagcttcagggtgaaca

SEQ ID NO: 416604 - DNA, 661 bp, Homo sapiens
tgggacagagttttactcttgttgccccaggctggaagagcagtggtccaattctcaacttcacggcaaccttccacttcccggggttcaagtgattctcctgcctcagcctcctgagtagctgggactacaggcacattgccactatgcccaactaggtttttttttctatttttagtagagactggggtttctcttcagtcctgggtaccccttggcagagggatttgctgaggaaaattaggtatccttcctagccctccacacacttccaaaccagggctgcggatctgatggatgccaggaagacagccttgggctgagagtgacatcactgcaagagttgagagccagcgtctaaagtgtccacggcatcctgggaggttttatccttggtgactctaatggtagatttttgtccaccttgttctatttgcttttgtttgtttttgatttttctgttttaaaattttaaggagagatggggtttcaccatgttgcccaggctggtctcaaactcctgagctcaagcgatctacccaccttggcctcccaaagtgctgggattataggtgtgagccaccgcatccagcccacattgttctatttgtatttcatgaaagcagttctgaatgagagtaaatcagcttcagggtgaaca

SEQ ID NO: 416605 - DNA, 696 bp, Homo sapiens
  misc_feature (236)..(236): n is a, c, g, or t
tcacagtccattaaattcttcccctctcttcttttagcaaacttgtaacatccttttatatcctttcttaacagaaggaaattaagcaaacaaaccagtcttttgccttttctttctctgtttcactcccccttcttattttatttatttattgaattgccatatacggccagttaaaactgctgccggacagtaacatatcccggatgagggtttcgcaaatccaagcgcgacangaaagtctccttaaccaaaactgccaagaaaggcttggaattgaaacaaaacctgatagaagagcttcggaaatgtgtggacacctacaagtaccttttcatcttctctgtggccaacatgaggaacagcaagctgaaggacatccggaacgcctggaagcacagccggatgttctttggcaaaaacaaggtgatgatggtggccttgggtcggagcccatctgatgaatacaaagacaacctgcaccagaagtctctggccctcacggggtggagctaaggcaaagccgccctctctcccactactcccatgtgacagcctcccccagccattggcaggccggaggctcagggagagcagggcctggcttaaagctctgggttctcccttcacctccggacccaaggaatagcagcttcctgcctcccactccttcctgctatgacaaccaaaaacgtc

SEQ ID NO: 416606 - DNA, 445 bp, Homo sapiens
tgggggagcctgactcatgggctggtggcgtggccaggagcatctcctcctaccacttctcttttcccttaggtggttcacgaaatacacagaaatggactacgcccgagctggtaacaaagcagctttcactgtgagcctggatccagggcccctggagcagttcccccactccatggagccacagctcaggcagctgggcctgcccaccgccctcaagagaggtatgggcagccctggagccaaaaggtcacagcctagagtccaagagcacgggcctgcaagctcatccctttctagctgagcaagttatttctacaagcttccattttctcatgagaaaatggggctaagagtgcatgcctcacagtgggggtgaaagcagacagtaacttacagccaaaatgcagcccttgaggcccatcaggggccttgcgcttgttta

SEQ ID NO: 416607 - DNA, 683 bp, Homo sapiens
aggccctcggtcggacgggacgctcgggattcagggactgcctcggcacacgggaagttgccctacaggcgcgggagaaagcgcaggcggcggcttggcagggagaggcaggctgcagtgcacattgggtcaggcacacgcgaggggcagcccccgagggccgtcccagagtcccccgcgccgccggggtcctaacggggtgcaccgtcttccgccgcacgtggattcagcgcgatgcccaaatccaagcgcgacaagaaagaggtgggcgaagggggagtcgggaccctggggggagctccgtgggctggctacccagcctgcggtgagggcttcggggcggcgggggcgcagattggaacgccaggacatcctcgaggtgttccgctgcctcgctgcgagctggaatgggggcttcggggctgtaaaaccgccagaggtggctgacgcccggtcgggtctggggagcggagactcgttttgcctagtttcaggtgctcttgcaaggccaactgggtcgggaggcagctcctgaacaccgcccccggctatgcctgctgccgtttcggcccacttttcccaacttcggccctttctcatcttcctgcgctcccgccaccctggctgcctttcccttctttcagcacaggtttgttcccgtgtctggcgttgtgtgtctgcgg

SEQ ID NO: 416608 - DNA, 432 bp, Homo sapiens
tgatgcctgtgttagcgagattgtctcttactgtggaactttgtaatgtttagtgatacagtgatgggacctgtaagcttaacctgagcaaatgatctagactaaaatggagattaaaatggattgttactcgtggagaagagggaaaagaagaaaagcaactaattgtcgtgttctttatctcacaatctcacttcaagtatgtggagtaaatattaattctcagagtttaagtaacttttccaagatcacatagctagtgattgaggcagtgtttcaacgcaaggcctgcctctctttccaagagtccgtgttgcctcctaaagaatgaagcagcattctcagagataattcctctaccagctactccgatgggaatttggaacagttctattaactgctacgtgtgatttatacaaattagaagctatt

SEQ ID NO: 416609 - DNA, 361 bp, Homo sapiens
gtgagactccatctcaaacaacaacaaaacaacaacaacaaaatatacatatataatataatatagatatagatatatgttgtgacctaggcacctctcttgctaaccttaagcccagccctgcacccctgcatcatctgaaagatgactactcatctttcaccccactactcacaacagaaacctgggtagcctgagtccttccttgccctcaccctcagactcagtcctttggcaaatcctgtcaactctacctcccaaatagtatccaccatgtccctcagtcacagcccccacataggtccctgccactcaagctctctctggagcaaactactctcccatctgtcccacgcaacag

SEQ ID NO: 416610 - DNA, 114 bp, Homo sapiens
tgaggagggcgtcaggccagtgcaggggtccatctggggtctgggtgctgagtagaatgccccccccatcatccattcaacagagttcttcatggcccaggactggggcccatg

SEQ ID NO: 416611 - DNA, 840 bp, Homo sapiens
atcacactatatgagaatattaaaaatgttgaaataaatttataaataagtgcaaaaccactctatccttagggcaataatcagttgcattccacttaataactaatttttatttttatgatcaataataatgtacatcattttctgttttctggagaaaatgcccatttaaaacacttgtgtttttttcttataatctctcctccttgtgattatactaatctcaaagaaagaatattcttgattaaaaatattgctagtttaataaggtttggcctattgttgagataggtacatgagagtgttaattacaatatagacctcctcaagttggttttacaaatctagaaccatagtgcactttttaacagcttcattgagatatacttgacatatcatataatacttcatattcaaagcagtttttagtatattagtagagtatattttaatacatccatagagacacgctaccatcaccaatttcattacatttttatgaccttgagaagaaacagtgtatcctttagccatcacttctctatccctctatctctactttcatttcagctataaacatcactaatttacattctgtctcaacagatttccctattctagactttcatatgattgtaatcatatagtatgtgaccttttgtgactaaatgatttcacttatgtttttaaaattcattcatgttttggcatgtatcaatgtttccttttattccattgggtgaacataccacattttatttattcatttgtctgttgatggatatgtttgttttgcttttaccttttggttattataaataatatacctataaacatttg

SEQ ID NO: 416612 - DNA, 545 bp, Homo sapiens
  misc_feature (469)..(469): n is a, c, g, or t
  misc_feature (485)..(485): n is a, c, g, or t
  misc_feature (487)..(487): n is a, c, g, or t
  misc_feature (502)..(502): n is a, c, g, or t
  misc_feature (523)..(523): n is a, c, g, or t
gaacaaagaacagagaagctgaacatactgacatatttgttctccgttttaaagtttaacttcctcgttcgttatgcctccttgcccctagtttcattaaacaacccccttctagcctctaacacctgctttgtctttagtcattcttagtaacctgctctgtccttagtcatccttagacacctgctctgtaactgtctttcccgctgaaactactcaccctgccactccagctcatacccctgccctctttaaatagccaatctgaattggcttagagtgtgcagtccaaccctatccaatagggaaaagacacaacagtagggactagctgcgttagaaataagaacactttcccctcccttgtccggtgtgatcttgccattgctccatctgcaagaccactcttccatagaagtaaatttgccttgctgtaaaaacaaaaaaaaaaaaaaaaaaaaaaaaaaangggcggcccgttttanangatccaagcttacgnacgccgtgcatgcgacgtcanagctttttataggggcccccta

SEQ ID NO: 416613 - DNA, 1679 bp, Homo sapiens
  misc_feature (1603)..(1603): n is a, c, g, or t
  misc_feature (1619)..(1619): n is a, c, g, or t
  misc_feature (1621)..(1621): n is a, c, g, or t
  misc_feature (1636)..(1636): n is a, c, g, or t
  misc_feature (1657)..(1657): n is a, c, g, or t
agcgggcgtaacggttctgctcagctgcctaaaggttctgctcaggtgcctaacggttctgctcagctgcctaacggttttgcgcagccattttctcccgggagaggttggagtgtccaaaagcttggcccgactgagatttctagtcttgtcagggcggatgcagggactgaagaagggcgagggcgagcggcggggactggggaagggcgagcagcgggaggcacgggctctctctagcaggtggctgcagccatggagaggctctctgccgcccctgtcaagggccagacgggcccagagcgcccgagccccttcagtcagctggtctacaccaacaacgactcttacgtgattcaccatggggatctcaggaagatccacaaagctgcctcccggggccaagcctggaagctggagaggatgatgaagaagacgacaatggacctgaacataagagatgcgaagaagaggactgctctatactgggcctgtgccaatggccatgcagaagtagtaacacttctggtagatagaaagtgtcagcttgacgtccttgatggtgaaaacaggaccattctgatgaaggctctgcaatgccagagggaggcttgtgcaaatattctcatagattctggtgctgatccaaatattgtagatgtgtatggcaacacagctgtccattatgctgttaacagtgagaatttgtcagtggtggcaaaattgctgtcctgtggtacagacattaaagtgaagaacaaggctggccacacaccacttttattggccataaggaaaagaagtgagcaaattgtggaatttttactgacaaaaaaatgcaaatgcaaatggagttgataagtttaaatgcattcatcaacaacttttggaatataaacaaaagatatctaaaaattctcaaaatagtaatccagaaggaacatctgaaggaacacctgacgaggctgcacccttggcggaaagaacacctgacacggctgaaagcttggtggaaagaacacctgacgaataggatacagtgaattcctcttcaaagattttagcctgtaaacatcctttaaaattcaagaggggggaagattaagtacaatgagttctgagttcctcatcaaagaacaaatatgtcagtatgttcagcttctccgttctttgttctccgttttaaagtttaacttcctcgttcgttatgcctccttgcccctagtttcattaaacaacccccttctagcctctaacacctgctttgtctttagtcattcttagtaacctgctctgtccttagtcatccttagacacctgctctgtaactgtctttcccgctgaaactactcaccctgccactccagctcatacccctgccctctttaaatagccaatctgaattggcttagagtgtgcagtccaaccctatccaatagggaaaagacacaacagtagggactagctgcgttagaaataagaacactttcccctcccttgtccggtgtgatcttgccattgctccatctgcaagaccactcttccatagaagtaaatttgccttgctgtaaaaacaaaaaaaaaaaaaaaaaaaaaaaaaaangggcggcccgttttanangatccaagcttacgnacgccgtgcatgcgacgtcanagctttttataggggcccccta

SEQ ID NO: 416614 - DNA, 1364 bp, Homo sapiens
  misc_feature (1288)..(1288): n is a, c, g, or t
  misc_feature (1304)..(1304): n is a, c, g, or t
  misc_feature (1306)..(1306): n is a, c, g, or t
  misc_feature (1321)..(1321): n is a, c, g, or t
  misc_feature (1342)..(1342): n is a, c, g, or t
tgtaagtcaggttgaaataatgttacaggaagaaattagagatccattttgtctttgttaccagatctatatccctggccctttatatcctgtgtagcaccattttgtaggtagtggaaggtctcatcttattctataaaatcccatgtcatctttcccaagttgtagtgggttccaacttgtggttgtcccctcaagtgattcttttttcctaaaagtaaaaatctcccatgctacttacatctccacctcgagtttctaaaatattttcaaatgctgcatcaccatgaagccattcaatagacttcactaaatctcaagtaagttggttagatttaacagagctaagcctcatccatccctcatcagtcttcacgtataaaagtaaggatttgtgctggcttcagtggtacatatagtaaaattaagacaacgttgagaagatcagcatggtccccgcacaaggatgacatagaaatctgtaaggtgttgcatatttcttgcagtccccaaaaggacattttactactttctaactagctccaaggaaatggtcattcatcaacaacttttggaatataaacaaaagatatctaaaaattctcaaaatagtaatccagaaggaacatctgaaggaacacctgacgaggctgcacccttggcggaaagaacacctgacacggctgaaagcttggtggaaagaacacctgacgaataggatacagtgaattcctcttcaaagattttagcctgtaaacatcctttaaaattcaagaggggggaagattaagtacaatgagttctgagttcctcatcaaagaacaaatatgtcagtatgttcagcttctccgttctttgttctccgttttaaagtttaacttcctcgttcgttatgcctccttgcccctagtttcattaaacaacccccttctagcctctaacacctgctttgtctttagtcattcttagtaacctgctctgtccttagtcatccttagacacctgctctgtaactgtctttcccgctgaaactactcaccctgccactccagctcatacccctgccctctttaaatagccaatctgaattggcttagagtgtgcagtccaaccctatccaatagggaaaagacacaacagtagggactagctgcgttagaaataagaacactttcccctcccttgtccggtgtgatcttgccattgctccatctgcaagaccactcttccatagaagtaaatttgccttgctgtaaaaacaaaaaaaaaaaaaaaaaaaaaaaaaaangggcggcccgttttanangatccaagcttacgnacgccgtgcatgcgacgtcanagctttttataggggcccccta

SEQ ID NO: 416615 - DNA, 855 bp, Homo sapiens
  misc_feature (779)..(779): n is a, c, g, or t
  misc_feature (795)..(795): n is a, c, g, or t
  misc_feature (797)..(797): n is a, c, g, or t
  misc_feature (812)..(812): n is a, c, g, or t
  misc_feature (833)..(833): n is a, c, g, or t
tgttgcttgtggatttaatctctaagtgtttacatttaaaggctagcattcatcaacaacttttggaatataaacaaaagatatctaaaaattctcaaaatagtaatccagaaggaacatctgaaggaacacctgacgaggctgcacccttggcggaaagaacacctgacacggctgaaagcttggtggaaagaacacctgacgaataggatacagtgaattcctcttcaaagattttagcctgtaaacatcctttaaaattcaagaggggggaagattaagtacaatgagttctgagttcctcatcaaagaacaaatatgtcagtatgttcagcttctccgttctttgttctccgttttaaagtttaacttcctcgttcgttatgcctccttgcccctagtttcattaaacaacccccttctagcctctaacacctgctttgtctttagtcattcttagtaacctgctctgtccttagtcatccttagacacctgctctgtaactgtctttcccgctgaaactactcaccctgccactccagctcatacccctgccctctttaaatagccaatctgaattggcttagagtgtgcagtccaaccctatccaatagggaaaagacacaacagtagggactagctgcgttagaaataagaacactttcccctcccttgtccggtgtgatcttgccattgctccatctgcaagaccactcttccatagaagtaaatttgccttgctgtaaaaacaaaaaaaaaaaaaaaaaaaaaaaaaaangggcggcccgttttanangatccaagcttacgnacgccgtgcatgcgacgtcanagctttttataggggcccccta

SEQ ID NO: 416616 - DNA, 882 bp, Homo sapiens
  misc_feature (806)..(806): n is a, c, g, or t
  misc_feature (822)..(822): n is a, c, g, or t
  misc_feature (824)..(824): n is a, c, g, or t
  misc_feature (839)..(839): n is a, c, g, or t
  misc_feature (860)..(860): n is a, c, g, or t
tgtaataaatttggtaaatttttttatatcagtgttaaaatagtgattttatttatttcatttttatacatagcattcatcaacaacttttggaatataaacaaaagatatctaaaaattctcaaaatagtaatccagaaggaacatctgaaggaacacctgacgaggctgcacccttggcggaaagaacacctgacacggctgaaagcttggtggaaagaacacctgacgaataggatacagtgaattcctcttcaaagattttagcctgtaaacatcctttaaaattcaagaggggggaagattaagtacaatgagttctgagttcctcatcaaagaacaaatatgtcagtatgttcagcttctccgttctttgttctccgttttaaagtttaacttcctcgttcgttatgcctccttgcccctagtttcattaaacaacccccttctagcctctaacacctgctttgtctttagtcattcttagtaacctgctctgtccttagtcatccttagacacctgctctgtaactgtctttcccgctgaaactactcaccctgccactccagctcatacccctgccctctttaaatagccaatctgaattggcttagagtgtgcagtccaaccctatccaatagggaaaagacacaacagtagggactagctgcgttagaaataagaacactttcccctcccttgtccggtgtgatcttgccattgctccatctgcaagaccactcttccatagaagtaaatttgccttgctgtaaaaacaaaaaaaaaaaaaaaaaaaaaaaaaaangggcggcccgttttanangatccaagcttacgnacgccgtgcatgcgacgtcanagctttttataggggcccccta

SEQ ID NO: 416617 - DNA, 835 bp, Homo sapiens
  misc_feature (759)..(759): n is a, c, g, or t
  misc_feature (775)..(775): n is a, c, g, or t
  misc_feature (777)..(777): n is a, c, g, or t
  misc_feature (792)..(792): n is a, c, g, or t
  misc_feature (813)..(813): n is a, c, g, or t
gcaagctgaatgagtagaagttttccaggtaaagagtcagaaggatgatatttagcagaaggaaaatttaaccagactgtgtgtttggcagaaggaacatctgaaggaacacctgacgaggctgcacccttggcggaaagaacacctgacacggctgaaagcttggtggaaagaacacctgacgaataggatacagtgaattcctcttcaaagattttagcctgtaaacatcctttaaaattcaagaggggggaagattaagtacaatgagttctgagttcctcatcaaagaacaaatatgtcagtatgttcagcttctccgttctttgttctccgttttaaagtttaacttcctcgttcgttatgcctccttgcccctagtttcattaaacaacccccttctagcctctaacacctgctttgtctttagtcattcttagtaacctgctctgtccttagtcatccttagacacctgctctgtaactgtctttcccgctgaaactactcaccctgccactccagctcatacccctgccctctttaaatagccaatctgaattggcttagagtgtgcagtccaaccctatccaatagggaaaagacacaacagtagggactagctgcgttagaaataagaacactttcccctcccttgtccggtgtgatcttgccattgctccatctgcaagaccactcttccatagaagtaaatttgccttgctgtaaaaacaaaaaaaaaaaaaaaaaaaaaaaaaaangggcggcccgttttanangatccaagcttacgnacgccgtgcatgcgacgtcanagctttttataggggcccccta

SEQ ID NO: 416618 - DNA, 1053 bp, Homo sapiens
agcgggcgtaacggttctgctcagctgcctaaaggttctgctcaggtgcctaacggttctgctcagctgcctaacggttttgcgcagccattttctcccgggagaggttggagtgtccaaaagcttggcccgactgagatttctagtcttgtcagggcggatgcagggactgaagaagggcgagggcgagcggcggggactggggaagggcgagcagcgggaggcacgggctctctctagcaggtggctgcagccatggagaggctctctgccgcccctgtcaagggccagacgggcccagagcgcccgagccccttcagtcagctggtctacaccaacaacgactcttacgtgattcaccatggggatctcaggaagatccacaaagctgcctcccggggccaagcctggaagctggagaggatgatgaagaagacgacaatggacctgaacataagagatgcgaagaagaggactgctctatactgggcctgtgccaatggccatgcagaagtagtaacacttctggtagatagaaagtgtcagcttgacgtccttgatggtgaaaacaggaccattctgatgaaggctctgcaatgccagagggaggcttgtgcaaatattctcatagattctggtgctgatccaaatattgtagatgtgtatggcaacacagctgtccattatgctgttaacagtgagaatttgtcagtggtggcaaaattgctgtcctgtggtacagacattaaagtgaagaacaaggtagacattaaccaatgttattttcaaaatatttgaaatccatttgttttaacattaacatatgtaaattgttttatatttggaagctcaaacattcctatttttctatgaaaatagtttgacaaaacttaattgtctaggattttgctttaaatattaatatttttacaagaactattagtatggcttttctgtgcattatgataaatatttaaatttgttaaaggtaaaacattttcaaatattctttcccacccaagtttttttttttctttccagttagtgtaaaac

SEQ ID NO: 416619 - DNA, 847 bp, Homo sapiens
agcgggcgtaacggttctgctcagctgcctaaaggttctgctcaggtgcctaacggttctgctcagctgcctaacggttttgcgcagccattttctcccgggagaggttggagtgtccaaaagcttggcccgactgagatttctagtcttgtcagggcggatgcagggactgaagaagggcgagggcgagcggcggggactggggaagggcgagcagcgggaggcacgggctctctctagcaggtggctgcagccatggagaggctctctgccgcccctgtcaagggccagacgggcccagagcgcccgagccccttcagtcagctggtctacaccaacaacgactcttacgtgattcaccatggggatctcaggaagatccacaaagctgcctcccggggccaagcctggaagctggagaggatgatgaagaagacgacaatggacctgaacataagagatgcgaagaagaggctctgcaatgccagagggaggcttgtgcaaatattctcatagattctggtgctgatccaaatattgtagatgtgtatggcaacacagctgtccattatgctgttaacagtgagaatttgtcagtggtggcaaaattgctgtcctgtggtacagacattaaagtgaagaacaaggctggccacacaccacttttattggccataaggaaaagaagtgagcaaattgtggaatttttactgacaaaaaaatgcaaatgcaaatggagttgataagtttaaatgcacagccctcatgcttgccatatgtcatggatcatcagagatagttggcacggttcttcagcaaaatgttgacatctgtgctgaagctacat

SEQ ID NO: 416620 - DNA, 459 bp, Homo sapiens
ctgactttcttatttatgataagagaaagaaggaaataacaccgttgaaattgggatttataaaagatagtgtcatagtaattcccagtattatgatatatgactggatagagtccaagtgtgacaaacatatttaggttcttagaagtgtaacacatttcgaggcctttgttcagtttctgaatgttcagggggacatatgagacatggaacaattctctgtagttcaggactgtccttgcaagacatccagtgtacctggtcctgtccctgcccgttaaatgcctgcggcattactttccagagcctggccaataataatcaccacgccagccataactagttctttctcagtctgctatgatagatggcaccaggttattagattccttgggattccaaaatgcacgctgaccccaccctttatttgggtaggatgttcattctgtcttttaaggc

SEQ ID NO: 416621 - DNA, 228 bp, Homo sapiens
aatattttttactttgtgctctagccatcagtgagaaaagtatgtataatggtctctggtagatttttacagttttggtatatccacttgttcccaattttaggttttagccttttttttttaaacagtttttcacatgacaccattacttttttctttatcattctcagaatatgttaaaggataccagcatcgtaaagcttgaaacatactgtttaaaatattgat

SEQ ID NO: 416622 - DNA, 579 bp, Homo sapiens
tagccactaaaaaggctaatttttggggggaaaccgtctgctctgtcgcccagcctggaatgcagtggcacgatttcggcgcactgcagcctccgcctttctcaattctcgtgcctcagccgcgccatcatgcccggctaattttttgtattttagtagaggtggggttttgtcatgttggccaggctctaccaaaaatacaaaattagctgggcgtggtggcgcgcgcctgagcgagagactccatctccaaaaaaaaaaaaaaaagtaaagaggtcgaagctgtctaagcggacgctgcggtggactagcggtcaagcttgcctgcgagcggctcacctgagtcacccccaaaaccggcctccagcagcatacccgaccctgcagtaccccctcccacgcagcctgcgatcgggacgcctgcaggaggcgccagagtcttcgcgggggttgcaatcccgcgcaagggcccccggctcccaaggcatccgcaaccttccgatcccccgggaaggccctgcacgtctcggccgctccctgccagcagcccgccccgccactacactccgccgcggccgc

SEQ ID NO: 416623 - DNA, 606 bp, Homo sapiens
gaccacaggaaatttgaggttatcagagtttacatgtgaaccaaattatacctcccctctcctaagaagagctggcctccctctgtacaccctcttcctccctgcagaggcttgcatcgatctcggccaatccgggcactctgtaggccttttcctctttgctttgtcctcagtgtcctagccactcaccgtcacagcagtgttcttctgtggtcataaatcttttcttaacctcctcagccttttattctctaggtcaaataaccccagctccttttatcttttcttagtatggcctgtatcccaaccccttgattattttattgctctcctctggactgcctccaattcttcgcctcagagttcaaaactggccacactattcttaaaagtctgagcaaggccgggtgcgatggctcacgcctgtaatcttagcactttgggaggccgaggcgggcagatcacgaggtcaagagatcgagaccatcctggccaacaccaacatggtgaaaccctgtctctactaaaaatacaaaaataaattaactgggcatgatggcgtgcacctgtaatctcagctaagcgggaagctgaggcaggagtatc

SEQ ID NO: 416624 - DNA, 791 bp, Homo sapiens
taattagactgagtctcgctctgttgcccaggcaagtgtggtggtataatctcggctcactgcaacctccatctcctggtttcaagctattctcttgcctcagactcccacgtagctgggattacaggtgcgtgccaccacacccagctaattgtttgtgtttttagtaggaatggggtttcaccatgttggccaggctggtcttgaactcctgacctcaagtgatacacccacctcagcctctggaagtgctgggattacaggcgtgagcaagccactacacccagcccaggatgaattttaaaaactttaaaaatgttcacatagaaatgttatttttgctttattattttatgacacaaggtatctaagctctctctttactgaggacaaaaaatagtttaaaaaatatatacaatatattacccacatgttccatctttactaattacaaagagtttaattttagcattgttatcctgtaggaagtcatttcccattgttacagtgtatggcatgcatttatctttagcaaatatcctagtattttatatcttgtgtagaaatatgctttggtgtgattatgagatggtttcttgattaatactcttagaaaactgacttgagggcggttggtgggtgaggggagagaaagcattaggacaaatagctaacatatatggggcttaaaacctagataatgggttgataggtgcaacaaacgaccatggcacacatctacttatgtaacaaacctccacactctgcacctgtatcctggaactcaaaaa

SEQ ID NO: 416625 - DNA, 2415 bp, Homo sapiens
tggcgaattcggcacgagggagacaggaaggtggcaaaggaaggagcccatttgcatgacaataattgagccaagaatagaaagccacagggatgcaagggtgaggctggcggctgagctgggctaaacctcacaaatcagactacccagctctgctccgcaggggaagggagactgagccctgggccaggcttggcagagagggaagcgggaggacacgaccccagggcattgtgggaacactggccaggctggactttgccttcctcctcgtcctttagccgggagcctgtctttgcttgcctttgcctttgaggctctgtggctgtggggctgagtggcatcatggcggctcagaaagatctctgggacgccattgtgattggggcggggatccagggctgcttcactgcataccacctggccaaacacaggaagaggatcctcctgctggagcagttctttctaccacactcccgaggaagctcccatggacaaagccggataatccgaaaggcgtacctggaagacttttacacccggatgatgcatgagtgctatcagatatgggcccagctggagcacgaggctggaacccaattgcacaggcagactggattactgctgctgggaatgaaagagaatcaagaattaaagacaatccaggccaatctgtcgaggcagagggtagaacaccagtgtctttcatctgaggaactgaagcaacgtttcccaaatattcggttgcccaggggagaagtggggctcttggacaattccggaggagttatctatgcatataaggccctcagagccctgcaggatgcaattcgacagctaggaggcatagtgcgtgacggagagaaggtggtggagataaacccagggctactggtcacggtgaaaaccacctccaggagctaccaagctaagagcttggtcatcacagcaggtccttggaccaaccagctcctccgtcccctgggcattgagatgcctctccagaccctgcggatcaacgtgtgttactggcgagagatggttcctgggagctatggtgtgtcccaggcctttccgtgcttcctgtggctgggcttgtgtccccaccacatctacggactgcccacaggagagtacccagggctgatgaaggtcagctatcaccacggcaaccacgcagaccctgaggagcgggactgccccacagcacgcacagacatcggagacgtccagatcctgagcagctttgtcagagatcacttacctgatctgaagcccgagcctgctgtcattgagagctgcatgtacacgaatacccctgatgagcagttcattctcgatcgccacccaaagtatgacaacattgtcattggtgctggattctctgggcacgggttcaagctggcccctgtggtggggaagatcctgtatgaattaagcatgaaattaacaccatcttatgacttggcaccttttcgaatcagccgtttcccaagcctgggcaaagcccacctttgacctctggccagaagcctcccttctgtgcacaggagccagtttcacagatggagaagatgtctcagatgaagggagtgtccctgagatatcatccttttcttctgcctcgcctgaatcccccataaacaccagatgattgagtctaccttctttccttggcccgctccctttttcttctgcctcacttgaatcccccgtaaacaccagacgattgagtctaccttcttttcttggccacctccccattcacaactactttctcgctcccagaaggttgatcagatattctacaatcacagagtagcaaggacgtttgagatgggtatatcagtaagaagagggcacaagaactggctctggagaccaaagcagttgttaaaaattctctttgctgggggccgggtgtggtggctcacacctgtaatctcggcactttggggggctgagacaggcggatcacctgaggccaggaattcaagaccagcctggccaacatggtgaaaccctatctccactaaaaatacaaaattagctgggtgtggtggcgcatgcctgtaatcccagctacttgggagactgaggcaagagaatcacttgaacccgggaggtggaggtggcagtgagccgagattgcgccattgcactccagcctgggcaaaaagagtgagactctgtctcaaaaaaaaaacaaaacaaaaaaaacctctttgctggtatatttgaagagcttgggatggatttgactaaatctgccccgaggagggtgaacaaggtgatctcagagatcactactgctcttggagttccttctcctaaagctaaggccagcctccatcacaaatgcccataaaatctggctcgtctttgatgaacaataaatatttgttgaacaaataa

SEQ ID NO: 416626 - DNA, 2050 bp, Homo sapiens
tggcgaattcggcacgagggagacaggaaggtggcaaaggaaggagcccatttgcatgacaataattgagccaagaatagaaagccacagggatgcaagggtgaggctggcggctgagctgggctaaacctcacaaatcagactacccagctctgctccgcaggggaagggagactgagccctgggccaggcttggcagagagggaagcgggaggacacgaccccagggcattgtgggaacactggccaggctggactttgccttcctcctcgtcctttagccgggagcctgtctttgcttgcctttgcctttgaggctctgtggctgtggggctgagtggcatcatggcggctcagaaagatctctgggacgccattgtgattggggcggggatccagggctgcttcactgcataccacctggccaaacacaggaagaggatcctcctgctggagcagttctttctaccacactcccgaggaagctcccatggacaaagccggataatccgaaaggcgtacctggaagacttttacacccggatgatgcatgagtgctatcagatatgggcccagctggagcacgaggctggaacccaattgcacaggcagactggattactgctgctgggaatgaaagagaatcaagaattaaagacaatccaggccaatctgtcgaggcagagggtagaacaccagtgtctttcatctgaggaactgaagcaacgtttcccaaatattcggttgcccaggggagaagtggggctcttggacaattccggaggagttatctatgcatataaggccctcagagccctgcaggatgcaattcgacagctaggaggcatagtgcgtgacggagagaaggtggtggagataaacccagggctactggtcacggtgaaaaccacctccaggagctaccaagctaagagcttggtcatcacagcaggtccttggaccaaccagctcctccgtcccctgggcattgagatgcctctccagaccctgcggatcaacgtgtgttactggcgagagatggttcctgggagctatggtgtgtcccaggcctttccgtgcttcctgtggctgggcttgtgtccccaccacatctacggactgcccacaggagagtacccagggctgatgaaggtcagctatcaccacggcaaccacgcagaccctgaggagcgggactgccccacagcacgcacagacatcggagacgtccagatcctgagcagctttgtcagagatcacttacctgatctgaagcccgagcctgctgtcattgagagctgcatgtacacgaatacccctgatgagcagttcattctcgatcgccacccaaagtatgacaacattgtcattggtgctggattctctgggcacgggttcaagctggcccctgtggtggggaagatcctgtatgaattaagcatgaaattaacaccatcttatgacttggcaccttttcgaatcagccgtttcccaagcctgggcaaagcccacctttgacctctggccagaagcctcccttctgtgcacaggagccagtttcacagatggagaagatgtctcagatgaagggagtgtccctgagatatcatccttttcttctgcctcgcctgaatcccccataaacaccagatgattgagtctaccttctttccttggcccgctccctttttcttctgcctcacttgaatcccccgtaaacaccagacgattgagtctaccttcttttcttggccacctccccattcacaactactttctcgctcccagaaggttgatcagatattctacaatcacagagtagcaaggacgtttgagatgggtatatcagtaagaagagggcacaagaactggctctggagaccaaagcagttgttaaaaattctctttgctgggggccgggtgtggtggctcacacctgtaatctcggcactttggggggctgagacaggcggatcacttggaattaggatcctcccaaagtgctgggactacagacgagcttgagccaccattgcccggctgtctattt

SEQ ID NO: 416627 - DNA, 1699 bp, Homo sapiens
tggcgaattcggcacgagggagacaggaaggtggcaaaggaaggagcccatttgcatgacaataattgagccaagaatagaaagccacagggatgcaagggtgaggctggcggctgagctgggctaaacctcacaaatcagactacccagctctgctccgcaggggaagggagactgagccctgggccaggcttggcagagagggaagcgggaggacacgaccccagggcattgtgggaacactggccaggctggactttgccttcctcctcgtcctttagccgggagcctgtctttgcttgcctttgcctttgaggctctgtggctgtggggctgagtggcatcatggcggctcagaaagatctctgggacgccattgtgattggggcggggatccagggctgcttcactgcataccacctggccaaacacaggaagaggatcctcctgctggagcagttctttctaccacactcccgaggaagctcccatggacaaagccggataatccgaaaggcgtacctggaagacttttacacccggatgatgcatgagtgctatcagatatgggcccagctggagcacgaggctggaacccaattgcacaggcagactggattactgctgctgggaatgaaagagaatcaagaattaaagacaatccaggccaatctgtcgaggcagagggtagaacaccagtgtctttcatctgaggaactgaagcaacgtttcccaaatattcggttgcccaggggagaagtggggctcttggacaattccggaggagttatctatgcatataaggccctcagagccctgcaggatgcaattcgacagctaggaggcatagtgcgtgacggagagaaggtggtggagataaacccagggctactggtcacggtgaaaaccacctccaggagctaccaagctaagagcttggtcatcacagcaggtccttggaccaaccagctcctccgtcccctgggcattgagatgcctctccagaccctgcggatcaacgtgtgttactggcgagagatggttcctgggagctatggtgtgtcccaggcctttccgtgcttcctgtggctgggcttgtgtccccaccacatctacggactgcccacaggagagtacccagggctgatgaaggtcagctatcaccacggcaaccacgcagaccctgaggagcgggactgccccacagcacgcacagacatcggagacgtccagatcctgagcagctttgtcagagatcacttacctgatctgaagcccgagcctgctgtcattgagagctgcatgtacacgaatacccctgatgagcagttcattctcgatcgccacccaaagtatgacaacattgtcattggtgctggattctctgggcacgggttcaagctggcccctgtggtggggaagatcctgtatgaattaagcatgaaattaacaccatcttatgacttttgtgtgtattgccaacagttttgtatggtttacttccacatagctgacttctttcctatgctctttgaacagaaaagaagcccagaaatgtttctgcggatcagccaattgccggggttacctgggaggagaaaacagagtcagcatcagagcagcaggagggaaaatgaagaaggaacgatctcgtaagaaggattcagtaagtttgcatttttctttcaactttcacaat

SEQ ID NO: 416628 - DNA, 2363 bp, Homo sapiens
tggcgaattcggcacgagggagacaggaaggtggcaaaggaaggagcccatttgcatgacaataattgagccaagaatagaaagccacagggatgcaagggtgaggctggcggctgagctgggctaaacctcacaaatcagactacccagctctgctccgcaggggaagggagactgagccctgggccaggcttggcagagagggaagcgggaggacacgaccccagggcattgtgggaacactggccaggctggactttgccttcctcctcgtcctttagccgggagcctgtctttgcttgcctttgcctttgaggctctgtggctgtggggctgagtggcatcatggcggctcagaaagatctctgggacgccattgtgattggggcggggatccagggctgcttcactgcataccacctggccaaacacaggaagaggatcctcctgctggagcagttctttctaccacactcccgaggaagctcccatggacaaagccggataatccgaaaggcgtacctggaagacttttacacccggatgatgcatgagtgctatcagatatgggcccagctggagcacgaggctggaacccaattgcacaggcagactggattactgctgctgggaatgaaagagaatcaagaattaaagacaatccaggccaatctgtcgaggcagagggtagaacaccagtgtctttcatctgaggaactgaagcaacgtttcccaaatattcggttgcccaggggagaagtggggctcttggacaattccggaggagttatctatgcatataaggccctcagagccctgcaggatgcaattcgacagctaggaggcatagtgcgtgacggagagaaggtggtggagataaacccagggctactggtcacggtccttggaccaaccagctcctccgtcccctgggcattgagatgcctctccagaccctgcggatcaacgtgtgttactggcgagagatggttcctgggagctatggtgtgtcccaggcctttccgtgcttcctgtggctgggcttgtgtccccaccacatctacggactgcccacaggagagtacccagggctgatgaaggtcagctatcaccacggcaaccacgcagaccctgaggagcgggactgccccacagcacgcacagacatcggagacgtccagatcctgagcagctttgtcagagatcacttacctgatctgaagcccgagcctgctgtcattgagagctgcatgtacacgaatacccctgatgagcagttcattctcgatcgccacccaaagtatgacaacattgtcattggtgctggattctctgggcacgggttcaagctggcccctgtggtggggaagatcctgtatgaattaagcatgaaattaacaccatcttatgacttggcaccttttcgaatcagccgtttcccaagcctgggcaaagcccacctttgacctctggccagaagcctcccttctgtgcacaggagccagtttcacagatggagaagatgtctcagatgaagggagtgtccctgagatatcatccttttcttctgcctcgcctgaatcccccataaacaccagatgattgagtctaccttctttccttggcccgctccctttttcttctgcctcacttgaatcccccgtaaacaccagacgattgagtctaccttcttttcttggccacctccccattcacaactactttctcgctcccagaaggttgatcagatattctacaatcacagagtagcaaggacgtttgagatgggtatatcagtaagaagagggcacaagaactggctctggagaccaaagcagttgttaaaaattctctttgctgggggccgggtgtggtggctcacacctgtaatctcggcactttggggggctgagacaggcggatcacctgaggccaggaattcaagaccagcctggccaacatggtgaaaccctatctccactaaaaatacaaaattagctgggtgtggtggcgcatgcctgtaatcccagctacttgggagactgaggcaagagaatcacttgaacccgggaggtggaggtggcagtgagccgagattgcgccattgcactccagcctgggcaaaaagagtgagactctgtctcaaaaaaaaaacaaaacaaaaaaaacctctttgctggtatatttgaagagcttgggatggatttgactaaatctgccccgaggagggtgaacaaggtgatctcagagatcactactgctcttggagttccttctcctaaagctaaggccagcctccatcacaaatgcccataaaatctggctcgtctttgatgaacaataaatatttgttgaacaaataa

SEQ ID NO: 416629 - DNA, 2134 bp, Homo sapiens
agtcagcatcagtttccttgttcataaaatgaaggggctggagtagttgaactggaaggttttttctaattttgcttctttgtgaatctaagtgaggtgagattgcagcaggatggttgaagactagctaacaaaagaacttctggatgtgaacaacgttagcaaaaaggaagcctaattctttctaccacactcccgaggaagctcccatggacaaagccggataatccgaaaggcgtacctggaagacttttacacccggatgatgcatgagtgctatcagatatgggcccagctggagcacgaggctggaacccaattgcacaggcagactggattactgctgctgggaatgaaagagaatcaagaattaaagacaatccaggccaatctgtcgaggcagagggtagaacaccagtgtctttcatctgaggaactgaagcaacgtttcccaaatattcggttgcccaggggagaagtggggctcttggacaattccggaggagttatctatgcatataaggccctcagagccctgcaggatgcaattcgacagctaggaggcatagtgcgtgacggagagaaggtggtggagataaacccagggctactggtcacggtgaaaaccacctccaggagctaccaagctaagagcttggtcatcacagcaggtccttggaccaaccagctcctccgtcccctgggcattgagatgcctctccagaccctgcggatcaacgtgtgttactggcgagagatggttcctgggagctatggtgtgtcccaggcctttccgtgcttcctgtggctgggcttgtgtccccaccacatctacggactgcccacaggagagtacccagggctgatgaaggtcagctatcaccacggcaaccacgcagaccctgaggagcgggactgccccacagcacgcacagacatcggagacgtccagatcctgagcagctttgtcagagatcacttacctgatctgaagcccgagcctgctgtcattgagagctgcatgtacacgaatacccctgatgagcagttcattctcgatcgccacccaaagtatgacaacattgtcattggtgctggattctctgggcacgggttcaagctggcccctgtggtggggaagatcctgtatgaattaagcatgaaattaacaccatcttatgacttggcaccttttcgaatcagccgtttcccaagcctgggcaaagcccacctttgacctctggccagaagcctcccttctgtgcacaggagccagtttcacagatggagaagatgtctcagatgaagggagtgtccctgagatatcatccttttcttctgcctcgcctgaatcccccataaacaccagatgattgagtctaccttctttccttggcccgctccctttttcttctgcctcacttgaatcccccgtaaacaccagacgattgagtctaccttcttttcttggccacctccccattcacaactactttctcgctcccagaaggttgatcagatattctacaatcacagagtagcaaggacgtttgagatgggtatatcagtaagaagagggcacaagaactggctctggagaccaaagcagttgttaaaaattctctttgctgggggccgggtgtggtggctcacacctgtaatctcggcactttggggggctgagacaggcggatcacctgaggccaggaattcaagaccagcctggccaacatggtgaaaccctatctccactaaaaatacaaaattagctgggtgtggtggcgcatgcctgtaatcccagctacttgggagactgaggcaagagaatcacttgaacccgggaggtggaggtggcagtgagccgagattgcgccattgcactccagcctgggcaaaaagagtgagactctgtctcaaaaaaaaaacaaaacaaaaaaaacctctttgctggtatatttgaagagcttgggatggatttgactaaatctgccccgaggagggtgaacaaggtgatctcagagatcactactgctcttggagttccttctcctaaagctaaggccagcctccatcacaaatgcccataaaatctggctcgtctttgatgaacaataaatatttgttgaacaaataa

SEQ ID NO: 416630 - DNA, 2006 bp, Homo sapiens
gcaacaaccacagataccaaggggagtggcagcaggaaagagggagagggatccttgggtaggagactctcagaagcgcacaatcctcctctttgccaggaggacaggaatttggacgggctttggaactggacctggctctaaatctcagctctgacacgctcagctgtgtggtttggaacgagctgttgaacctctggcagactggattactgctgctgggaatgaaagagaatcaagaattaaagacaatccaggccaatctgtcgaggcagagggtagaacaccagtgtctttcatctgaggaactgaagcaacgtttcccaaatattcggttgcccaggggagaagtggggctcttggacaattccggaggagttatctatgcatataaggccctcagagccctgcaggatgcaattcgacagctaggaggcatagtgcgtgacggagagaaggtggtggagataaacccagggctactggtcacggtgaaaaccacctccaggagctaccaagctaagagcttggtcatcacagcaggtccttggaccaaccagctcctccgtcccctgggcattgagatgcctctccagaccctgcggatcaacgtgtgttactggcgagagatggttcctgggagctatggtgtgtcccaggcctttccgtgcttcctgtggctgggcttgtgtccccaccacatctacggactgcccacaggagagtacccagggctgatgaaggtcagctatcaccacggcaaccacgcagaccctgaggagcgggactgccccacagcacgcacagacatcggagacgtccagatcctgagcagctttgtcagagatcacttacctgatctgaagcccgagcctgctgtcattgagagctgcatgtacacgaatacccctgatgagcagttcattctcgatcgccacccaaagtatgacaacattgtcattggtgctggattctctgggcacgggttcaagctggcccctgtggtggggaagatcctgtatgaattaagcatgaaattaacaccatcttatgacttggcaccttttcgaatcagccgtttcccaagcctgggcaaagcccacctttgacctctggccagaagcctcccttctgtgcacaggagccagtttcacagatggagaagatgtctcagatgaagggagtgtccctgagatatcatccttttcttctgcctcgcctgaatcccccataaacaccagatgattgagtctaccttctttccttggcccgctccctttttcttctgcctcacttgaatcccccgtaaacaccagacgattgagtctaccttcttttcttggccacctccccattcacaactactttctcgctcccagaaggttgatcagatattctacaatcacagagtagcaaggacgtttgagatgggtatatcagtaagaagagggcacaagaactggctctggagaccaaagcagttgttaaaaattctctttgctgggggccgggtgtggtggctcacacctgtaatctcggcactttggggggctgagacaggcggatcacctgaggccaggaattcaagaccagcctggccaacatggtgaaaccctatctccactaaaaatacaaaattagctgggtgtggtggcgcatgcctgtaatcccagctacttgggagactgaggcaagagaatcacttgaacccgggaggtggaggtggcagtgagccgagattgcgccattgcactccagcctgggcaaaaagagtgagactctgtctcaaaaaaaaaacaaaacaaaaaaaacctctttgctggtatatttgaagagcttgggatggatttgactaaatctgccccgaggagggtgaacaaggtgatctcagagatcactactgctcttggagttccttctcctaaagctaaggccagcctccatcacaaatgcccataaaatctggctcgtctttgatgaacaataaatatttgttgaacaaataa

SEQ ID NO: 416631 - DNA, 2082 bp, Homo sapiens
agtcagcatcagtttccttgttcataaaatgaaggggctggagtagttgaactggaaggttttttctaattttgcttctttgtgaatctaagtgaggtgagattgcagcaggatggttgaagactagctaacaaaagaacttctggatgtgaacaacgttagcaaaaaggaagcctaattctttctaccacactcccgaggaagctcccatggacaaagccggataatccgaaaggcgtacctggaagacttttacacccggatgatgcatgagtgctatcagatatgggcccagctggagcacgaggctggaacccaattgcacaggcagactggattactgctgctgggaatgaaagagaatcaagaattaaagacaatccaggccaatctgtcgaggcagagggtagaacaccagtgtctttcatctgaggaactgaagcaacgtttcccaaatattcggttgcccaggggagaagtggggctcttggacaattccggaggagttatctatgcatataaggccctcagagccctgcaggatgcaattcgacagctaggaggcatagtgcgtgacggagagaaggtggtggagataaacccagggctactggtcacggtccttggaccaaccagctcctccgtcccctgggcattgagatgcctctccagaccctgcggatcaacgtgtgttactggcgagagatggttcctgggagctatggtgtgtcccaggcctttccgtgcttcctgtggctgggcttgtgtccccaccacatctacggactgcccacaggagagtacccagggctgatgaaggtcagctatcaccacggcaaccacgcagaccctgaggagcgggactgccccacagcacgcacagacatcggagacgtccagatcctgagcagctttgtcagagatcacttacctgatctgaagcccgagcctgctgtcattgagagctgcatgtacacgaatacccctgatgagcagttcattctcgatcgccacccaaagtatgacaacattgtcattggtgctggattctctgggcacgggttcaagctggcccctgtggtggggaagatcctgtatgaattaagcatgaaattaacaccatcttatgacttggcaccttttcgaatcagccgtttcccaagcctgggcaaagcccacctttgacctctggccagaagcctcccttctgtgcacaggagccagtttcacagatggagaagatgtctcagatgaagggagtgtccctgagatatcatccttttcttctgcctcgcctgaatcccccataaacaccagatgattgagtctaccttctttccttggcccgctccctttttcttctgcctcacttgaatcccccgtaaacaccagacgattgagtctaccttcttttcttggccacctccccattcacaactactttctcgctcccagaaggttgatcagatattctacaatcacagagtagcaaggacgtttgagatgggtatatcagtaagaagagggcacaagaactggctctggagaccaaagcagttgttaaaaattctctttgctgggggccgggtgtggtggctcacacctgtaatctcggcactttggggggctgagacaggcggatcacctgaggccaggaattcaagaccagcctggccaacatggtgaaaccctatctccactaaaaatacaaaattagctgggtgtggtggcgcatgcctgtaatcccagctacttgggagactgaggcaagagaatcacttgaacccgggaggtggaggtggcagtgagccgagattgcgccattgcactccagcctgggcaaaaagagtgagactctgtctcaaaaaaaaaacaaaacaaaaaaaacctctttgctggtatatttgaagagcttgggatggatttgactaaatctgccccgaggagggtgaacaaggtgatctcagagatcactactgctcttggagttccttctcctaaagctaaggccagcctccatcacaaatgcccataaaatctggctcgtctttgatgaacaataaatatttgttgaacaaataa

SEQ ID NO: 416632 - DNA, 2052 bp, Homo sapiens
agtcagcatcagtttccttgttcataaaatgaaggggctggagtagttgaactggaaggttttttctaattttgcttctttgtgaatctaagtgagttctttctaccacactcccgaggaagctcccatggacaaagccggataatccgaaaggcgtacctggaagacttttacacccggatgatgcatgagtgctatcagatatgggcccagctggagcacgaggctggaacccaattgcacaggcagactggattactgctgctgggaatgaaagagaatcaagaattaaagacaatccaggccaatctgtcgaggcagagggtagaacaccagtgtctttcatctgaggaactgaagcaacgtttcccaaatattcggttgcccaggggagaagtggggctcttggacaattccggaggagttatctatgcatataaggccctcagagccctgcaggatgcaattcgacagctaggaggcatagtgcgtgacggagagaaggtggtggagataaacccagggctactggtcacggtgaaaaccacctccaggagctaccaagctaagagcttggtcatcacagcaggtccttggaccaaccagctcctccgtcccctgggcattgagatgcctctccagaccctgcggatcaacgtgtgttactggcgagagatggttcctgggagctatggtgtgtcccaggcctttccgtgcttcctgtggctgggcttgtgtccccaccacatctacggactgcccacaggagagtacccagggctgatgaaggtcagctatcaccacggcaaccacgcagaccctgaggagcgggactgccccacagcacgcacagacatcggagacgtccagatcctgagcagctttgtcagagatcacttacctgatctgaagcccgagcctgctgtcattgagagctgcatgtacacgaatacccctgatgagcagttcattctcgatcgccacccaaagtatgacaacattgtcattggtgctggattctctgggcacgggttcaagctggcccctgtggtggggaagatcctgtatgaattaagcatgaaattaacaccatcttatgacttggcaccttttcgaatcagccgtttcccaagcctgggcaaagcccacctttgacctctggccagaagcctcccttctgtgcacaggagccagtttcacagatggagaagatgtctcagatgaagggagtgtccctgagatatcatccttttcttctgcctcgcctgaatcccccataaacaccagatgattgagtctaccttctttccttggcccgctccctttttcttctgcctcacttgaatcccccgtaaacaccagacgattgagtctaccttcttttcttggccacctccccattcacaactactttctcgctcccagaaggttgatcagatattctacaatcacagagtagcaaggacgtttgagatgggtatatcagtaagaagagggcacaagaactggctctggagaccaaagcagttgttaaaaattctctttgctgggggccgggtgtggtggctcacacctgtaatctcggcactttggggggctgagacaggcggatcacctgaggccaggaattcaagaccagcctggccaacatggtgaaaccctatctccactaaaaatacaaaattagctgggtgtggtggcgcatgcctgtaatcccagctacttgggagactgaggcaagagaatcacttgaacccgggaggtggaggtggcagtgagccgagattgcgccattgcactccagcctgggcaaaaagagtgagactctgtctcaaaaaaaaaacaaaacaaaaaaaacctctttgctggtatatttgaagagcttgggatggatttgactaaatctgccccgaggagggtgaacaaggtgatctcagagatcactactgctcttggagttccttctcctaaagctaaggccagcctccatcacaaatgcccataaaatctggctcgtctttgatgaacaataaatatttgttgaacaaataa

SEQ ID NO: 416633 - DNA, 2228 bp, Homo sapiens
gtgggaactgtagttccatgtgcgtgcgatgcactctatgggcccagctgtgctgctgtgttaacctggaggcattatggaacaggaggccctgagtacctgcggtggggtgaggccagagtgagctccagctcagatgatcagggagaaggctgcaccagtctcattggattcttcacaccagctggtgctgaaggttcaggggttgaagttgaaagaagcccgtggggtcctccataaaggactcaaggtgctggccttccaacagcctgttctttctaccacactcccgaggaagctcccatggacaaagccggataatccgaaaggcgtacctggaagacttttacacccggatgatgcatgagtgctatcagatatgggcccagctggagcacgaggctggaacccaattgcacaggcagactggattactgctgctgggaatgaaagagaatcaagaattaaagacaatccaggccaatctgtcgaggcagagggtagaacaccagtgtctttcatctgaggaactgaagcaacgtttcccaaatattcggttgcccaggggagaagtggggctcttggacaattccggaggagttatctatgcatataaggccctcagagccctgcaggatgcaattcgacagctaggaggcatagtgcgtgacggagagaaggtggtggagataaacccagggctactggtcacggtgaaaaccacctccaggagctaccaagctaagagcttggtcatcacagcaggtccttggaccaaccagctcctccgtcccctgggcattgagatgcctctccagaccctgcggatcaacgtgtgttactggcgagagatggttcctgggagctatggtgtgtcccaggcctttccgtgcttcctgtggctgggcttgtgtccccaccacatctacggactgcccacaggagagtacccagggctgatgaaggtcagctatcaccacggcaaccacgcagaccctgaggagcgggactgccccacagcacgcacagacatcggagacgtccagatcctgagcagctttgtcagagatcacttacctgatctgaagcccgagcctgctgtcattgagagctgcatgtacacgaatacccctgatgagcagttcattctcgatcgccacccaaagtatgacaacattgtcattggtgctggattctctgggcacgggttcaagctggcccctgtggtggggaagatcctgtatgaattaagcatgaaattaacaccatcttatgacttggcaccttttcgaatcagccgtttcccaagcctgggcaaagcccacctttgacctctggccagaagcctcccttctgtgcacaggagccagtttcacagatggagaagatgtctcagatgaagggagtgtccctgagatatcatccttttcttctgcctcgcctgaatcccccataaacaccagatgattgagtctaccttctttccttggcccgctccctttttcttctgcctcacttgaatcccccgtaaacaccagacgattgagtctaccttcttttcttggccacctccccattcacaactactttctcgctcccagaaggttgatcagatattctacaatcacagagtagcaaggacgtttgagatgggtatatcagtaagaagagggcacaagaactggctctggagaccaaagcagttgttaaaaattctctttgctgggggccgggtgtggtggctcacacctgtaatctcggcactttggggggctgagacaggcggatcacctgaggccaggaattcaagaccagcctggccaacatggtgaaaccctatctccactaaaaatacaaaattagctgggtgtggtggcgcatgcctgtaatcccagctacttgggagactgaggcaagagaatcacttgaacccgggaggtggaggtggcagtgagccgagattgcgccattgcactccagcctgggcaaaaagagtgagactctgtctcaaaaaaaaaacaaaacaaaaaaaacctctttgctggtatatttgaagagcttgggatggatttgactaaatctgccccgaggagggtgaacaaggtgatctcagagatcactactgctcttggagttccttctcctaaagctaaggccagcctccatcacaaatgcccataaaatctggctcgtctttgatgaacaataaatatttgttgaacaaataa

SEQ ID NO: 416634 - DNA, 2279 bp, Homo sapiens
tgaatcaccggcctggcagccccaagcctctgtggcctttgggttagatgaaggggcttgttttgtgcaccaggaccaaagttacctccctgactttgtgacctttgccctgtggttacttttgtctgctgcatctgggaggagatgaagttggagagcttgactgtagatggaggggccctaagcccagacccctgggctaccctgatgctgagagctggaatcttgctccattgcccaggctggagtacaatggtgtgattatagctcactgcagcctcaaactcctgggctcaagtgaccctcctgcctcagcctcccaattctttctaccacactcccgaggaagctcccatggacaaagccggataatccgaaaggcgtacctggaagacttttacacccggatgatgcatgagtgctatcagatatgggcccagctggagcacgaggctggaacccaattgcacaggcagactggattactgctgctgggaatgaaagagaatcaagaattaaagacaatccaggccaatctgtcgaggcagagggtagaacaccagtgtctttcatctgaggaactgaagcaacgtttcccaaatattcggttgcccaggggagaagtggggctcttggacaattccggaggagttatctatgcatataaggccctcagagccctgcaggatgcaattcgacagctaggaggcatagtgcgtgacggagagaaggtggtggagataaacccagggctactggtcacggtgaaaaccacctccaggagctaccaagctaagagcttggtcatcacagcaggtccttggaccaaccagctcctccgtcccctgggcattgagatgcctctccagaccctgcggatcaacgtgtgttactggcgagagatggttcctgggagctatggtgtgtcccaggcctttccgtgcttcctgtggctgggcttgtgtccccaccacatctacggactgcccacaggagagtacccagggctgatgaaggtcagctatcaccacggcaaccacgcagaccctgaggagcgggactgccccacagcacgcacagacatcggagacgtccagatcctgagcagctttgtcagagatcacttacctgatctgaagcccgagcctgctgtcattgagagctgcatgtacacgaatacccctgatgagcagttcattctcgatcgccacccaaagtatgacaacattgtcattggtgctggattctctgggcacgggttcaagctggcccctgtggtggggaagatcctgtatgaattaagcatgaaattaacaccatcttatgacttggcaccttttcgaatcagccgtttcccaagcctgggcaaagcccacctttgacctctggccagaagcctcccttctgtgcacaggagccagtttcacagatggagaagatgtctcagatgaagggagtgtccctgagatatcatccttttcttctgcctcgcctgaatcccccataaacaccagatgattgagtctaccttctttccttggcccgctccctttttcttctgcctcacttgaatcccccgtaaacaccagacgattgagtctaccttcttttcttggccacctccccattcacaactactttctcgctcccagaaggttgatcagatattctacaatcacagagtagcaaggacgtttgagatgggtatatcagtaagaagagggcacaagaactggctctggagaccaaagcagttgttaaaaattctctttgctgggggccgggtgtggtggctcacacctgtaatctcggcactttggggggctgagacaggcggatcacctgaggccaggaattcaagaccagcctggccaacatggtgaaaccctatctccactaaaaatacaaaattagctgggtgtggtggcgcatgcctgtaatcccagctacttgggagactgaggcaagagaatcacttgaacccgggaggtggaggtggcagtgagccgagattgcgccattgcactccagcctgggcaaaaagagtgagactctgtctcaaaaaaaaaacaaaacaaaaaaaacctctttgctggtatatttgaagagcttgggatggatttgactaaatctgccccgaggagggtgaacaaggtgatctcagagatcactactgctcttggagttccttctcctaaagctaaggccagcctccatcacaaatgcccataaaatctggctcgtctttgatgaacaataaatatttgttgaacaaataa

SEQ ID NO: 416635 - DNA, 1865 bp, Homo sapiens
gtggaaccatcagttgttcaacaggcacgttacagaggaggaatctgggcccagagaggcagactggattactgctgctgggaatgaaagagaatcaagaattaaagacaatccaggccaatctgtcgaggcagagggtagaacaccagtgtctttcatctgaggaactgaagcaacgtttcccaaatattcggttgcccaggggagaagtggggctcttggacaattccggaggagttatctatgcatataaggccctcagagccctgcaggatgcaattcgacagctaggaggcatagtgcgtgacggagagaaggtggtggagataaacccagggctactggtcacggtgaaaaccacctccaggagctaccaagctaagagcttggtcatcacagcaggtccttggaccaaccagctcctccgtcccctgggcattgagatgcctctccagaccctgcggatcaacgtgtgttactggcgagagatggttcctgggagctatggtgtgtcccaggcctttccgtgcttcctgtggctgggcttgtgtccccaccacatctacggactgcccacaggagagtacccagggctgatgaaggtcagctatcaccacggcaaccacgcagaccctgaggagcgggactgccccacagcacgcacagacatcggagacgtccagatcctgagcagctttgtcagagatcacttacctgatctgaagcccgagcctgctgtcattgagagctgcatgtacacgaatacccctgatgagcagttcattctcgatcgccacccaaagtatgacaacattgtcattggtgctggattctctgggcacgggttcaagctggcccctgtggtggggaagatcctgtatgaattaagcatgaaattaacaccatcttatgacttggcaccttttcgaatcagccgtttcccaagcctgggcaaagcccacctttgacctctggccagaagcctcccttctgtgcacaggagccagtttcacagatggagaagatgtctcagatgaagggagtgtccctgagatatcatccttttcttctgcctcgcctgaatcccccataaacaccagatgattgagtctaccttctttccttggcccgctccctttttcttctgcctcacttgaatcccccgtaaacaccagacgattgagtctaccttcttttcttggccacctccccattcacaactactttctcgctcccagaaggttgatcagatattctacaatcacagagtagcaaggacgtttgagatgggtatatcagtaagaagagggcacaagaactggctctggagaccaaagcagttgttaaaaattctctttgctgggggccgggtgtggtggctcacacctgtaatctcggcactttggggggctgagacaggcggatcacctgaggccaggaattcaagaccagcctggccaacatggtgaaaccctatctccactaaaaatacaaaattagctgggtgtggtggcgcatgcctgtaatcccagctacttgggagactgaggcaagagaatcacttgaacccgggaggtggaggtggcagtgagccgagattgcgccattgcactccagcctgggcaaaaagagtgagactctgtctcaaaaaaaaaacaaaacaaaaaaaacctctttgctggtatatttgaagagcttgggatggatttgactaaatctgccccgaggagggtgaacaaggtgatctcagagatcactactgctcttggagttccttctcctaaagctaaggccagcctccatcacaaatgcccataaaatctggctcgtctttgatgaacaataaatatttgttgaacaaataa

SEQ ID NO: 416636 - DNA, 727 bp, Homo sapiens
acatcagagttctactcctaataacaaatgtttaatttttaatgaaatattcaagcctcatgttttccaacagaacacaaatgtgacatgacgcttctccacggaagcaacaagtgtggggttaagcagggagaacgaaggtggtaacagaggccggtgtcaagggagtgtgaaggtttcagagagtgattcatcctaaatcctgcttctccctatatggcatgtaaacccttccagattcctggaaactacatcctggttgtttatctcagcaaggtgagccgtcgaccgaaggctcgtgaccactatctcgaaaagcaggctttaagcagtcttgaatttgaatctgagctcctcacttcttggcttaagcatgtctatgaatcttctgagaccatctcctcatctgcaaaattggggacaagacttgctgcttatcaatctttgcagtagagggaattctgtggcaggcagctatcagacttgaactgcaataccggctcttcctggctttccagcttgtgggccccgcctccataatcatgtgaaccatttccttaaaatcaatcaccccctgtgacttatttatatatatatgtatatgatctgtttctctggggaaccctgactaatacaatgatctaaaccaattttctgttttgattttagctttgtattacggcaatttgctatctatccaaaaatcaataaaatagaattaaaaact

SEQ ID NO: 416637 - DNA, 3915 bp, Homo sapiens
acgaccgggagggcggggcccgtctggggcgccggcgggtgcgtttgaatctggtccgagcgcgggaaacggcgggtccccgagcccaggttacaaaataaatgccatttgaacagtgccatctgtcatggaaaaacgtgagacgtttgtacaagccgtgtctaaggagctggttggagagtttttgcaatttgttcaacttgataaagaggcctctgatcctttcagcctaaatgaattactagatgaattatcaaggaaacagaaagaagaattatggcaaaggctgaagaatttattgacagatgtgttgttagaaagcccagtggatgggtggcaggtagtggaagcccagggtgaagacaatatggaaaccgaacatggctcaaaaatgagaaaaagcatagaaataatttatgcaattacatctgtgattcttgcttctgtgtctgtaataaatgaaagtgagaactacgaagccctactggaatgtgttattatattaaatggtattttatatgcattacctgagtctgaacgaaaactacagagttctattcaggatttgtgtgttacctggtgggagaaaggcctgcctgccaagggaagacacaggaaagacagcctttgtcatgttactaaggaggagtctggagactaagacaggtgcagacgtatgtcggctttggcgtatccatcaagctttatattgctttgattatgatttggaggaaagtggagaaattaaagatatgttacttgagtgcttcataaatattaattatatcaagaaagaagagggaagaagatttcttagttgtctcttcaactggaatatcaacttcatcaaaatgatccacgggaccattaaaaaccagttacagggattacaaaagtctttgatggtatacattgcagaaatttatttcagagcttggaaaaaggcttcagggaaaatactggaggcgattgaaaatgattgcatccaggacttcatgttccacgggatacaccttccgaggaggtctccagtgcattccaaagtgcgggaggttctgagttactttcaccatcaaaagaaagttcggcagggagtggaagagatgctttatagattatataagcccatcctttggagaggattaaaggccagaaactctgaagttcgatcaaatgctgcattgttgtttgttgaagcatttcctattagggatccaaaccttcatgctattgaaatggatagtgaaatccagaaacagtttgaagagctctatagccttttagaagatccttacccgatggtccgttccacagggatccttggtgtttgtaaaataacttctaagtactgggaaatgatgcccccgaccattcttattgacctcctgaagaaggtgactggggaactggcatttgacacgagctcagctgatgttcgttgttctgtctttaagtgtctgccaatgattttggacaacaaactgagccacccattgttagagcagctccttccagctctcagatacagtctccacgacaattcggagaaagtgagggtagcttttgtggacatgctgttgaagatcaaagctgtgagggctgctaagttttggaaaatatgtcccatggagcacattctggttcgtctggaaactgattctcgacctgtgtctcggcgcctggtgagcctcatctttaattctttcctgcctgtgaatcagccggaggaggtctggtgcgagcgctgtgtcaccctggtgcagatgaaccacgccgctgccaggaggttctatcagtacgcccacgaacacaccgcctgcaccaacatagcaaagctgattcacgttattcgtcattgcttaaatgcctgtatccagagggcagtgagagagcctccagaggacgaggaggaagaggacggaagggagaaggagaatgtgactgttctggacaaaacactgtcagtaaacgatgttgcatgcatggcaggtttactagaaatcattgtgattctctggaaaagtattgacagaagtatggaaaataataaagaggccaaactttacacgattaacaagtttgcctctgtgcttccagagtatctgaaagtatttaaggatgatcgctgcaagatccctttattcatgctaatgtcctttatgccggcctctgctgtccccccattcagctgtggtgtgatttccacgctgagaagccgggaggagggcgctgtggacaagagctactgcactttgttggattgcctctgctcctgggggcaggtggggcacattctggagcttgttgacaactggctgcccacagagcatgcccaggccaagagcaacacagcttctaaaggtagggtgcagatccatgacacacgcccagtcaaacctgaattggcattggtctacattgagtatctgctgactcatccaaagaaccgcgagtgcttgctctctgctcctcggaagaaacttaaccatcttttgaaagcccttgaaacgtcaaaggcagatctggagtcacttctgcagacaccgggtgggaagcctcgtggcttcagtgaagcagctgccccgcgagcctttggtctccactgtcgcctgagcatccatcttcagcacaagttctgctcagaaggaaaggtgtatttgtccatgttggaagacactggcttttggttagaaagcaaaattttatcttttattcaagatcaagaagaagactacctgaagcttcatagggtcatttatcagcaaattatccagacctacctgactgtgtgtaaagatgttgttatggtaggccttggtgaccatcagtttcagatgcaactcttacagcggagtcttggaatcatgcaaacagtgaagggatttttttatgtttcattacttcttgacattctgaaagagataactggaagttccttgattcagaaaacagattcagatgaagaagttgcaatgctgttggacacagtccagaaagtatttcagaaaatgttggaatgtattgcacggagcttcaggaagcagccggaagaaggcctgcggctgctttattctgttcagaggcctcttcatgagttcattactgctgttcagtctcggcacacagacacccctgtgcaccggggtgtactttctactctgatcgctgggcctgtggttgagataagtcaccagctacggaaggtttctgacgtagaagagcttacccctccagagcatctttctgatcttccaccattttcaaggtgtttaataggaataataataaagtcttcgaatgtggtcaggtcatttttggatgaattaaaggcatgtgtggcttctaatgatattgaaggcattgtgtgcctcacggctgctgtgcatattatcctggttattaatgcaggtaaacataaaagctcaaaagtgagggaggttgcagccactgttcacagaaaactaaagacattcatggaaattactttggaagaggatagcattgaaagatttctctatgaatcatcatcaagaactctgggagaacttttgaattcataaccaagccaacatctccagacatgtaaaaatagggaaaagtgattcaaattgaaatgcctgtgtattttcctattgtttttaatgttaataacccatataatagggaaagggtgggatttttttgtgggaatgtgggaaggtgggggttatggaggagataactcaaaacttcttcaattttgcctagtgcctgcgtaaataatatatttaatataaaggactccaggtatgaatggtgtagaaatccatgattccaagaaaaaacacttttctagcaaacctggttgtttttaaaatgacttttatatatgtaatattgcttggaaactatgagtaataaagcaatgacaacatc

SEQ ID NO: 416638 - DNA, 3981 bp, Homo sapiens
taccagacctcctgtgcgaagagtaacctgctcttcggactgataactggatggaatggcctttagaaagggagcatcttcagaatctgcagctgggatcagattgttcttttgttgaatcaactcagctctgccgagccagcatcttgctaagggttacaaaataaatgccatttgaacagtgccatctgtcatggaaaaacgtgagacgtttgtacaagccgtgtctaaggagctggttggagagtttttgcaatttgttcaacttgataaagaggcctctgatcctttcagcctaaatgaattactagatgaattatcaaggaaacagaaagaagaattatggcaaaggctgaagaatttattgacagatgtgttgttagaaagcccagtggatgggtggcaggtagtggaagcccagggtgaagacaatatggaaaccgaacatggctcaaaaatgagaaaaagcatagaaataatttatgcaattacatctgtgattcttgcttctgtgtctgtaataaatgaaagtgagaactacgaagccctactggaatgtgttattatattaaatggtattttatatgcattacctgagtctgaacgaaaactacagagttctattcaggatttgtgtgttacctggtgggagaaaggcctgcctgccaagggaagacacaggaaagacagcctttgtcatgttactaaggaggagtctggagactaagacaggtgcagacgtatgtcggctttggcgtatccatcaagctttatattgctttgattatgatttggaggaaagtggagaaattaaagatatgttacttgagtgcttcataaatattaattatatcaagaaagaagagggaagaagatttcttagttgtctcttcaactggaatatcaacttcatcaaaatgatccacgggaccattaaaaaccagttacagggattacaaaagtctttgatggtatacattgcagaaatttatttcagagcttggaaaaaggcttcagggaaaatactggaggcgattgaaaatgattgcatccaggacttcatgttccacgggatacaccttccgaggaggtctccagtgcattccaaagtgcgggaggttctgagttactttcaccatcaaaagaaagttcggcagggagtggaagagatgctttatagattatataagcccatcctttggagaggattaaaggccagaaactctgaagttcgatcaaatgctgcattgttgtttgttgaagcatttcctattagggatccaaaccttcatgctattgaaatggatagtgaaatccagaaacagtttgaagagctctatagccttttagaagatccttacccgatggtccgttccacagggatccttggtgtttgtaaaataacttctaagtactgggaaatgatgcccccgaccattcttattgacctcctgaagaaggtgactggggaactggcatttgacacgagctcagctgatgttcgttgttctgtctttaagtgtctgccaatgattttggacaacaaactgagccacccattgttagagcagctccttccagctctcagatacagtctccacgacaattcggagaaagtgagggtagcttttgtggacatgctgttgaagatcaaagctgtgagggctgctaagttttggaaaatatgtcccatggagcacattctggttcgtctggaaactgattctcgacctgtgtctcggcgcctggtgagcctcatctttaattctttcctgcctgtgaatcagccggaggaggtctggtgcgagcgctgtgtcaccctggtgcagatgaaccacgccgctgccaggaggttctatcagtacgcccacgaacacaccgcctgcaccaacatagcaaagctgattcacgttattcgtcattgcttaaatgcctgtatccagagggcagtgagagagcctccagaggacgaggaggaagaggacggaagggagaaggagaatgtgactgttctggacaaaacactgtcagtaaacgatgttgcatgcatggcaggtttactagaaatcattgtgattctctggaaaagtattgacagaagtatggaaaataataaagaggccaaactttacacgattaacaagtttgcctctgtgcttccagagtatctgaaagtatttaaggatgatcgctgcaagatccctttattcatgctaatgtcctttatgccggcctctgctgtccccccattcagctgtggtgtgatttccacgctgagaagccgggaggagggcgctgtggacaagagctactgcactttgttggattgcctctgctcctgggggcaggtggggcacattctggagcttgttgacaactggctgcccacagagcatgcccaggccaagagcaacacagcttctaaaggtagggtgcagatccatgacacacgcccagtcaaacctgaattggcattggtctacattgagtatctgctgactcatccaaagaaccgcgagtgcttgctctctgctcctcggaagaaacttaaccatcttttgaaagcccttgaaacgtcaaaggcagatctggagtcacttctgcagacaccgggtgggaagcctcgtggcttcagtgaagcagctgccccgcgagcctttggtctccactgtcgcctgagcatccatcttcagcacaagttctgctcagaaggaaaggtgtatttgtccatgttggaagacactggcttttggttagaaagcaaaattttatcttttattcaagatcaagaagaagactacctgaagcttcatagggtcatttatcagcaaattatccagacctacctgactgtgtgtaaagatgttgttatggtaggccttggtgaccatcagtttcagatgcaactcttacagcggagtcttggaatcatgcaaacagtgaagggatttttttatgtttcattacttcttgacattctgaaagagataactggaagttccttgattcagaaaacagattcagatgaagaagttgcaatgctgttggacacagtccagaaagtatttcagaaaatgttggaatgtattgcacggagcttcaggaagcagccggaagaaggcctgcggctgctttattctgttcagaggcctcttcatgagttcattactgctgttcagtctcggcacacagacacccctgtgcaccggggtgtactttctactctgatcgctgggcctgtggttgagataagtcaccagctacggaaggtttctgacgtagaagagcttacccctccagagcatctttctgatcttccaccattttcaaggtgtttaataggaataataataaagtcttcgaatgtggtcaggtcatttttggatgaattaaaggcatgtgtggcttctaatgatattgaaggcattgtgtgcctcacggctgctgtgcatattatcctggttattaatgcaggtaaacataaaagctcaaaagtgagggaggttgcagccactgttcacagaaaactaaagacattcatggaaattactttggaagaggatagcattgaaagatttctctatgaatcatcatcaagaactctgggagaacttttgaattcataaccaagccaacatctccagacatgtaaaaatagggaaaagtgattcaaattgaaatgcctgtgtattttcctattgtttttaatgttaataacccatataatagggaaagggtgggatttttttgtgggaatgtgggaaggtgggggttatggaggagataactcaaaacttcttcaattttgcctagtgcctgcgtaaataatatatttaatataaaggactccaggtatgaatggtgtagaaatccatgattccaagaaaaaacacttttctagcaaacctggttgtttttaaaatgacttttatatatgtaatattgcttggaaactatgagtaataaagcaatgacaacatc

SEQ ID NO: 416639 - DNA, 4220 bp, Homo sapiens
gaattcaaaggaatcctgaataccctacgtccaggtttgccagtttttaccacttgccacattttctttatcatcctttgtatttacatttttttgaatcacttgagtcagttgtaggcattgtgcctctttatctctaaacatttcagttcgtatttttctaaaagatattctgttatataatcacattaaaatcctcaaaatcaggaaatttaacattgtggataatcctgttaaataaccctctgcagcctatgtcctctcctcttgaatctggattgggcttgtgctgctttgacggacggaatattgaggaagtggccttcagaaagtttggcagcttctacttcctctcggagcccgtggttgtcatgtaagaagtgcaggatcaccctctgctggagagagagaccacacacaaaggctggaggatgagactgcagagggagacctcattagtgggcaccaaagtgccagacatccaacacccagctgccaccttaagcacagaaagaggcctctgatcctttcagcctaaatgaattactagatgaattatcaaggaaacagaaagaagaattatggcaaaggctgaagaatttattgacagatgtgttgttagaaagcccagtggatgggtggcaggtagtggaagcccagggtgaagacaatatggaaaccgaacatggctcaaaaatgagaaaaagcatagaaataatttatgcaattacatctgtgattcttgcttctgtgtctgtaataaatgaaagtgagaactacgaagccctactggaatgtgttattatattaaatggtattttatatgcattacctgagtctgaacgaaaactacagagttctattcaggatttgtgtgttacctggtgggagaaaggcctgcctgccaagggaagacacaggaaagacagcctttgtcatgttactaaggaggagtctggagactaagacaggtgcagacgtatgtcggctttggcgtatccatcaagctttatattgctttgattatgatttggaggaaagtggagaaattaaagatatgttacttgagtgcttcataaatattaattatatcaagaaagaagagggaagaagatttcttagttgtctcttcaactggaatatcaacttcatcaaaatgatccacgggaccattaaaaaccagttacagggattacaaaagtctttgatggtatacattgcagaaatttatttcagagcttggaaaaaggcttcagggaaaatactggaggcgattgaaaatgattgcatccaggacttcatgttccacgggatacaccttccgaggaggtctccagtgcattccaaagtgcgggaggttctgagttactttcaccatcaaaagaaagttcggcagggagtggaagagatgctttatagattatataagcccatcctttggagaggattaaaggccagaaactctgaagttcgatcaaatgctgcattgttgtttgttgaagcatttcctattagggatccaaaccttcatgctattgaaatggatagtgaaatccagaaacagtttgaagagctctatagccttttagaagatccttacccgatggtccgttccacagggatccttggtgtttgtaaaataacttctaagtactgggaaatgatgcccccgaccattcttattgacctcctgaagaaggtgactggggaactggcatttgacacgagctcagctgatgttcgttgttctgtctttaagtgtctgccaatgattttggacaacaaactgagccacccattgttagagcagctccttccagctctcagatacagtctccacgacaattcggagaaagtgagggtagcttttgtggacatgctgttgaagatcaaagctgtgagggctgctaagttttggaaaatatgtcccatggagcacattctggttcgtctggaaactgattctcgacctgtgtctcggcgcctggtgagcctcatctttaattctttcctgcctgtgaatcagccggaggaggtctggtgcgagcgctgtgtcaccctggtgcagatgaaccacgccgctgccaggaggttctatcagtacgcccacgaacacaccgcctgcaccaacatagcaaagctgattcacgttattcgtcattgcttaaatgcctgtatccagagggcagtgagagagcctccagaggacgaggaggaagaggacggaagggagaaggagaatgtgactgttctggacaaaacactgtcagtaaacgatgttgcatgcatggcaggtttactagaaatcattgtgattctctggaaaagtattgacagaagtatggaaaataataaagaggccaaactttacacgattaacaagtttgcctctgtgcttccagagtatctgaaagtatttaaggatgatcgctgcaagatccctttattcatgctaatgtcctttatgccggcctctgctgtccccccattcagctgtggtgtgatttccacgctgagaagccgggaggagggcgctgtggacaagagctactgcactttgttggattgcctctgctcctgggggcaggtggggcacattctggagcttgttgacaactggctgcccacagagcatgcccaggccaagagcaacacagcttctaaaggtagggtgcagatccatgacacacgcccagtcaaacctgaattggcattggtctacattgagtatctgctgactcatccaaagaaccgcgagtgcttgctctctgctcctcggaagaaacttaaccatcttttgaaagcccttgaaacgtcaaaggcagatctggagtcacttctgcagacaccgggtgggaagcctcgtggcttcagtgaagcagctgccccgcgagcctttggtctccactgtcgcctgagcatccatcttcagcacaagttctgctcagaaggaaaggtgtatttgtccatgttggaagacactggcttttggttagaaagcaaaattttatcttttattcaagatcaagaagaagactacctgaagcttcatagggtcatttatcagcaaattatccagacctacctgactgtgtgtaaagatgttgttatggtaggccttggtgaccatcagtttcagatgcaactcttacagcggagtcttggaatcatgcaaacagtgaagggatttttttatgtttcattacttcttgacattctgaaagagataactggaagttccttgattcagaaaacagattcagatgaagaagttgcaatgctgttggacacagtccagaaagtatttcagaaaatgttggaatgtattgcacggagcttcaggaagcagccggaagaaggcctgcggctgctttattctgttcagaggcctcttcatgagttcattactgctgttcagtctcggcacacagacacccctgtgcaccggggtgtactttctactctgatcgctgggcctgtggttgagataagtcaccagctacggaaggtttctgacgtagaagagcttacccctccagagcatctttctgatcttccaccattttcaaggtgtttaataggaataataataaagtcttcgaatgtggtcaggtcatttttggatgaattaaaggcatgtgtggcttctaatgatattgaaggcattgtgtgcctcacggctgctgtgcatattatcctggttattaatgcaggtaaacataaaagctcaaaagtgagggaggttgcagccactgttcacagaaaactaaagacattcatggaaattactttggaagaggatagcattgaaagatttctctatgaatcatcatcaagaactctgggagaacttttgaattcataaccaagccaacatctccagacatgtaaaaatagggaaaagtgattcaaattgaaatgcctgtgtattttcctattgtttttaatgttaataacccatataatagggaaagggtgggatttttttgtgggaatgtgggaaggtgggggttatggaggagataactcaaaacttcttcaattttgcctagtgcctgcgtaaataatatatttaatataaaggactccaggtatgaatggtgtagaaatccatgattccaagaaaaaacacttttctagcaaacctggttgtttttaaaatgacttttatatatgtaatattgcttggaaactatgagtaataaagcaatgacaacatc

SEQ ID NO: 416640 - DNA, 3649 bp, Homo sapiens
acgaccgggagggcggggcccgtctggggcgccggcgggtgcgtttgaatctggtccgagcgcgggaaacggcgggtccccgagcccaggttacaaaataaatgccatttgaacagtgccatctgtcatggaaaaacgtgagacgtttgtacaagccgtgtctaaggagctggttggagagtttttgcaatttgttcaacttgataaagaggcctctgatcctttcagcctaaatgaattactagatgaattatcaaggaaacagaaagaagaattatggcaaaggctgaagaatttattgacagatgtgttgttagaaagcccagtggatgggtggcaggtagtggaagcccagggtgaagacaatatggaaaccgaacatggctcaaaaatgagaaaaagcatagaaataatttatgcaattacatctgtgattcttgcttctgtgtctgtaataaatgaaagtgagaactacgaagccctactggaatgtgttattatattaaatggtattttatatgcattacctgagtctgaacgaaaactacagagttctattcaggatttgtgtgttacctggtgggagaaaggcctgcctgccaagggaagacacaggaaagacagcctttgtcatgttactaaggaggagtctggagactaagacaggtgcagacgtatgtcggctttggcgtatccatcaagctttatattgctttgattatgatttggaggaaagtggagaaattaaagatatgttacttgagtgcttcataaatattaattatatcaagaaagaagagggaagaagatttcttagttgtctcttcaactggaatatcaacttcatcaaaatgatccacgggaccattaaaaaccagttacagggattacaaaagtctttgatggtatacattgcagaaatttatttcagagcttggaaaaaggcttcagggaaaatactggaggcgattgaaaatgattgcatccaggacttcatgttccacgggatacaccttccgaggaggtctccagtgcattccaaagtgcgggaggttctgagttactttcaccatcaaaagaaagttcggcagggagtggaagagatgctttatagattatataagcccatcctttggagaggattaaaggccagaaactctgaagttcgatcaaatgctgcattgttgtttgttgaagcatttcctattagggatccaaaccttcatgctattgaaatggatagtgaaatccagaaacagtttgaagagctctatagccttttagaagatccttacccgatggtccgttccacagggatccttggtgtttgtaaaataacttctaagtactgggaaatgatgcccccgaccattcttattgacctcctgaagaaggtgactggggaactggcatttgacacgagctcagctgatgttcgttgttctgtctttaagtgtctgccaatgattttggacaacaaactgagccacccattgttagagcagctccttccagctctcagatacagtctccacgacaattcggagaaagtgagggtagcttttgtggacatgctgttgaagatcaaagctgtgagggctgctaagttttggaaaatatgtcccatggagcacattctggttcgtctggaaactgattctcgacctgtgtctcggcgcctggtgagcctcatctttaattctttcctgcctgtgaatcagccggaggaggtctggtgcgagcgctgtgtcaccctggtgcagatgaaccacgccgctgccaggaggttctatcagtacgcccacgaacacaccgcctgcaccaacatagcaaagctgattcacgttattcgtcattgcttaaatgcctgtatccagagggcagtgagagagcctccagaggacgaggaggaagaggacggaagggagaaggagaatgtgactgttctggacaaaacactgtcagtaaacgatgttgcatgcatggcaggtttactagaaatcattgtgattctctggaaaagtattgacagaagtatggaaaataataaagaggccaaactttacacgattaacaagtttgcctctgtgcttccagagtatctgaaagtatttaaggatgatcgctgcaagatccctttattcatgctaatgtcctttatgccggcctctgctgtccccccattcagctgtggtgtgatttccacgctgagaagccgggaggagggcgctgtggacaagagctactgcactttgttggattgcctctgctcctgggggcaggtggggcacattctggagcttgttgacaactggctgcccacagagcatgcccaggccaagagcaacacagcttctaaaggtagggtgcagatccatgacacacgcccagtcaaacctgaattggcattggtctacattgagtatctgctgactcatccaaagaaccgcgagtgcttgctctctgctcctcggaagaaacttaaccatcttttgaaagcccttgaaacgtcaaaggcagatctggagtcacttctgcagacaccgggtgggaagcctcgtggcttcagtgaagcagctgccccgcgagcctttggtctccactgtcgcctgagcatccatcttcagcacaagttctgctcagaaggaaaggtgtatttgtccatgttggaagacactggcttttggttagaaagcaaaattttatcttttattcaagatcaagaagaagactacctgaagcttcatagggtcatttatcagcaaattatccagacctacctgactgtgtgtaaagatgttgttatggtaggccttggtgaccatcagtttcagatgcaactcttacagcggagtcttggaatcatgcaaacagtgaagggatttttttatgtttcattacttcttgacattctgaaagagataactggaagttccttgattcagaaaacagattcagatgaagaagttgcaatgctgttggacacagtccagaaagtatttcagaaaatgttggaatgtattgcacggagcttcaggaagcagccggaagaaggcctgcgggtttctgacgtagaagagcttacccctccagagcatctttctgatcttccaccattttcaaggtgtttaataggaataataataaagtcttcgaatgtggtcaggtcatttttggatgaattaaaggcatgtgtggcttctaatgatattgaaggcattgtgtgcctcacggctgctgtgcatattatcctggttattaatgcaggtaaacataaaagctcaaaagtgagggaggttgcagccactgttcacagaaaactaaagacattcatggaaattactttggaagaggatagcattgaaagatttctctatgaatcatcatcaagaactctgggagaacttttgaattcataaccaagccaacatctccagacatgtaaaaatagggaaaagtgattcaaattgaaatgcctgtgtattttcctattgtttttaatgttaataacccatataatagggaaagggtgggatttttttgtgggaatgtgggaaggtgggggttatggaggagataactcaaaacttcttcaattttgcctagtgcctgcgtaaataatatatttaatataaaggactccaggtat

SEQ ID NO: 416641 - DNA, 3741 bp, Homo sapiens
acgaccgggagggcggggcccgtctggggcgccggcgggtgcgtttgaatctggtccgagcgcgggaaacggcgggtccccgagcccaggttacaaaataaatgccatttgaacagtgccatctgtcatggaaaaacgtgagacgtttgtacaagccgtgtctaaggagctggttggagagtttttgcaatttgttcaacttgataaagaggcctctgatcctttcagcctaaatgaattactagatgaattatcaaggaaacagaaagaagaattatggcaaaggctgaagaatttattgacagatgtgttgttagaaagcccagtggatgggtggcaggtagtggaagcccagggtgaagacaatatggaaaccgaacatggctcaaaaatgagaaaaagcatagaaataatttatgcaattacatctgtgattcttgcttctgtgtctgtaataaatgaaagtgagaactacgaagccctactggaatgtgttattatattaaatggtattttatatgcattacctgagtctgaacgaaaactacagagttctattcaggatttgtgtgttacctggtgggagaaaggcctgcctgccaagggaagacacaggaaagacagcctttgtcatgttactaaggaggagtctggagactaagacaggtgcagacgtatgtcggctttggcgtatccatcaagctttatattgctttgattatgatttggaggaaagtggagaaattaaagatatgttacttgagtgcttcataaatattaattatatcaagaaagaagagggaagaagatttcttagttgtctcttcaactggaatatcaacttcatcaaaatgatccacgggaccattaaaaaccagttacagggattacaaaagtctttgatggtatacattgcagaaatttatttcagagcttggaaaaaggcttcagggaaaatactggaggcgattgaaaatgattgcatccaggacttcatgttccacgggatacaccttccgaggaggtctccagtgcattccaaagtgcgggaggttctgagttactttcaccatcaaaagaaagttcggcagggagtggaagagatgctttatagattatataagcccatcctttggagaggattaaaggccagaaactctgaagttcgatcaaatgctgcattgttgtttgttgaagcatttcctattagggatccaaaccttcatgctattgaaatggatagtgaaatccagaaacagtttgaagagctctatagccttttagaagatccttacccgatggtccgttccacagggatccttggtgtttgtaaaataacttctaagtactgggaaatgatgcccccgaccattcttattgacctcctgaagaaggtgactggggaactggcatttgacacgagctcagctgatgttcgttgttctgtctttaagtgtctgccaatgattttggacaacaaactgagccacccattgttagagcagctccttccagctctcagatacagtctccacgacaattcggagaaagtgagggtagcttttgtggacatgctgttgaagatcaaagctgtgagggctgctaagttttggaaaatatgtcccatggagcacattctggttcgtctggaaactgattctcgacctgtgtctcggcgcctggtgagcctcatctttaattctttcctgcctgtgaatcagccggaggaggtctggtgcgagcgctgtgtcaccctggtgcagatgaaccacgccgctgccaggaggttctatcagtacgcccacgaacacaccgcctgcaccaacatagcaaagctgattcacgttattcgtcattgcttaaatgcctgtatccagagggcagtgagagagcctccagaggacgaggaggaagaggacggaagggagaaggagaatgtgactgatgatcgctgcaagatccctttattcatgctaatgtcctttatgccggcctctgctgtccccccattcagctgtggtgtgatttccacgctgagaagccgggaggagggcgctgtggacaagagctactgcactttgttggattgcctctgctcctgggggcaggtggggcacattctggagcttgttgacaactggctgcccacagagcatgcccaggccaagagcaacacagcttctaaaggtagggtgcagatccatgacacacgcccagtcaaacctgaattggcattggtctacattgagtatctgctgactcatccaaagaaccgcgagtgcttgctctctgctcctcggaagaaacttaaccatcttttgaaagcccttgaaacgtcaaaggcagatctggagtcacttctgcagacaccgggtgggaagcctcgtggcttcagtgaagcagctgccccgcgagcctttggtctccactgtcgcctgagcatccatcttcagcacaagttctgctcagaaggaaaggtgtatttgtccatgttggaagacactggcttttggttagaaagcaaaattttatcttttattcaagatcaagaagaagactacctgaagcttcatagggtcatttatcagcaaattatccagacctacctgactgtgtgtaaagatgttgttatggtaggccttggtgaccatcagtttcagatgcaactcttacagcggagtcttggaatcatgcaaacagtgaagggatttttttatgtttcattacttcttgacattctgaaagagataactggaagttccttgattcagaaaacagattcagatgaagaagttgcaatgctgttggacacagtccagaaagtatttcagaaaatgttggaatgtattgcacggagcttcaggaagcagccggaagaaggcctgcggctgctttattctgttcagaggcctcttcatgagttcattactgctgttcagtctcggcacacagacacccctgtgcaccggggtgtactttctactctgatcgctgggcctgtggttgagataagtcaccagctacggaaggtttctgacgtagaagagcttacccctccagagcatctttctgatcttccaccattttcaaggtgtttaataggaataataataaagtcttcgaatgtggtcaggtcatttttggatgaattaaaggcatgtgtggcttctaatgatattgaaggcattgtgtgcctcacggctgctgtgcatattatcctggttattaatgcaggtaaacataaaagctcaaaagtgagggaggttgcagccactgttcacagaaaactaaagacattcatggaaattactttggaagaggatagcattgaaagatttctctatgaatcatcatcaagaactctgggagaacttttgaattcataaccaagccaacatctccagacatgtaaaaatagggaaaagtgattcaaattgaaatgcctgtgtattttcctattgtttttaatgttaataacccatataatagggaaagggtgggatttttttgtgggaatgtgggaaggtgggggttatggaggagataactcaaaacttcttcaattttgcctagtgcctgcgtaaataatatatttaatataaaggactccaggtatgaatggtgtagaaatccatgattccaagaaaaaacacttttctagcaaacctggttgtttttaaaatgacttttatatatgtaatattgcttggaaactatgagtaataaagcaatgacaacatc

SEQ ID NO: 416642 - DNA, 2233 bp, Homo sapiens
ggcaggacgaggccgggcggtgaatcggccgaggatcagccggaggaggtctggtgcgagcgctgtgtcaccctggtgcagatgaaccacgccgctgccaggaggttctatcagtacgcccacgaacacaccgcctgcaccaacatagcaaagctgattcacgttattcgtcattgcttaaatgcctgtatccagagggcagtgagagagcctccagaggacgaggaggaagaggacggaagggagaaggagaatgtgactgttctggacaaaacactgtcagtaaacgatgttgcatgcatggcaggtttactagaaatcattgtgattctctggaaaagtattgacagaagtatggaaaataataaagaggccaaactttacacgattaacaagtttgcctctgtgcttccagagtatctgaaagtatttaaggatgatcgctgcaagatccctttattcatgctaatgtcctttatgccggcctctgctgtccccccattcagctgtggtgtgatttccacgctgagaagccgggaggagggcgctgtggacaagagctactgcactttgttggattgcctctgctcctgggggcaggtggggcacattctggagcttgttgacaactggctgcccacagagcatgcccaggccaagagcaacacagcttctaaaggtagggtgcagatccatgacacacgcccagtcaaacctgaattggcattggtctacattgagtatctgctgactcatccaaagaaccgcgagtgcttgctctctgctcctcggaagaaacttaaccatcttttgaaagcccttgaaacgtcaaaggcagatctggagtcacttctgcagacaccgggtgggaagcctcgtggcttcagtgaagcagctgccccgcgagcctttggtctccactgtcgcctgagcatccatcttcagcacaagttctgctcagaaggaaaggtgtatttgtccatgttggaagacactggcttttggttagaaagcaaaattttatcttttattcaagatcaagaagaagactacctgaagcttcatagggtcatttatcagcaaattatccagacctacctgactgtgtgtaaagatgttgttatggtaggccttggtgaccatcagtttcagatgcaactcttacagcggagtcttggaatcatgcaaacagtgaagggatttttttatgtttcattacttcttgacattctgaaagagataactggaagttccttgattcagaaaacagattcagatgaagaagttgcaatgctgttggacacagtccagaaagtatttcagaaaatgttggaatgtattgcacggagcttcaggaagcagccggaagaaggcctgcggctgctttattctgttcagaggcctcttcatgagttcattactgctgttcagtctcggcacacagacacccctgtgcaccggggtgtactttctactctgatcgctgggcctgtggttgagataagtcaccagctacggaaggtttctgacgtagaagagcttacccctccagagcatctttctgatcttccaccattttcaaggtgtttaataggaataataataaagtcttcgaatgtggtcaggtcatttttggatgaattaaaggcatgtgtggcttctaatgatattgaaggcattgtgtgcctcacggctgctgtgcatattatcctggttattaatgcaggtaaacataaaagctcaaaagtgagggaggttgcagccactgttcacagaaaactaaagacattcatggaaattactttggaagaggatagcattgaaagatttctctatgaatcatcatcaagaactctgggagaacttttgaattcataaccaagccaacatctccagacatgtaaaaatagggaaaagtgattcaaattgaaatgcctgtgtattttcctattgtttttaatgttaataacccatataatagggaaagggtgggatttttttgtgggaatgtgggaaggtgggggttatggaggagataactcaaaacttcttcaattttgcctagtgcctgcgtaaataatatatttaatataaaggactccaggtatgaatggtgtagaaatccatgattccaagaaaaaacacttttctagcaaacctggttgtttttaaaatgacttttatatatgtaatattgcttggaaactatgagtaataaagcaatgacaacatc

SEQ ID NO: 416643 - DNA, 772 bp, Homo sapiens
cttctagctcggtacccatcttccctctctcacgcagaactgtgggtgctggaaaggaagagcacacgtcctgtttgctcaccagcatagcacactgcccagtgagcacgtttcattgcctggcagtgcttggtgtccacggtcaacccaagcctgtgctccagtgccatgtgtcctgactgctgtggggattctgactccattttacatacaagaaacaattaatgaaacatctatagattatttcaactttgtttttaaatgcatggttgcaaaccatttttagattatatttttgaaaatgtacatttggataatttggtcacttttttctgtagctaaatatttctttatttgtgtttcagatttctctatgaatcatcatcaagaactctgggagaacttttgaattcataaccaagccaacatctccagacatgtaaaaatagggaaaagtgattcaaattgaaatgcctgtgtattttcctattgtttttaatgttaataacccatataatagggaaagggtgggatttttttgtgggaatgtgggaaggtgggggttatggaggagataactcaaaacttcttcaattttgcctagtgcctgcgtaaataatatatttaatataaaggactccaggtatgaatggtgtagaaatccatgattccaagaaaaaacacttttctagcaaacctggttgtttttaaaatgacttttatatatgtaatattgcttggaaactatgagtaataaagcaatgacaacatc

SEQ ID NO: 416644 - DNA, 992 bp, Homo sapiens
gttaaatttatttagcataaaagcacattatttacagtagatgataacaagataaagactttttgatgaaagacttattgagtaatatgtctgtttttctttatttttgtctcactgaataaacactttcgtttatcttttttttttttttgtcatattgagacaggatgtcgctctgtcacccaggctggagtgccatgatacatggctcactacagcctcaaattcctgggctgaagtgatcctcctgcctcagtctcccaagtagctgggactacaggtttctgacgtagaagagcttacccctccagagcatctttctgatcttccaccattttcaaggtgtttaataggaataataataaagtcttcgaatgtggtcaggtcatttttggatgaattaaaggcatgtgtggcttctaatgatattgaaggcattgtgtgcctcacggctgctgtgcatattatcctggttattaatgcaggtaaacataaaagctcaaaagtgagggaggttgcagccactgttcacagaaaactaaagacattcatggaaattactttggaagaggatagcattgaaagatttctctatgaatcatcatcaagaactctgggagaacttttgaattcataaccaagccaacatctccagacatgtaaaaatagggaaaagtgattcaaattgaaatgcctgtgtattttcctattgtttttaatgttaataacccatataatagggaaagggtgggatttttttgtgggaatgtgggaaggtgggggttatggaggagataactcaaaacttcttcaattttgcctagtgcctgcgtaaataatatatttaatataaaggactccaggtatgaatggtgtagaaatccatgattccaagaaaaaacacttttctagcaaacctggttgtttttaaaatgacttttatatatgtaatattgcttggaaactatgagtaataaagcaatgacaacatc

SEQ ID NO: 416645 - DNA, 453 bp, Homo sapiens
atgatcgcccgcacgcatgtcccctgaaggaggaggaagagggcttatttctctatgaatcatcatcaagaactctgggagaacttttgaattcataaccaagccaacatctccagacatgtaaaaatagggaaaagtgattcaaattgaaatgcctgtgtattttcctattgtttttaatgttaataacccatataatagggaaagggtgggatttttttgtgggaatgtgggaaggtgggggttatggaggagataactcaaaacttcttcaattttgcctagtgcctgcgtaaataatatatttaatataaaggactccaggtatgaatggtgtagaaatccatgattccaagaaaaaacacttttctagcaaacctggttgtttttaaaatgacttttatatatgtaatattgcttggaaactatgagtaataaagcaatgacaacatc

SEQ ID NO: 416646 - DNA, 647 bp, Homo sapiens
cttctagctcggtacccatcttccctctctcacgcagaactgtgggtgctggaaaggaagagcacacgtcctgtttgctcaccagcatagcacactgcccagtgagcacgtttcattgcctggcagtgcttggtgtccacggtcaacccaagcctgtgctccagtgccatgtgtcctgactgctgtggggattctgactccattttacatacaagaaacaattaatgaaacatctatagattatttcaactttgtttttaaatgcatggttgcaaaccatttttagattatatttttgaaaatgtacatttggataatttggtcacttttttctgtagctaaatatttctttatttgtgtttcagatttctctatgaatcatcatcaagaactctgggagaacttttgaattcataaccaagccaacatctccagacatgtaaaaatagggaaaagtgattcaaattgaaatgcctgtgtattttcctattgtttttaatgttaataacccatataatagggaaagggtgggatttttttgtgggaatgtgggaaggtgggggttatggaggagataactcaaaacttcttcaattttgcctagtgcctgcgtaaataatatatttaatataaaggactccaggtat

SEQ ID NO: 416647 - DNA, 293 bp, Homo sapiens
gatgattgttaccatcttttcattatgtaatgctcttctttatctctgataattcttcttactgtgaattctgctctgcctgaaattaatactactactcctgctttgttttgattagaataagcatggtatatctttttattcatttcctttttttttttttttccaagatatgaggacttgctgtgttgcccaggctgggctctaactcctggactcctggactcaatctatccttctgcctcagtcccaattggctaggactgcaggcacacaccaccagacccagctaa

SEQ ID NO: 416648 - DNA, 415 bp, Homo sapiens
ccaggtatgaatggtgtagaaatccatgattccaagaaaaaacacttttctagcaaacctggttgtttttaaaatgacttttatatatgtaatattgcttggaaactatgagtaataaagcaatgacaacatcccatttgtttatttgaaagtattaggggcccggcgcagtggcacacgcctgtaatcccagcactttgggaggctgaggcaggcagatagatcacttgaggtcaggagttcaagaccagcctagacaacatggtgaaaccccgtctctaccaaaaatacaaaattagctgggtgtggtggtgaatgcctgtaatcccagctactcaggaagcagaggttgcagtgagctgacgtcgcgtcactgcaccccagcctgggcgacagagcaagactctgtctcaaa

SEQ ID NO: 416649 - DNA, 2339 bp, Homo sapiens
aggtaaggagggcggagggacccagtagtggttttggaaaatatgtcccatggagcacattctggttcgtctggaaactgattctcgacctgtgtctcggcgcctggtgagcctcatctttaattctttcctgcctgtgaatcagccggaggaggtctggtgcgagcgctgtgtcaccctggtgcagatgaaccacgccgctgccaggaggttctatcagtacgcccacgaacacaccgcctgcaccaacatagcaaagctgattcacgttattcgtcattgcttaaatgcctgtatccagagggcagtgagagagcctccagaggacgaggaggaagaggacggaagggagaaggagaatgtgactgttctggacaaaacactgtcagtaaacgatgttgcatgcatggcaggtttactagaaatcattgtgattctctggaaaagtattgacagaagtatggaaaataataaagaggccaaactttacacgattaacaagtttgcctctgtgcttccagagtatctgaaagtatttaaggatgatcgctgcaagatccctttattcatgctaatgtcctttatgccggcctctgctgtccccccattcagctgtggtgtgatttccacgctgagaagccgggaggagggcgctgtggacaagagctactgcactttgttggattgcctctgctcctgggggcaggtggggcacattctggagcttgttgacaactggctgcccacagagcatgcccaggccaagagcaacacagcttctaaaggtagggtgcagatccatgacacacgcccagtcaaacctgaattggcattggtctacattgagtatctgctgactcatccaaagaaccgcgagtgcttgctctctgctcctcggaagaaacttaaccatcttttgaaagcccttgaaacgtcaaaggcagatctggagtcacttctgcagacaccgggtgggaagcctcgtggcttcagtgaagcagctgccccgcgagcctttggtctccactgtcgcctgagcatccatcttcagcacaagttctgctcagaaggaaaggtgtatttgtccatgttggaagacactggcttttggttagaaagcaaaattttatcttttattcaagatcaagaagaagactacctgaagcttcatagggtcatttatcagcaaattatccagacctacctgactgtgtgtaaagatgttgttatggtaggccttggtgaccatcagtttcagatgcaactcttacagcggagtcttggaatcatgcaaacagtgaagggatttttttatgtttcattacttcttgacattctgaaagagataactggaagttccttgattcagaaaacagattcagatgaagaagttgcaatgctgttggacacagtccagaaagtatttcagaaaatgttggaatgtattgcacggagcttcaggaagcagccggaagaaggcctgcggctgctttattctgttcagaggcctcttcatgagttcattactgctgttcagtctcggcacacagacacccctgtgcaccggggtgtactttctactctgatcgctgggcctgtggttgagataagtcaccagctacggaaggtttctgacgtagaagagcttacccctccagagcatctttctgatcttccaccattttcaaggtgtttaataggaataataataaagtcttcgaatgtggtcaggtcatttttggatgaattaaaggcatgtgtggcttctaatgatattgaaggcattgtgtgcctcacggctgctgtgcatattatcctggttattaatgcaggtaaacataaaagctcaaaagtgagggaggttgcagccactgttcacagaaaactaaagacattcatggaaattactttggaagaggatagcattgaaagatttctctatgaatcatcatcaagaactctgggagaacttttgaattcataaccaagccaacatctccagacatgtaaaaatagggaaaagtgattcaaattgaaatgcctgtgtattttcctattgtttttaatgttaataacccatataatagggaaagggtgggatttttttgtgggaatgtgggaaggtgggggttatggaggagataactcaaaacttcttcaattttgcctagtgcctgcgtaaataatatatttaatataaaggactccaggtatgaatggtgtagaaatccatgattccaagaaaaaacacttttctagcaaacctggttgtttttaaaatgacttttatatatgtaatattgcttggaaactatgagtaataaagcaatgacaacatc

SEQ ID NO: 416650 - DNA, 3979 bp, Homo sapiens
acgaccgggagggcggggcccgtctggggcgccggcgggtgcgtttgaatctggtccgagcgcgggaaacggcgggtccccgagcccaggttacaaaataaatgccatttgaacagtgccatctgtcatggaaaaacgtgagacgtttgtacaagccgtgtctaaggagctggttggagagtttttgcaatttgttcaacttgataaagaggcctctgatcctttcagcctaaatgaattactagatgaattatcaaggaaacagaaagaagaattatggcaaaggctgaagaatttattgacagatgtgttgttagaaagcccagtggatgggtggcaggtagtggaagcccagggtgaagacaatatggaaaccgaacatggctcaaaaatgagaaaaagcatagaaataatttatgcaattacatctgtgattcttgcttctgtgtctgtaataaatgaaagtgagaactacgaagccctactggaatgtgttattatattaaatggtattttatatgcattacctgagtctgaacgaaaactacagagttctattcaggatttgtgtgttacctggtgggagaaaggcctgcctgccaagggaagacacaggaaagacagcctttgtcatgttactaaggaggagtctggagactaagacaggtgcagacgtatgtcggctttggcgtatccatcaagctttatattgctttgattatgatttggaggaaagtggagaaattaaagatatgttacttgagtgcttcataaatattaattatatcaagaaagaagagggaagaagatttcttagttgtctcttcaactggaatatcaacttcatcaaaatgatccacgggaccattaaaaaccagttacagggattacaaaagtctttgatggtatacattgcagaaatttatttcagagcttggaaaaaggcttcagggaaaatactggaggcgattgaaaatgattgcatccaggacttcatgttccacgggatacaccttccgaggaggtctccagtgcattccaaagtgcgggaggttctgagttactttcaccatcaaaagaaagttcggcagggagtggaagagatgctttatagattatataagcccatcctttggagaggattaaaggccagaaactctgaagttcgatcaaatgctgcattgttgtttgttgaagcatttcctattagggatccaaaccttcatgctattgaaatggatagtgaaatccagaaacagtttgaagagctctatagccttttagaagatccttacccgatggtccgttccacagggatccttggtgtttgtaaaataacttctaagtactgggaaatgatgcccccgaccattcttattgacctcctgaagaaggtgactggggaactggcatttgacacgagctcagctgatgttcgttgttctgtctttaagtgtctgccaatgattttggacaacaaactgagccacccattgttagagcagctccttccagctctcagatacagtctccacgacaattcggagaaagtgagggtagcttttgtggacatgctgttgaagatcaaagctgtgagggctgctaagttttggaaaatatgtcccatggagcacattctggttcgtctggaaactgattctcgacctgtgtctcggcgcctggtgagcctcatctttaattctttcctgcctgtgaatcagccggaggaggtctggtgcgagcgctgtgtcaccctggtgcagatgaaccacgccgctgccaggaggttctatcagtacgcccacgaacacaccgcctgcaccaacatagcaaagctgattcacgttattcgtcattgcttaaatgcctgtatccagagggcagtgagagagcctccagaggacgaggaggaagaggacggaagggagaaggagaatgtgactgttctggacaaaacactgtcagtaaacgatgttgcatgcatggcaggtttactagaaatcattgtgattctctggaaaagtattgacagaagtatggaaaataataaagaggccaaactttacacgattaacaagtttgcctctgtgcttccagagtatctgaaagtatttaaggatgatcgctgcaagatccctttattcatgctaatgtcctttatgccggcctctgctgtccccccattcagctgtggtgtgatttccacgctgagaagccgggaggagggcgctgtggacaagagctactgcactttgttggattgcctctgctcctgggggcaggtggggcacattctggagcttgttgacaactggctgcccacagagcatgcccaggccaagagcaacacagcttctaaaggtagggtgcagatccatgacacacgcccagtcaaacctgaattggcattggtctacattgagtatctgctgactcatccaaagaaccgcgagtgcttgctctctgctcctcggaagaaacttaaccatcttttgaaagcccttgaaacgtcaaaggcagatctggagtcacttctgcagacaccgggtgggaagcctcgtggcttcagtgaagcagctgccccgcgagcctttggtctccactgtcgcctgagcatccatcttcagcacaagttctgctcagaaggaaaggtgtatttgtccatgttggaagacactggcttttggttagaaagcaaaattttatcttttattcaagatcaagaagaagactacctgaagcttcatagggtcatttatcagcaaattatccagacctacctgactgtgtgtaaagatgttgttatggtaggccttggtgaccatcagtttcagatgcaactcttacagcggagtcttggaatcatgcaaacagtgaagggatttttttatgtttcattacttcttgacattctgaaagagataactggaagttccttgattcagaaaacagattcagatgaagaagttgcaatgctgttggacacagtccagaaagtatttcagaaaatgttggaatgtattgcacggagcttcaggaagcagccggaagaaggcctgcggctgctttattctgttcagaggcctcttcatgagttcattactgctgttcagtctcggcacacagacacccctgtgcaccggggtgtactttctactctgatcgctgggcctgtggttgagataagtcaccagctacggaaggtttctgacgtagaagagcttacccctccagagcatctttctgatcttccaccattttcaaggtgtttaataggaataataataaagtcttcgaatgtggtcaggtcatttttggatgaattaaaggcatgtgtggcttctaatgatattgaaggcattgtgtgcctcacggctgctgtgcatattatcctggttattaatgcaggtaaacataaaagctcaaaagtgagggaggttgcagccactgttcacagaaaactaaagacattcatggaaattactttggaagaggatagcattgaaagatatgaggacttgctgtgttgcccaggctgggctctaactcctggactcctggactcaatctatccttctgcctcagtcccaattggctaggactgcaggcacacaccaccagacccagctaatgtaatttctatctatatgtgtctttatatttaaagtggtttttttatagacagtatataaatgggtcatgttttttgatcttctctgacaatctgtcttaaaattggtgcatatgtaccatattcaaagtgattattgatatagttggattaatatccaccatatttgttattgtcttctatttgttccccttgttatttgttcctatttctgtcttccactccttttctgtcttttgtggttttaactgaacattttatgatgccgttttctttcctagcatatcagttatacttttttttttttaaacctttcttagtggtttctttagagttggaatttttatt

SEQ ID NO: 416651 - DNA, 3854 bp, Homo sapiens
acgaccgggagggcggggcccgtctggggcgccggcgggtgcgtttgaatctggtccgagcgcgggaaacggcgggtccccgagcccaggttacaaaataaatgccatttgaacagtgccatctgtcatggaaaaacgtgagacgtttgtacaagccgtgtctaaggagctggttggagagtttttgcaatttgttcaacttgataaagaggcctctgatcctttcagcctaaatgaattactagatgaattatcaaggaaacagaaagaagaattatggcaaaggctgaagaatttattgacagatgtgttgttagaaagcccagtggatgggtggcaggtagtggaagcccagggtgaagacaatatggaaaccgaacatggctcaaaaatgagaaaaagcatagaaataatttatgcaattacatctgtgattcttgcttctgtgtctgtaataaatgaaagtgagaactacgaagccctactggaatgtgttattatattaaatggtattttatatgcattacctgagtctgaacgaaaactacagagttctattcaggatttgtgtgttacctggtgggagaaaggcctgcctgccaagggaagacacaggaaagacagcctttgtcatgttactaaggaggagtctggagactaagacaggtgcagacgtatgtcggctttggcgtatccatcaagctttatattgctttgattatgatttggaggaaagtggagaaattaaagatatgttacttgagtgcttcataaatattaattatatcaagaaagaagagggaagaagatttcttagttgtctcttcaactggaatatcaacttcatcaaaatgatccacgggaccattaaaaaccagttacagggattacaaaagtctttgatggtatacattgcagaaatttatttcagagcttggaaaaaggcttcagggaaaatactggaggcgattgaaaatgattgcatccaggacttcatgttccacgggatacaccttccgaggaggtctccagtgcattccaaagtgcgggaggttctgagttactttcaccatcaaaagaaagttcggcagggagtggaagagatgctttatagattatataagcccatcctttggagaggattaaaggccagaaactctgaagttcgatcaaatgctgcattgttgtttgttgaagcatttcctattagggatccaaaccttcatgctattgaaatggatagtgaaatccagaaacagtttgaagagctctatagccttttagaagatccttacccgatggtccgttccacagggatccttggtgtttgtaaaataacttctaagtactgggaaatgatgcccccgaccattcttattgacctcctgaagaaggtgactggggaactggcatttgacacgagctcagctgatgttcgttgttctgtctttaagtgtctgccaatgattttggacaacaaactgagccacccattgttagagcagctccttccagctctcagatacagtctccacgacaattcggagaaagtgagggtagcttttgtggacatgctgttgaagatcaaagctgtgagggctgctaagttttggaaaatatgtcccatggagcacattctggttcgtctggaaactgattctcgacctgtgtctcggcgcctggtgagcctcatctttaattctttcctgcctgtgaatcagccggaggaggtctggtgcgagcgctgtgtcaccctggtgcagatgaaccacgccgctgccaggaggttctatcagtacgcccacgaacacaccgcctgcaccaacatagcaaagctgattcacgttattcgtcattgcttaaatgcctgtatccagagggcagtgagagagcctccagaggacgaggaggaagaggacggaagggagaaggagaatgtgactgttctggacaaaacactgtcagtaaacgatgttgcatgcatggcaggtttactagaaatcattgtgattctctggaaaagtattgacagaagtatggaaaataataaagaggccaaactttacacgattaacaagtttgcctctgtgcttccagagtatctgaaagtatttaaggatgatcgctgcaagatccctttattcatgctaatgtcctttatgccggcctctgctgtccccccattcagctgtggtgtgatttccacgctgagaagccgggaggagggcgctgtggacaagagctactgcactttgttggattgcctctgctcctgggggcaggtggggcacattctggagcttgttgacaactggctgcccacagagcatgcccaggccaagagcaacacagcttctaaaggtagggtgcagatccatgacacacgcccagtcaaacctgaattggcattggtctacattgagtatctgctgactcatccaaagaaccgcgagtgcttgctctctgctcctcggaagaaacttaaccatcttttgaaagcccttgaaacgtcaaaggcagatctggagtcacttctgcagacaccgggtgggaagcctcgtggcttcagtgaagcagctgccccgcgagcctttggtctccactgtcgcctgagcatccatcttcagcacaaggtgtgcctgctcctggccctctattaggatgatacacagtgctctttttgttactgatttatcttcttgtttttggacagttctgctcagaaggaaaggtgtatttgtccatgttggaagacactggcttttggttagaaagcaaaattttatcttttattcaagatcaagaagaagactacctgaagcttcatagggtcatttatcagcaaattatccagacctacctgactgtgtgtaaagatgttgttatggtaggccttggtgaccatcagtttcagatgcaactcttacagcggagtcttggaatcatgcaaacagtgaagggatttttttatgtttcattacttcttgacattctgaaagagataactggaagttccttgattcagaaaacagattcagatgaagaagttgcaatgctgttggacacagtccagaaagtatttcagaaaatgttggaatgtattgcacggagcttcaggaagcagccggaagaaggcctgcgggtttctgacgtagaagagcttacccctccagagcatctttctgatcttccaccattttcaaggtgtttaataggaataataataaagtcttcgaatgtggtcaggtcatttttggatgaattaaaggcatgtgtggcttctaatgatattgaaggcattgtgtgcctcacggctgctgtgcatattatcctggttattaatgcaggtaaacataaaagctcaaaagtgagggaggttgcagccactgttcacagaaaactaaagacattcatggaaattactttggaagaggatagcattgaaagatttctctatgaatcatcatcaagaactctgggagaacttttgaattcataaccaagccaacatctccagacatgtaaaaatagggaaaagtgattcaaattgaaatgcctgtgtattttcctattgtttttaatgttaataacccatataatagggaaagggtgggatttttttgtgggaatgtgggaaggtgggggttatggaggagataactcaaaacttcttcaattttgcctagtgcctgcgtaaataatatatttaatataaaggactccaggtatgaatggtgtagaaatccatgattccaagaaaaaacacttttctagcaaacctggttgtttttaaaatgacttttatatatgtaatattgcttggaaactatgagtaataaagcaatgacaacatc

SEQ ID NO: 416652 - DNA, 533 bp, Homo sapiens
tggtgccaactgttctagagtcaaataccaaaagaagtgaagtttcccgactggatgcgacaagttgcaggtttgcagacctgattctgagatggccctcaagattcccgtctttggcacccctctccatttttgtgggtgggatctgtgactataatgggatcactgctcccttgattaggtgctgttatatgagactccatctgagcagactgtctagtaattcacagctggccccaaagaagcaaatggccttgttatgaactacttacctcaggtcctagccgcatggcccccttcaaaggctaagagtgactctcaccaaccagcaaagacaaaataggatgtcatttctacagctacaaggaactggtttctgcccacaaccccaagctccagaaggaattcagcccagcaaacacccggatttcagtctgtaagactctgagcagagaccccagccacactatgcctggattcctgactccttgtaactgtgagataataaaaggctaatgttttatgtcaataaa

SEQ ID NO: 416653 - DNA, 138 bp, Homo sapiens
ggtcaaggaagaaattaaggaggaaatcacaaaatttcttgaaacaaataaaaatcaaaacatagcacaccacaacctatgagatacagcaaaagcagtgctaagaggaaagtgtatagcaataaatgcttacgtcaa

SEQ ID NO: 416654 - DNA, 468 bp, Homo sapiens
ataattttcctttcttgtattatagttgcaaggttttggtagcaaggtaaggctaaccttgtcaaaaaaaaaaagttagaaaatagtcccttgtttttattctcttggagaataaaattggtattacttcttccttaaatgtttggaagaatttcctcttgaagttatctggtgttggggttttctttgtgtaaaagttttaaataaccaattcaattccattaattattcagattttctaattatttttctttcagcttggtaagttgtactttttaaggaatttattcattttattcaaaatgtcaaatgtatttgcataaattttgtcacacacatattcccttatcttttttatgcctgtaggacctgtagtgagttcctcttgtttatttcatatattggtaatgtgtgttttctctttcttttttaaaaattttctttattccttacctggagcactaaaaa

SEQ ID NO: 416655 - DNA, 1038 bp, Homo sapiens
cggccctggctctctggcgcggggccccttagtccgggctttttgccatggggtctctgttccctctgtcgctgctgttttttttggcggccgcctacccgggagttgggagcgcgctgggacgccggactaagcgggcgcaaagccccaagggtagccctctcgcgccctccgggacctcagtgcccttctgggtgcgcatgagcccggagttcgtggctgtgcagccggggaagtcagtgcagctcaattgcagcaacagctgtccccagccgcagaattccagcctccgcaccccgctgcggcaaggcaagacgctcagagggccgggttgggtgtcttaccagctgctcgacgtgagggcctggagctccctcgcgcactgcctcgtgacctgcgcaggaaaaacacgctgggccacctccaggatcaccgcctacaaaccgccccacagcgtgattttggagcctccggtcttaaagggcaggaaatacactttgcgctgccacgtgacgcaggtgttcccggtgggctacttggtggtgaccctgaggcatggaagccgggtcatctattccgaaagcctggagcgcttcaccggcctggatctggccaacgtgaccttgacctacgagtttgctgctggaccccgcgacttctggcagcccgtgatctgccacgcgcgcctcaatctcgacggcctggtggtccgcaacagctcggcacccattacactgatgctcgcttggagccccgcgcccacagctttggcctccggttccatcctacccgggaggctgagttgggaggatcctttgagccctgaaagtcgaggttgcagtgagccttgatcgtgccactgcactccagcctgggggacagagcacgaccctgtctccaaaaataaaataaaaataaaaataaatattggcgggggaaccctctggaatcaataaaggcttccttaaccagcctctgtcctgtgacctaagggtccgcattactgcccttcttcggaggaactggtttgtttttgtt

SEQ ID NO: 416656 - DNA, 1493 bp, Homo sapiens
cggccctggctctctggcgcggggccccttagtccgggctttttgccatggggtctctgttccctctgtcgctgctgttttttttggcggccgcctacccgggagttgggagcgcgctgggacgccggactaagcgggcgcaaagccccaagggtagccctctcgcgccctccgggacctcagtgcccttctgggtgcgcatgagcccggagttcgtggctgtgcagccggggaagtcagtgcagctcaattgcagcaacagctgtccccagccgcagaattccagcctccgcaccccgctgcggcaaggcaagacgctcagagggccgggttgggtgtcttaccagctgctcgacgtgagggcctggagctccctcgcgcactgcctcgtgacctgcgcaggaaaaacacgctgggccacctccaggatcaccgcctacaaaccgccccacagcgtgattttggagcctccggtcttaaagggcaggaaatacactttgcgctgccacgtgacgcaggtgttcccggtgggctacttggtggtgaccctgaggcatggaagccgggtcatctattccgaaagcctggagcgcttcaccggcctggatctggccaacgtgaccttgacctacgagtttgctgctggaccccgcgacttctggcagcccgtgatctgccacgcgcgcctcaatctcgacggcctggtggtccgcaacagctcggcacccattacactgatgctcggtgaggcacccctgtaaccctggggactaggaggaagggggcagagagagttatgaccccgagagggcgcacagaccaagcgtgagctccacgcgggtcgacagacctccctgtgttccgttcctaattctcgccttctgctcccagcttggagccccgcgcccacagctttggcctccggttccatcgctgcccttgtagggatcctcctcactgtgggcgctgcgtacctatgcaagtgcctagctatgaagtcccaggcgtaaagggggatgttctatgccggctgagcgagaaaaagaggaatatgaaacaatctggggaaatggccatacatggtggctgacgcctgtaatcccagcactttgggaggccgaggcaggagaatcgcttgagcccaggagttcgagaccagcctggacaacatagtgagaccccgtctatgcaaaaaatacacaaattagcctggtgtggtggcccgcacctgtggtcccagctacccgggaggctgagttgggaggatcctttgagccctgaaagtcgaggttgcagtgagccttgatcgtgccactgcactccagcctgggggacagagcacgaccctgtctccaaaaataaaataaaaataaaaataaatattggcgggggaaccctctggaatcaataaaggcttccttaaccagcctctgtcctgtgacctaagggtccgcattactgcccttcttcggaggaactggtttgtttttgtt

SEQ ID NO: 416657 - DNA, 1346 bp, Homo sapiens
cggccctggctctctggcgcggggccccttagtccgggctttttgccatggggtctctgttccctctgtcgctgctgttttttttggcggccgcctacccgggagttgggagcgcgctgggacgccggactaagcgggcgcaaagccccaagggtagccctctcgcgccctccgggacctcagtgcccttctgggtgcgcatgagcccggagttcgtggctgtgcagccggggaagtcagtgcagctcaattgcagcaacagctgtccccagccgcagaattccagcctccgcaccccgctgcggcaaggcaagacgctcagagggccgggttgggtgtcttaccagctgctcgacgtgagggcctggagctccctcgcgcactgcctcgtgacctgcgcaggaaaaacacgctgggccacctccaggatcaccgcctacaaaccgccccacagcgtgattttggagcctccggtcttaaagggcaggaaatacactttgcgctgccacgtgacgcaggtgttcccggtgggctacttggtggtgaccctgaggcatggaagccgggtcatctattccgaaagcctggagcgcttcaccggcctggatctggccaacgtgaccttgacctacgagtttgctgctggaccccgcgacttctggcagcccgtgatctgccacgcgcgcctcaatctcgacggcctggtggtccgcaacagctcggcacccattacactgatgctcgcttggagccccgcgcccacagctttggcctccggttccatcgctgcccttgtagggatcctcctcactgtgggcgctgcgtacctatgcaagtgcctagctatgaagtcccaggcgtaaagggggatgttctatgccggctgagcgagaaaaagaggaatatgaaacaatctggggaaatggccatacatggtggctgacgcctgtaatcccagcactttgggaggccgaggcaggagaatcgcttgagcccaggagttcgagaccagcctggacaacatagtgagaccccgtctatgcaaaaaatacacaaattagcctggtgtggtggcccgcacctgtggtcccagctacccgggaggctgagttgggaggatcctttgagccctgaaagtcgaggttgcagtgagccttgatcgtgccactgcactccagcctgggggacagagcacgaccctgtctccaaaaataaaataaaaataaaaataaatattggcgggggaaccctctggaatcaataaaggcttccttaaccagcctctgtcctgtgacctaagggtccgcattactgcccttcttcggaggaactggtttgtttttgtt

SEQ ID NO: 416658 - DNA, 1182 bp, Homo sapiens
cggccctggctctctggcgcggggccccttagtccgggctttttgccatggggtctctgttccctctgtcgctgctgttttttttggcggccgcctacccgggagttgggagcgcgctgggacgccggactaagcgggcgcaaagccccaagggtagccctctcgcgccctccgggacctcagtgcccttctgggtgcgcatgagcccggagttcgtggctgtgcagccggggaagtcagtgcagctcaattgcagcaacagctgtccccagccgcagaattccagcctccgcaccccgctgcggcaaggcaagacgctcagagggccgggttgggtgtcttaccagctgctcgacgtgagggcctggagctccctcgcgcactgcctcgtgacctgcgcaggaaaaacacgctgggccacctccaggatcaccgcctacagtgttcccggtgggctacttggtggtgaccctgaggcatggaagccgggtcatctattccgaaagcctggagcgcttcaccggcctggatctggccaacgtgaccttgacctacgagtttgctgctggaccccgcgacttctggcagcccgtgatctgccacgcgcgcctcaatctcgacggcctggtggtccgcaacagctcggcacccattacactgatgctcgcttggagccccgcgcccacagctttggcctccggttccatcgctgcccttgtagggatcctcctcactgtgggcgctgcgtacctatgcaagtgcctagctatgaagtcccaggcgtaaagggggatgttctatgccggctgagcgagaaaaagaggaatatgaaacaatctggggaaatggccatacatggtggctgacgcctgtaatcccagcactttgggaggccgaggcaggagaatcgcttgagcccaggagttcgagaccagcctggacaacatagtgagaccccgtctatgcaaaaaatacacaaattagcctggtgtggtggcccgcacctgtggtcccagctacccgggaggctgagttgggaggatcctttgagccctgaaagtcgaggttgcagtgagccttgatcgtgccactgcactccagcctgggggacagagcacgaccctgtctccaaaaataaaataaaaataaaaataaatattggcgggggaaccctctggaatc

SEQ ID NO: 416659 - DNA, 143 bp, Homo sapiens
gtttccagaaggactggggagaaacaaagaatggcccccaatgctggggtctggggttattttgagttaaagggactcggagctactgaatgtcttccacattcaagtcctagaactctttccttgagatattccactttaca

SEQ ID NO: 416660 - DNA, 577 bp, Homo sapiens
  misc_feature (519)..(519): n is a, c, g, or t
aggcgcctgccaccacgcctggctaattttagaattttagtagagatgaggttttgacatgttggccaggctggtctcgaactcctgacctcaggtgatccgcccactttggcctccctaagtgctggcattacaggcctgagccaccacgcctggcctacatgatgtgtttctgtcctgcctgacctacatggtgtgtttctgccctgcgtattacacacacacacacacacatgtgcgtgcacacacacttctaaggacgtggccccatctggctttgtctctccagttgtccttgccctgcccccctccccagaggtgctgcccagtgctggtgtggccacacacggctacatcattgtgcaggcagagctccctgcctgcccagcctcagggctctgcatgctcacacctagatcctcatcttcctccatgtctctgcccagcatagccccgagcccctggaagctggtacccctcagtgtgctcacacgtggcaaggccgaggtggccccaggnagggcattaaccaggcacaaaccatgcacgctggcatgggtgcggggatcacacgaat

SEQ ID NO: 416661 - DNA, 2169 bp, Homo sapiens
cccggatgtgaggaaacttctttatcttctgcttctattggttacgcttggtcccgccactcgggtcctctggcttcttcccaaacacctcctctttctctcggtgattggccaagaggcagttcccatagtaactgacaccgcgctcccacttcccagcctggaggacagcaccggccctcgtattagcaacctggaagagagggcgcccaggtgggcactcgcaacttctcacgtatctgcgcgttctcttcgctcccactggcgtgagcctgcgctttccgccttccttccctcacaagcccccttggcaaccgtcgccgttgagacggagggagacgcccccacggattcgccccgccgcgcctctccgcgcgtagattggccggagcgaggcgaacgggcccggccttggtagccgccgaccgagcgctggctgtcctggaacctaggcggcgggagcccggggcgcctcgcggcacggaagagcggcgagatgctcaaccgcaagaccagccactttttgggaatgagggtgcagtcggagcttgaacatctctccgagctgcggcgggaagcggggaaggatcgcagctcagtgcatgggtcggccgcgcggacgcgtgcgagtgtgcggactcagtggacgacggcggcggcggcgaaagcggatgaagaccccggagccaacttgtttccggtgagggcgggacagtctggtctgctcgtgaatatttataaaccggctcccccgcaggcgccacctgtcattatgcttactaacgttcgggacgtctcccgggctgcttgggcgaggagaggcaggggtgtgtgaccccggtggttactgtgctcgcgtagagcacctagggcctgctgaagccctccctcgcccgcgcctctccttagtccttgagatgagatggcaagttacagcggcttctccggcctgctggagattcgctacgggccaggacaccgcagctgccttccccaattcgctttctttccgcagccgccgctgccccgaccccggatctgcatgtggaagtacctggacgtccattccatgcaccagctggagaagaccaccaatgctgagatgagggagtagggactgaggggggcgtgggaagagctcttggcaaaggctgaggggtcaggttgggaaaacatgaggaatggctgactccaaagcatgtggtgggtgtagggtgatgaaaggaggcccagttgtcactcactcctctctccctcccaagggtgctggctgagctgctggagctagggtgtcctgagcagagcctgagggacgccatcaccctggacctcttctgccacgcgctcattttctgccgccagcagggcttctcactggagcagacgtcagcggcttgtgccctgctccaggatcttcacaaggcttgtattgctcatggtcataaacagctgttgagtgaagtgaatgaatggataccagagagggcctcactgctgcatcttgctttccctaccagcaacccccttgggcaacgtggaggagtgctaccgctacttcaccagtgtccttttttgccatggagtcaggcggcctcctttcagcatcgacctcttcaaagaggaacagctgctggccttggaagactacgtggtcaacacttacttccgccacttcaagctctataaatacgtcttcacaccccaggtgcggctggatctgtctttgacttacatggggctacagccacccaaactgtggccagagagtgagacgggtaagggagagtgccagggcagggctgggctgggccaggcctggggccacagtctcttcctgcttctggtttgcagagaaagaagaaagcaaggagatggaggagcaggcagttaccccgcagaaagaggaactagagacagtggccccaccagagccagagccaagccacatccacgtcctccgagcctacatcaagacccaagtgaacaaagagctggagcagctccaggggctggtggaggagcggctcaaggccagcgaggaaaggctcagcagcaagttgactgcactagagcggcccttccagctacctccgggtaaaggcaagagcaagaccaagtgacccccaacattttccccaataaaggtctgggccagaatggcaccatccc

SEQ ID NO: 416662 - DNA, 641 bp, Homo sapiens
agccaatgacaataacagccagcacatacttggcaataggtgtgcagtgcatgccctgctctaagcattttacataaattaactcatttaatcctccctcaatcctatgtgctaggtatcactatccacatttcatacaaggaaactgaggcacagataggttaaataacctgcctaaggtcacacagctactgagtagggatcagaatttgaagctgcaaagtccagcatagccaccctacccaactacctctcacacaagggcttgctaacatttcctaaagggaaacaacattgctacctctatatccccaccaggggaaatttggggactgtttgcccaactagggaccatccccccattgccagacagcatctctcctcaccctgccccttcttccctgcccctgcaggccacatccacgtcctccgagcctacatcaagacccaagtgaacaaagagctggagcagctccaggggctggtggaggagcggctcaaggccagcgaggaaaggctcagcagcaagttgactgcactagagcggcccttccagctacctccgggtaaaggcaagagcaagaccaagtgacccccaacattttccccaataaaggtctgggccagaatggcaccatccc

SEQ ID NO: 416663 - DNA, 1541 bp, Homo sapiens
cccggatgtgaggaaacttctttatcttctgcttctattggttacgcttggtcccgccactcgggtcctctggcttcttcccaaacacctcctctttctctcggtgattggccaagaggcagttcccatagtaactgacaccgcgctcccacttcccagcctggaggacagcaccggccctcgtattagcaacctggaagagagggcgcccaggtgggcactcgcaacttctcacgtatctgcgcgttctcttcgctcccactggcgtgagcctgcgctttccgccttccttccctcacaagcccccttggcaaccgtcgccgttgagacggagggagacgcccccacggattcgccccgccgcgcctctccgcgcgtagattggccggagcgaggcgaacgggcccggccttggtagccgccgaccgagcgctggctgtcctggaacctaggcggcgggagcccggggcgcctcgcggcacggaagagcggcgagatgctcaaccgcaagaccagccactttttgggaatgagggtgcagtcggagcttgaacatctctccgagctgcggcgggaagcggggaaggatcgcagctcagtgcatgggtcggccgcgcggacgcgtgcgagtgtgcggactcagtggacgacggcggcggcggcgaaagcggatgaagaccccggagccaacttgtttccgccgccgctgccccgaccccggatctgcatgtggaagtacctggacgtccattccatgcaccagctggagaagaccaccaatgctgagatgagggaggtgctggctgagctgctggagctagggtgtcctgagcagagcctgagggacgccatcaccctggacctcttctgccacgcgctcattttctgccgccagcagggcttctcactggagcagacgtcagcggcttgtgccctgctccaggatcttcacaaggcttgtattgcaacccccttgggcaacgtggaggagtgctaccgctacttcaccagtgtccttttttgccatggagtcaggcggcctcctttcagcatcgacctcttcaaagaggaacagctgctggccttggaagactacgtggtcaacacttacttccgccacttcaagctctataaatacgtcttcacaccccaggtgcggctggatctgtctttgacttacatggggctacagccacccaaactgtggccagagagtgagacggagaaagaagaaagcaaggagatggaggagcaggcagttaccccgcagaaagaggaactagagacagtggccccaccagagccagagccaagccacatccacgtcctccgagcctacatcaagacccaagtgaacaaagagctggagcagctccaggggctggtggaggagcggctcaaggccagcgaggaaaggctcagcagcaagttgactgcactagagcggcccttccagctacctccgggtaaaggcaagagcaagaccaagtgacccccaacattttccccaataaaggtctgggccagaatggcaccatccc

SEQ ID NO: 416664 - DNA, 1766 bp, Homo sapiens
cccggatgtgaggaaacttctttatcttctgcttctattggttacgcttggtcccgccactcgggtcctctggcttcttcccaaacacctcctctttctctcggtgattggccaagaggcagttcccatagtaactgacaccgcgctcccacttcccagcctggaggacagcaccggccctcgtattagcaacctggaagagagggcgcccaggtgggcactcgcaacttctcacgtatctgcgcgttctcttcgctcccactggcgtgagcctgcgctttccgccttccttccctcacaagcccccttggcaaccgtcgccgttgagacggagggagacgcccccacggattcgccccgccgcgcctctccgcgcgtagattggccggagcgaggcgaacgggcccggccttggtagccgccgaccgagcgctggctgtcctggaacctaggcggcgggagcccggggcgcctcgcggcacggaagagcggcgagatgctcaaccgcaagaccagccactttttgggaatgagggtgcagtcggagcttgaacatctctccgagctgcggcgggaagcggggaaggatcgcagctcagtgcatgggtcggccgcgcggacgcgtgcgagtgtgcggactcagtggacgacggcggcggcggcgaaagcggatgaagaccccggagccaacttgtttccggtgagggcgggacagtctggtctgctcgtgaatatttataaaccggctcccccgcaggcgccacctgtcattatgcttactaacgttcgggacgtctcccgggctgcttgggcgaggagaggcaggggtgtgtgaccccggtggttactgtgctcgcgtagagcacctagggcctgctgaagccctccctcgcccgcgcctctccttagtccttgagatgagatggcaagttacagcggcttctccggcctgctggagattcgctacgggccaggacaccgcagctgccttccccaattcgctttctttccgcagccgccgctgccccgaccccggatctgcatgtggaagtacctggacgtccattccatgcaccagctggagaagaccaccaatgctgagatgagggaggtgctggctgagctgctggagctagggtgtcctgagcagagcctgagggacgccatcaccctggacctcttctgccacgcgctcattttctgccgccagcagggcttctcactggagcagacgtcagcggcttgtgccctgctccaggatcttcacaaggcttgtattgcaacccccttgggcaacgtggaggagtgctaccgctacttcaccagtgtccttttttgccatggagtcaggcggcctcctttcagcatcgacctcttcaaagaggaacagctgctggccttggaagactacgtggtcaacacttacttccgccacttcaagctctataaatacgtcttcacaccccaggtgcggctggatctgtctttgacttacatggggctacagccacccaaactgtggccagagagtgagacgggccacatccacgtcctccgagcctacatcaagacccaagtgaacaaagagctggagcagctccaggggctggtggaggagcggctcaaggccagcgaggaaaggctcagcagcaagttgactgcactagagcggcccttccagctacctccgggtaaaggcaagagcaagaccaagtgacccccaacattttccccaataaaggtctgggccagaatggcaccatccc

SEQ ID NO: 416665 - DNA, 1379 bp, Homo sapiens
attacactgaatatttgcgttctttattgtctccccaacagtcctgtctgtggccagggcatccccattttacagatgagactgaggcctggagatgcaattactccaggtgactggaagttggctttccagcctctccagtccaaagaggaggcagtgtgagaaaaaaagagccaaagacagaatgtaaatggagtctcatggccgctaaggagtattgtacagagggggacactgagggccacagggagtacttgaccaaggtcatacaaggtagtggcagagcagaaaaaagaattcaagattcctaaccctaggctttagaaatggagaggctcataagagttcatttaggcccagagagttaacgatttgcatagtcacacagcaagctggcaaaagagcccagcttcacgccggtggccaactcccagtctcacgcactagctgtcacagccctgtcatgataggtaacggccaccaataactttttcttttactataacaggaagtacctggacgtccattccatgcaccagctggagaagaccaccaatgctgagatgagggagtagggactgaggggggcgtgggaagagctcttggcaaaggctgaggggtcaggttgggaaaacatgaggaatggctgactccaaagcatgtggtgggtgtagggtgatgaaaggaggcccagttgtcactcactcctctctccctcccaagggtgctggctgagctgctggagctagggtgtcctgagcagagcctgagggacgccatcaccctggacctcttctgccacgcgctcattttctgccgccagcagggcttctcactggagcagacgtcagcggcttgtgccctgctccaggatcttcacaaggcttgtattgcaacccccttgggcaacgtggaggagtgctaccgctacttcaccagtgtccttttttgccatggagtcaggcggcctcctttcagcatcgacctcttcaaagaggaacagctgctggccttggaagactacgtggtcaacacttacttccgccacttcaagctctataaatacgtcttcacaccccaggtgcggctggatctgtctttgacttacatggggctacagccacccaaactgtggccagagagtgagacgggccacatccacgtcctccgagcctacatcaagacccaagtgaacaaagagctggagcagctccaggggctggtggaggagcggctcaaggccagcgaggaaaggctcagcagcaagttgactgcactagagcggcccttccagctacctccgggtaaaggcaagagcaagaccaagtgacccccaacattttccccaataaaggtctgggccagaatggcaccatccc

SEQ ID NO: 416666 - DNA, 1660 bp, Homo sapiens
cccggatgtgaggaaacttctttatcttctgcttctattggttacgcttggtcccgccactcgggtcctctggcttcttcccaaacacctcctctttctctcggtgattggccaagaggcagttcccatagtaactgacaccgcgctcccacttcccagcctggaggacagcaccggccctcgtattagcaacctggaagagagggcgcccaggtgggcactcgcaacttctcacgtatctgcgcgttctcttcgctcccactggcgtgagcctgcgctttccgccttccttccctcacaagcccccttggcaaccgtcgccgttgagacggagggagacgcccccacggattcgccccgccgcgcctctccgcgcgtagattggccggagcgaggcgaacgggcccggccttggtagccgccgaccgagcgctggctgtcctggaacctaggcggcgggagcccggggcgcctcgcggcacggaagagcggcgagatgctcaaccgcaagaccagccactttttgggaatgagggtgcagtcggagcttgaacatctctccgagctgcggcgggaagcggggaaggatcgcagctcagtgcatgggtcggccgcgcggacgcgtgcgagtgtgcggactcagtggacgacggcggcggcggcgaaagcggatgaagaccccggagccaacttgtttccggtgagggcgggacagtctggtctgctcgtgaatatttataaaccggctcccccgcaggcgccacctgtcattatgcttactaacgttcgggacgtctcccgggctgcttgggcgaggagaggcaggggtgtgtgaccccggtggttactgtgctcgcgtagagcacctagggcctgctgaagccctccctcgcccgcgcctctccttagtccttgagatgagatggcaagttacagcggcttctccggcctgctggagattcgctacgggccaggacaccgcagctgccttccccaattcgctttctttccgcagccgccgctgccccgaccccggatctgcatgtggaagtacctggacgtccattccatgcaccagctggagaagaccaccaatgctgagatgagggagtagggactgaggggggcgtgggaagagctcttggcaaaggctgaggggtcaggttgggaaaacatgaggaatggctgactccaaagcatgtggtgggtgtagggtgatgaaaggaggcccagttgtcactcactcctctctccctcccaagggtgctggctgagctgctggagctagggtgtcctgagcagagcctgagggacgccatcaccctggacctcttctgccacgcgctcattttctgccgccagcagggcttctcactggagcagacgtcagcggcttgtgccctgctccaggatcttcacaaggcttgtattggccacatccacgtcctccgagcctacatcaagacccaagtgaacaaagagctggagcagctccaggggctggtggaggagcggctcaaggccagcgaggaaaggctcagcagcaagttgactgcactagagcggcccttccagctacctccgggtaaaggcaagagcaagaccaagtgacccccaacattttccccaataaaggtctgggccagaatggcaccatccc

SEQ ID NO: 416667 - DNA, 628 bp, Homo sapiens
cgccggtggccaactcccagtctcacgcactagctgtcacagccctgtcatgataggtaacggccaccaataactttttcttttactataacaggaagtacctggacgtccattccatgcaccagctggagaagaccaccaatgctgagatgagggagtagggactgaggggggcgtgggaagagctcttggcaaaggctgaggggtcaggttgggaaaacatgaggaatggctgactccaaagcatgtggtgggtgtagggtgatgaaaggaggcccagttgtcactcactcctctctccctcccaagggtgctggctgagctgctggagctagggtgtcctgagcagagcctgagggacgccatcaccctggacctcttctgccacgcgctcattttctgccgccagcagggcttctcactggagcagacgtcagcggcttgtgccctgctccaggatcttcacaaggcttgtattggtgagagggggcagctaccaggtttgagccccagggagaagaggaaccgggcctggcacaagtgaccatgggaagcagaagcaggggatttctgcctggaatatgtcattattagtagcatcatcatacacaagccatcagctttccaa

SEQ ID NO: 416668 - DNA, 1352 bp, Homo sapiens
  misc_feature (974)..(974): n is a, c, g, or t
cccggatgtgaggaaacttctttatcttctgcttctattggttacgcttggtcccgccactcgggtcctctggcttcttcccaaacacctcctctttctctcggtgattggccaagaggcagttcccatagtaactgacaccgcgctcccacttcccagcctggaggacagcaccggccctcgtattagcaacctggaagagagggcgcccaggtgggcactcgcaacttctcacgtatctgcgcgttctcttcgctcccactggcgtgagcctgcgctttccgccttccttccctcacaagcccccttggcaaccgtcgccgttgagacggagggagacgcccccacggattcgccccgccgcgcctctccgcgcgtagattggccggagcgaggcgaacgggcccggccttggtagccgccgaccgagcgctggctgtcctggaacctaggcggcgggagcccggggcgcctcgcggcacggaagagcggcgagatgctcaaccgcaagaccagccactttttgggaatgagggtgcagtcggagcttgaacatctctccgagctgcggcgggaagcggggaaggatcgcagctcagtgcatgggtcggccgcgcggacgcgtgcgagtgtgcggactcagtggacgacggcggcggcggcgaaagcggatgaagaccccggagccaacttgtttccgccgccgctgccccgaccccggatctgcatgtggaagtacctggacgtccattccatgcaccagctggagaagaccaccaatgctgagatgagggaggtgctggctgagctgctggagctagggtgtcctgagcagagcctgagggacgccatcaccctggacctcttctgccacgcgctcatttttcttgcccggccaggcaaggggccttttcttccaacttggaggcaaggaacgttcaagctggggcttgggtggccccttggattccccnaagggaattctttcaacgaagggcctttggttattttggcaaaagccacccttttggagggccaaaccgttgggaagggaagttggcttaacccggcttaacttttcaaacccaaagttggttcccttctatattttggcgccccatatgcgggagagtctccaagggccggagacactatacctctttatgcccagaaggcgaatctcgggacgcccctctcctttcctcgacaaaggagcagaggggaaacaccaagaggcttgttgcctggggcggcacctatgtggcgcacaagaggaacacttacaagggtgagtgggacctcagaagcgcacaacgttttaacaccgtccccgcgggcccagaacttgtcga

SEQ ID NO: 416669 - DNA, 1451 bp, Homo sapiens
cccggatgtgaggaaacttctttatcttctgcttctattggttacgcttggtcccgccactcgggtcctctggcttcttcccaaacacctcctctttctctcggtgattggccaagaggcagttcccatagtaactgacaccgcgctcccacttcccagcctggaggacagcaccggccctcgtattagcaacctggaagagagggcgcccaggtgggcactcgcaacttctcacgtatctgcgcgttctcttcgctcccactggcgtgagcctgcgctttccgccttccttccctcacaagcccccttggcaaccgtcgccgttgagacggagggagacgcccccacggattcgccccgccgcgcctctccgcgcgtagattggccggagcgaggcgaacgggcccggccttggtagccgccgaccgagcgctggctgtcctggaacctaggcggcgggagcccggggcgcctcgcggcacggaagagcggcgagatgctcaaccgcaagaccagccactttttgggaatgagggtgcagtcggagcttgaacatctctccgagctgcggcgggaagcggggaaggatcgcagctcagtgcatgggtcggccgcgcggacgcgtgcgagtgtgcggactcagtggacgacggcggcggcggcgaaagcggatgaagaccccggagccaacttgtttccgccgccgctgccccgaccccggatctgcatgtggaagtacctggacgtccattccatgcaccagctggagaagaccaccaatgctgagatgagggaggtgctggctgagctgctggagctagggtgtcctgagcagagcctgagggacgccatcaccctggacctcttctgccacgcgctcattttctgccgccagcagggcttctcactggagcagacgtcagcggcttgtgccctgctccaggatcttcacaaggcttgtattgcaacccccttgggcaacgtggaggagtgctaccgctacttcaccagtgtccttttttgccatggagtcaggcggcctcctttcagcatcgacctcttcaaagaggaacagctgctggccttggaagactacgtggtcaacacttacttccgccacttcaagctctataaatacgtcttcacaccccaggtgcggctggatctgtctttgacttacatggggctacagccacccaaactgtggccagagagtgagacgggccacatccacgtcctccgagcctacatcaagacccaagtgaacaaagagctggagcagctccaggggctggtggaggagcggctcaaggccagcgaggaaaggctcagcagcaagttgactgcactagagcggcccttccagctacctccgggtaaaggcaagagcaagaccaagtgacccccaacattttccccaataaaggtctgggccagaatggcaccatccc

SEQ ID NO: 416670 - DNA, 1215 bp, Homo sapiens
gacgagtcctacatcaagacccaagtgaacaaagagctggagcagctccaggggctggtggaggagcggctcaaggccagcgaagaaaggctcagcagcaagttgactgcactaaagcggatgaagaccccggagccaacttgtttccggtgagggcgggacagtctggtctgctcgtgaatatttataaaccggctcccccgcaggcgccacctgtcattatgcttactaacgttcgggacgtctcccgggctgcttgggcgaggagaggcaggggtgtgtgaccccggtggttactgtgctcgcgtagagcacctagggcctgctgaagccctccctcgcccgcgcctctccttagtccttgagatgagatggcaagttacagcggcttctccggcctgctggagattcgctacgggccaggacaccgcagctgccttccccaattcgctttctttccgcagccgccgctgccccgaccccggatctgcatgtggaagtacctggacgtccattccatgcaccagctggagaagaccaccaatgctgagatgagggaggtgctggctgagctgctggagctagggtgtcctgagcagagcctgagggacgccatcaccctggacctcttctgccacgcgctcattttctgccgccagcagggcttctcactggagcagacgtcagcggcttgtgccctgctccaggatcttcacaaggcttgtattgcaacccccttgggcaacgtggaggagtgctaccgctacttcaccagtgtccttttttgccatggagtcaggcggcctcctttcagcatcgacctcttcaaagaggaacagctgctggccttggaagactacgtggtcaacacttacttccgccacttcaagctctataaatacgtcttcacaccccaggtgcggctggatctgtctttgacttacatggggctacagccacccaaactgtggccagagagtgagacgggccacatccacgtcctccgagcctacatcaagacccaagtgaacaaagagctggagcagctccaggggctggtggaggagcggctcaaggccagcgaggaaaggctcagcagcaagttgactgcactagagcggcccttccagctacctccgggtaaaggcaagagcaagaccaagtgacccccaacattttccccaataaaggtctgggccagaatggcaccatccc

SEQ ID NO: 416671 - DNA, 1445 bp, Homo sapiens
cccggatgtgaggaaacttctttatcttctgcttctattggttacgcttggtcccgccactcgggtcctctggcttcttcccaaacacctcctctttctctcggtgattggccaagaggcagttcccatagtaactgacaccgcgctcccacttcccagcctggaggacagcaccggccctcgtattagcaacctggaagagagggcgcccaggtgggcactcgcaacttctcacgtatctgcgcgttctcttcgctcccactggcgtgagcctgcgctttccgccttccttccctcacaagcccccttggcaaccgtcgccgttgagacggagggagacgcccccacggattcgccccgccgcgcctctccgcgcgtagattggccggagcgaggcgaacgggcccggccttggtagccgccgaccgagcgctggctgtcctggaacctaggcggcgggagcccggggcgcctcgcggcacggaagagcggcgagatgctcaaccgcaagaccagccactttttgggaatgagggtgcagtcggagcttgaacatctctccgagctgcggcgggaagcggggaaggatcgcagctcagtgcatgggtcggccgcgcggacgcgtgcgagtgtgcggactcagtggacgacggcggcggcggcgaaagcggatgaagaccccggagccaacttgtttccggtgagggcgggacagtctggtctgctcgtgaatatttataaaccggctcccccgcaggcgccacctgtcattatgcttactaacgttcgggacgtctcccgggctgcttgggcgaggagaggcaggggtgtgtgaccccggtggttactgtgctcgcgtagagcacctagggcctgctgaagccctccctcgcccgcgcctctccttagtccttgagatgagatggcaagttacagcggcttctccggcctgctggagattcgctacgggccaggacaccgcagctgccttccccaattcgctttctttccgcagccgccgctgccccgaccccggatctgcatgtgggtgctggctgagctgctggagctagggtgtcctgagcagagcctgagggacgccatcaccctggacctcttctgccacgcgctcattttctgccgccagcagggcttctcactggagcagacgtcagcggcttgtgccctgctccaggatcttcacaaggcttgtattggccacatccacgtcctccgagcctacatcaagacccaagtgaacaaagagctggagcagctccaggggctggtggaggagcggctcaaggccagcgaggaaaggctcagcagcaagttgactgcactagagcggcccttccagctacctccgggtaaaggcaagagcaagaccaagtgacccccaacattttccccaataaaggtctgggccagaatggcaccatccc

SEQ ID NO: 416672 - DNA, 6202 bp, Homo sapiens
cgcgcggggactgtgggaagcggagtgacggagcgagcggctgttggaggaaggaggtgggggccgggagcgcaaatggcgttgagatggttcagggccctgttcaaactccagcactgaccattcaccggcggaagcggcgccgctcctgcccccccaaccgggcttcctatttaccgaaagcagagtccctcgcctctctcggctctcacctgccggccctgctctcccgcgcgagggttccgcgcccgcccgcgggccgtagggagcgggagaggcggaggcggcccgtggccaaagcacccgccaggctccgaggagaatatgaaactggtgtcaaaatgacatccagatttgggaaaacatacagtaggaaaggtggaaatggcagttcaaaattcgatgaagtcttttccaacaaacggactacccttagcacaaaatggggagagaccacatttatggctaaattagggcagaagaggcccaatttcaaaccagatatccaagaaattccgaagaaacctaaagtggaagaagaaagtactggagatccttttggatttgatagtgatgatgagtctctaccagtttcttcaaagaatttagcccaggttaagtgttcctcttattcagaatctagtgaagctgctcagttggaagaggtcacttcagtacttgaagctaatagcaaaattagtcatgtggtcgttgaagacactgtcgtttctgataaatgcttccctttggaggacactttacttgggaaagaaaagagcacaaaccgaattgtagaagatgatgcaagcataagtagctgtaataaattaataacttcagataaagtggagaattttcatgaagaacatgaaaagaatagtcaccatattcacaaaaatgctgatgacagtactaagaaacccaatgcagaaactacagtggcttctgaaatcaaggaaacaaatgatacttggaactcccagtttgggaaaaggccagaatcaccatcagaaatatctccaatcaagggatctgttagaactggtttgtttgaatgggataatgattttgaagatatcagatcagaagactgtattttaagtttggatagtgatccccttttggagatgaaggatgacgattttaaaaatcgattggaaaatctgaatgaagccattgaggaagatattgtacaaagtgttcttaggccaaccaactgtaggacgtactgtagggccaataaaacgaaatcctcccaaggagcatcaaattttgataagctgatggacggcaccagtcaggccttagccaaagcaaacagtgaatcgagtaaagatggcctgaatcaggcaaagaaagggggtgtaagttgtgggaccagttttagagggacagttggacggactagagattacactgttttacatccatcttgcttgtcagtttgtaatgttaccatacaggatactatggaacgcagcatggatgagttcactgcatccactcctgcagatttgggagaagctggtcgtctcagaaaaaaggcagatattgcaacttctaagactactactagatttcgacctagtaatactaaatccaaaaaggatgttaaacttgaattttttggttttgaagatcatgagacaggaggtgatgaaggaggttctggaagttctaattacaaaattaagtattttggctttgatgatctcagtgaaagcgaagatgatgaagatgatgactgtcaagtagaaagaaagacaagcaaaaaaagaactaaaacagctccatcaccctccttgcagcctcccccagaaagcaatgataattcccaggacagtcagtctggtactaacaatgcagaaaacttggattttacagaggacttgcctggtgtgcctgaaagtgtgaagaagcccataaataaacaaggagataaatcaaaggaaaataccagaaagatttttagtggccccaaacggtcacccacaaaagctgtatataatgccagacattggaatcatccagattcagaagaactgcctgggccaccagtagtaaaacctcagagtgtcacagtgaggctgtcttcaaaggaaccaaatcaaaaagatgatggagtttttaaggctcctgcaccaccatccaaagtgataaaaactgtgacaatacctactcagccctaccaagatatagttactgcactgaaatgcagacgagaagacaaagaattatatactgttgttcagcacgtgaagcacttcaacgatgttgtagaatttggtgaaaatcaagagttcactgatgacattgagtacttgttaagtggcttaaagagcactcagcctctaaacacacgttgccttagtgttattagcttggctactaaatgtgccatgcccagttttcgaatgcacctgagagcacatgggatggtagcaatggtctttaaaaccttggatgattcccagcaccatcagaatctgtccctctgtacagctgccctcatgtatatactgagtagagatcgtttgaacatggatcttgatagagctagcttagatctaatgattcgacttttggaactggaacaagatgcttcatcagccaagctactgaatgaaaaagacatgaacaaaattaaagaaaaaatccgaaggctctgtgaaactgtacacaacaagcatcttgatctagaaaatataacgactgggcatttagctatggagacattattatcccttacttctaaacgagcaggagactggtttaaagaagaactccggcttttgggtggtctggatcatattgtagataaagtaaaagaatgtgtggatcatttaagtagagatgaggatgaagagaaactggtagcctcactatggggagcagagagatgtttacgagttttagaaagtgtaactgtgcataatcccgaaaatcaaagctacttgatagcatataaagattcccaacttattgtttcatcagctaaagcattacagcattgtgaagaactgattcagcagtacaaccgtgctgaggacagcatatgcttagctgacagtaagcctctgcctcaccagaatgtaactaaccatgtaggcaaagcagtggaggactgcatgagggccatcatcggggtgttgcttaatttaactaatgataatgagtggggcagcaccaaaacaggagagcaggacggtctcataggcacagcgctgaactgtgtgcttcaggttccaaagtacctacctcaggagcagagatttgatattcgagtgctgggcttaggtctgctgataaatctagtggagtatagtgctcggaatcggcactgtcttgtcaacatggaaacatcgtgctcttttgattcttccatctgtagtggagaaggggatgatagtttaaggataggtggacaagttcatgctgtccaggctttagtgcagctattccttgagcgagagcgggcagcccagctagcagaaagtaaaacagatgagttgatcaaagatgctcccaccactcagcatgataagagtggagagtggcaagaaacaagtggagaaatacagtgggtgtcaactgaaaagactgatggtacagaagagaaacataagaaggaggaggaggatgaagaacttgacctcaataaagcccttcagcatgccggcaaacacatggaggattgcattgtggcctcctacacggcactacttcttgggtgtctctgccaggaaagtccaatcaatgtaaccactgtgcgggaatatctgccagaaggagacttttcaataatgacagagatgctcaaaaaatttttgagttttatgaatctcacttgtgctgttggaacaactggccagaaatctatctctagagtgattgaatatttggaacattgctagctgctttacctttgcttcaggtgctcggtaatgctggagctatccttagacaaagaaaagtcaagtcatgaaagaagtccttgaagatataccaagaacattcatcagtatcattcgtgtttggatttttaaggccacctgatttcttcgtcatgcattcggcatttgctaaatgacagttactacatcaatctgcaactatcaaaaatgaggggaaaaggttcaggctgttaacaattccatgcagtatttaaatacatttactttggcagagtttataccctccccttgttttcttgctttattctgggcaagtttgaaggggaaaatttgtgctgctgttagtgcaactgctgtgtatgttgagccactgttgtcatgccagccaggtgcaaaggcagcttagctactgaggtagcgaatgttctgaggacattctagacaacagcttagttcctttttcaggctcatttgcttttgcttttttgttgaatgattccaatcgtaaataaagcttttaataattttgtgaattttttggttgttgttccctgaactactgtctatatttaaaattagatggaatccaaagatacacgggattaatagtatatttttttattcttgattaggtttgggttattgaactattttttacttttgagaccacaaccatattcaatatcataccataatgtgtcatagctataggcacaagaaaaacaacagtttgagagaatattatataagatgatgtgccctgttaaaaggaggaggcaaaatagtcaaacccagggtagtttacacttaatgctagggaggctcttaaaacattattagattttgaggaaagactctctagatatattttctaatgttcagtacaataaatataaggaagctaaaacaccaatgtggaattcctgtttccagataacatgtatattcttctatagagtgacaggatcaattgcataagcgcaaagccttaaattgctggtttagagaagacccttttttcattcagattctttgttcgtagagcagttatttgaaaaacagttatggaacacaaaacattttatagatttaatatcataacattgcaaatttttcttgtattattgttcacaccactggttatacttttttttttccttttttattgattgggcctgaatacaggctttctagagatctttttcattaatacttttaaatacctttcaggtagttacatcatgtttcttcattggatttgtaaaacttgaagccataaaaatattagtttggtgtgtattggggaaaatagctaaaagtctaatttttacccatttagactttgttatttccttgtataaagtgacaaatcggggctcttgtatcagtgccagctgtaatgtttttaaatgcagtggctgccttctattgtcttcctatttttgataatgcagattgttgggaaatctgtaaggaagtaactgattccaggcaaattgttttcttccttctacccaccccaacccctacccatcaccttttaagaacatagtacgccagtgtaacgtgggaaccattgagattgtatttgccctgagtattaaagctagcttagcaaaatacttttaaaaacatattggtaaatgatacccataaaattaaattagttatattttattttaaaatgcaaaatacattgatatttattaatcattggatttagggaaagggacagatttttggtgaacctgacttgtggcagatggtaaggaatattataaaacatttggatgagaacaatcagggcgaactgcatttttctgttacactggtaatcatttgaaaattgatttacctcagtgtttaacagttttttgttttgttttgttttttaaataataactaattgtcgagcactgatagagatgcagattttggtggggggaggtggtgggggagataatcacttcaccaactgcagtgcatttgtgtgtttttaaccctcagagaactctgcattttagggtacttgaggctgacttaactaaaagttttaaagtaaccttttttccattgtaaatatttctgtaaatactaccaattggaaattagaacagtagagtacttttctgaatccaatcctatttttattttatacagtatttctcagctgtgatctttggagcaaaagccaacggcaggaaaaaatagtttgtaccagtttcatgaagtatgtctttgggtttttgtaaataattttaactcaaataaaattgctactttcaata

SEQ ID NO: 416673 - DNA, 1818 bp, Homo sapiens
gggattcccagcaccatcagaatctgtccctctgtacagctgccctcatgtatatactgagtagagatcgtttgaacatggatcttgatagagctagcttagatctaatgattcgacttttggaactggaacaagatgcttcatcagccaagctactgaatgaaaaagacatgaacaaaattaaagaaaaaatccgaaggctctgtgaaactgtacacaacaagcatcttgatctagaaaatataacgactgggcatttagctatggagacattattatcccttacttctaaacgagcaggagactggtttaaagaagaactccggcttttgggtggtctggatcatattgtagataaagtaaaagaatgtgtggatcatttaagtagagatgaggatgaagagaaactggtagcctcactatggggagcagagagatgtttacgagttttagaaagtgtaactgtgcataatcccgaaaatcaaagctacttgatagcatataaagattcccaacttattgtttcatcagctaaagcattacagcattgtgaagaactgattcagcagtacaaccgtgctgaggacagcatatgcttagctgacagtaagcctctgcctcaccagaatgtaactaaccatgtaggcaaagcagtggaggactgcatgagggccatcatcggggtgttgcttaatttaactaatgataatgagtggggcagcaccaaaacaggagagcaggacggtctcataggcacagcgctgaactgtgtgcttcaggttccaaagtacctacctcaggagcagagatttgatattcgagtgctgctattccttgagcgagagcgggcagcccagctagcagaaagtaaaacagatgagttgatcaaagatgctcccaccactcagcatgataagagtggagagtggcaagaaacaagtggagaaatacagtgggtgtcaactgaaaagactgatggtacagaagagaaacataagaaggaggaggaggatgaagaacttgacctcaataaagcccttcagcatgccggcaaacacatggaggattgcattgtggcctcctacacggcactacttcttgggtgtctctgccaggaaagtccaatcaatgtaaccactgtgcgggaatatctgccagaaggagacttttcaataatgacagagatgctcaaaaaatttttgagttttatgaatctcacttgtgctgttggaacaactggccagaaatctatctctagagtgattgaatatttggaacattgctagctgctttacctttgcttcaggtgctcggtaatgctggagctatccttagacaaagaaaagtcaagtcatgaaagaagtccttgaagatataccaagaacattcatcagtatcattcgtgtttggatttttaaggccacctgatttcttcgtcatgcattcggcatttgctaaatgacagttactacatcaatctgcaactatcaaaaatgaggggaaaaggttcaggctgttaacaattccatgcagtatttaaatacatttactttggcagagtttataccctccccttgttttcttgctttattctgggcaagtttgaaggggaaaatttgtgctgctgttagtgcaactgctgtgtatgttgagccactgttgtcatgccagccaggtgcaaaggcagcttagctactgaggtagcgaatgttctgaggacattctagacaacagcttagttcctttttcaggctcatttgcttttgcttttttgttgaatgattccaatcgtaaataaagcttttaataattttgtga

SEQ ID NO: 416674 - DNA, 714 bp, Homo sapiens
ccccctccccgggtactggcaaccactaatctactttctgtgtctatggatttgcctgttttggacattccatttaaaaaggagtcatacaatatgttgccttttatgactggcttctttcagccagcagaatgttttcaaagttcatccgtgatacagtatttgttaatactgtattccttagacaaataatattccataatattgttataccatagtttatttgtttactgatggacatttgagtggtttctgctttttagctttttgaacagttatctacaagtttttttgtagacatacattttcatttcttttggatttatacctaggagttggaattgttggattgtatgtaactgtgtgttttaacattctaagaaaatgccaaattgttttccagtgtggctgcactattttacattcccatcagcaacgtatgaaggttccaagttacttgtattgtaaaagaaaatttttagtcatcctagtgggcgtgacatgatatctcattgtggtttgatttgcagttccctggtgattaatgatgctgaccatcttttcatgaactcattggccatttgtgtatcttgtttgaagaaatctctaagtcttctgcccggttttgtgggttgtttttgttgtttttgagacagagtcttgctctgtcaccccactgcacttcagcctgggcttcagagtgagactgtttca

SEQ ID NO: 416675 - DNA, 6335 bp, Homo sapiens
cgcgcggggactgtgggaagcggagtgacggagcgagcggctgttggaggaaggaggtgggggccgggagcgcaaatggcgttgagatggttcagggccctgttcaaactccagcactgaccattcaccggcggaagcggcggcgcaggaggcggcggcggcccagcgggggcacacagcaggctctgttaccagctccagcagtggcggccagcgagagctaggcccgggcccggccggcggcgctcgaggcggggagggaagttgcggggccgccgctcctgcccccccaaccgggcttcctatttaccgaaagcagagtccctcgcctctctcggctctcacctgccggccctgctctcccgcgcgagggttccgcgcccgcccgcgggccgtagggagcgggagaggcggaggcggcccgtggccaaagcacccgccaggctccgaggagaatatgaaactggtgtcaaaatgacatccagatttgggaaaacatacagtaggaaaggtggaaatggcagttcaaaattcgatgaagtcttttccaacaaacggactacccttagcacaaaatggggagagaccacatttatggctaaattagggcagaagaggcccaatttcaaaccagatatccaagaaattccgaagaaacctaaagtggaagaagaaagtactggagatccttttggatttgatagtgatgatgagtctctaccagtttcttcaaagaatttagcccaggttaagtgttcctcttattcagaatctagtgaagctgctcagttggaagaggtcacttcagtacttgaagctaatagcaaaattagtcatgtggtcgttgaagacactgtcgtttctgataaatgcttccctttggaggacactttacttgggaaagaaaagagcacaaaccgaattgtagaagatgatgcaagcataagtagctgtaataaattaataacttcagataaagtggagaattttcatgaagaacatgaaaagaatagtcaccatattcacaaaaatgctgatgacagtactaagaaacccaatgcagaaactacagtggcttctgaaatcaaggaaacaaatgatacttggaactcccagtttgggaaaaggccagaatcaccatcagaaatatctccaatcaagggatctgttagaactggtttgtttgaatgggataatgattttgaagatatcagatcagaagactgtattttaagtttggatagtgatccccttttggagatgaaggatgacgattttaaaaatcgattggaaaatctgaatgaagccattgaggaagatattgtacaaagtgttcttaggccaaccaactgtaggacgtactgtagggccaataaaacgaaatcctcccaaggagcatcaaattttgataagctgatggacggcaccagtcaggccttagccaaagcaaacagtgaatcgagtaaagatggcctgaatcaggcaaagaaagggggtgtaagttgtgggaccagttttagagggacagttggacggactagagattacactgttttacatccatcttgcttgtcagtttgtaatgttaccatacaggatactatggaacgcagcatggatgagttcactgcatccactcctgcagatttgggagaagctggtcgtctcagaaaaaaggcagatattgcaacttctaagactactactagatttcgacctagtaatactaaatccaaaaaggatgttaaacttgaattttttggttttgaagatcatgagacaggaggtgatgaaggaggttctggaagttctaattacaaaattaagtattttggctttgatgatctcagtgaaagcgaagatgatgaagatgatgactgtcaagtagaaagaaagacaagcaaaaaaagaactaaaacagctccatcaccctccttgcagcctcccccagaaagcaatgataattcccaggacagtcagtctggtactaacaatgcagaaaacttggattttacagaggacttgcctggtgtgcctgaaagtgtgaagaagcccataaataaacaaggagataaatcaaaggaaaataccagaaagatttttagtggccccaaacggtcacccacaaaagctgtatataatgccagacattggaatcatccagattcagaagaactgcctgggccaccagtagtaaaacctcagagtgtcacagtgaggctgtcttcaaaggaaccaaatcaaaaagatgatggagtttttaaggctcctgcaccaccatccaaagtgataaaaactgtgacaatacctactcagccctaccaagatatagttactgcactgaaatgcagacgagaagacaaagaattatatactgttgttcagcacgtgaagcacttcaacgatgttgtagaatttggtgaaaatcaagagttcactgatgacattgagtacttgttaagtggcttaaagagcactcagcctctaaacacacgttgccttagtgttattagcttggctactaaatgtgccatgcccagttttcgaatgcacctgagagcacatgggatggtagcaatggtctttaaaaccttggatgattcccagcaccatcagaatctgtccctctgtacagctgccctcatgtatatactgagtagagatcgtttgaacatggatcttgatagagctagcttagatctaatgattcgacttttggaactggaacaagatgcttcatcagccaagctactgaatgaaaaagacatgaacaaaattaaagaaaaaatccgaaggctctgtgaaactgtacacaacaagcatcttgatctagaaaatataacgactgggcatttagctatggagacattattatcccttacttctaaacgagcaggagactggtttaaagaagaactccggcttttgggtggtctggatcatattgtagataaagtaaaagaatgtgtggatcatttaagtagagatgaggatgaagagaaactggtagcctcactatggggagcagagagatgtttacgagttttagaaagtgtaactgtgcataatcccgaaaatcaaagctacttgatagcatataaagattcccaacttattgtttcatcagctaaagcattacagcattgtgaagaactgattcagcagtacaaccgtgctgaggacagcatatgcttagctgacagtaagcctctgcctcaccagaatgtaactaaccatgtaggcaaagcagtggaggactgcatgagggccatcatcggggtgttgcttaatttaactaatgataatgagtggggcagcaccaaaacaggagagcaggacggtctcataggcacagcgctgaactgtgtgcttcaggttccaaagtacctacctcaggagcagagatttgatattcgagtgctgggcttaggtctgctgataaatctagtggagtatagtgctcggaatcggcactgtcttgtcaacatggaaacatcgtgctcttttgattcttccatctgtagtggagaaggggatgatagtttaaggataggtggacaagttcatgctgtccaggctttagtgcagctattccttgagcgagagcgggcagcccagctagcagaaagtaaaacagatgagttgatcaaagatgctcccaccactcagcatgataagagtggagagtggcaagaaacaagtggagaaatacagtgggtgtcaactgaaaagactgatggtacagaagagaaacataagaaggaggaggaggatgaagaacttgacctcaataaagcccttcagcatgccggcaaacacatggaggattgcattgtggcctcctacacggcactacttcttgggtgtctctgccaggaaagtccaatcaatgtaaccactgtgcgggaatatctgccagaaggagacttttcaataatgacagagatgctcaaaaaatttttgagttttatgaatctcacttgtgctgttggaacaactggccagaaatctatctctagagtgattgaatatttggaacattgctagctgctttacctttgcttcaggtgctcggtaatgctggagctatccttagacaaagaaaagtcaagtcatgaaagaagtccttgaagatataccaagaacattcatcagtatcattcgtgtttggatttttaaggccacctgatttcttcgtcatgcattcggcatttgctaaatgacagttactacatcaatctgcaactatcaaaaatgaggggaaaaggttcaggctgttaacaattccatgcagtatttaaatacatttactttggcagagtttataccctccccttgttttcttgctttattctgggcaagtttgaaggggaaaatttgtgctgctgttagtgcaactgctgtgtatgttgagccactgttgtcatgccagccaggtgcaaaggcagcttagctactgaggtagcgaatgttctgaggacattctagacaacagcttagttcctttttcaggctcatttgcttttgcttttttgttgaatgattccaatcgtaaataaagcttttaataattttgtgaattttttggttgttgttccctgaactactgtctatatttaaaattagatggaatccaaagatacacgggattaatagtatatttttttattcttgattaggtttgggttattgaactattttttacttttgagaccacaaccatattcaatatcataccataatgtgtcatagctataggcacaagaaaaacaacagtttgagagaatattatataagatgatgtgccctgttaaaaggaggaggcaaaatagtcaaacccagggtagtttacacttaatgctagggaggctcttaaaacattattagattttgaggaaagactctctagatatattttctaatgttcagtacaataaatataaggaagctaaaacaccaatgtggaattcctgtttccagataacatgtatattcttctatagagtgacaggatcaattgcataagcgcaaagccttaaattgctggtttagagaagacccttttttcattcagattctttgttcgtagagcagttatttgaaaaacagttatggaacacaaaacattttatagatttaatatcataacattgcaaatttttcttgtattattgttcacaccactggttatacttttttttttccttttttattgattgggcctgaatacaggctttctagagatctttttcattaatacttttaaatacctttcaggtagttacatcatgtttcttcattggatttgtaaaacttgaagccataaaaatattagtttggtgtgtattggggaaaatagctaaaagtctaatttttacccatttagactttgttatttccttgtataaagtgacaaatcggggctcttgtatcagtgccagctgtaatgtttttaaatgcagtggctgccttctattgtcttcctatttttgataatgcagattgttgggaaatctgtaaggaagtaactgattccaggcaaattgttttcttccttctacccaccccaacccctacccatcaccttttaagaacatagtacgccagtgtaacgtgggaaccattgagattgtatttgccctgagtattaaagctagcttagcaaaatacttttaaaaacatattggtaaatgatacccataaaattaaattagttatattttattttaaaatgcaaaatacattgatatttattaatcattggatttagggaaagggacagatttttggtgaacctgacttgtggcagatggtaaggaatattataaaacatttggatgagaacaatcagggcgaactgcatttttctgttacactggtaatcatttgaaaattgatttacctcagtgtttaacagttttttgttttgttttgttttttaaataataactaattgtcgagcactgatagagatgcagattttggtggggggaggtggtgggggagataatcacttcaccaactgcagtgcatttgtgtgtttttaaccctcagagaactctgcattttagggtacttgaggctgacttaactaaaagttttaaagtaaccttttttccattgtaaatatttctgtaaatactaccaattggaaattagaacagtagagtacttttctgaatccaatcctatttttattttatacagtatttctcagctgtgatctttggagcaaaagccaacggcaggaaaaaatagtttgtaccagtttcatgaagtatgtctttgggtttttgtaaataattttaactcaaataaaattgctactttcaata

SEQ ID NO: 416676 - DNA, 6317 bp, Homo sapiens
cgcgcggggactgtgggaagcggagtgacggagcgagcggctgttggaggaaggaggtgggggccgggagcgcaaatggcgttgagatggttcagggccctgttcaaactccagcactgaccattcaccggcggaagcggcggcgcaggaggcggcggcggcccagcgggggcacacagcaggctctgttaccagctccagcagtggcggccagcgagagctaggcccgggcccggccggcggcgctcgaggcggggagggaagttgcggggccgccgctcctgcccccccaaccgggcttcctatttaccgaaagcagagtccctcgcctctctcggctctcacctgccggccctgctctcccgcgcgagggttccgcgcccgcccgcgggccgtagggagcgggagaggcggaggcggcccgtggccaaagcacccgccaggctccgaggagaatatgaaactggtgtcaaaatgacatccagatttgggaaaacatacagtaggaaaggtggaaatggcagttcaaaattcgatgaagtcttttccaacaaacggactacccttagcacaaaatggggagagaccacatttatggctaaattagggcagaagaggcccaatttcaaaccagatatccaagaaattccgaagaaacctaaagtggaagaagaaagtactggagatccttttggatttgatagtgatgatgagtctctaccagtttcttcaaagaatttagcccaggttaagtgttcctcttattcagaatctagtgaagctgctcagttggaagaggtcacttcagtacttgaagctaatagcaaaattagtcatgtggtcgttgaagacactgtcgtttctgataaatgcttccctttggaggacactttacttgggaaagaaaagagcacaaaccgaattgtagaagatgatgcaagcataagtagctgtaataaattaataacttcagataaagtggagaattttcatgaagaacatgaaaagaatagtcaccatattcacaaaaatgctgatgacagtactaagaaacccaatgcagaaactacagtggcttctgaaatcaaggaaacaaatgatacttggaactcccagtttgggaaaaggccagaatcaccatcagaaatatctccaatcaagggatctgttagaactggtttgtttgaatgggataatgattttgaagatatcagatcagaagactgtattttaagtttggatagtgatccccttttggagatgaaggatgacgattttaaaaatcgattggaaaatctgaatgaagccattgaggaagatattgtacaaagtgttcttaggccaaccaactgtaggacgtactgtagggccaataaaacgaaatcctcccaaggagcatcaaattttgataagctgatggacggcaccagtcaggccttagccaaagcaaacagtgaatcgagtaaagatggcctgaatcaggcaaagaaagggggtgtaagttgtgggaccagttttagagggacagttggacggactagagattacactgttttacatccatcttgcttgtcagtttgtaatgttaccatacaggatactatggaacgcagcatggatgagttcactgcatccactcctgcagatttgggagaagctggtcgtctcagaaaaaaggcagatattgcaacttctaagactactactagatttcgacctagtaatactaaatccaaaaaggatgttaaacttgaattttttggttttgaagatcatgagacaggaggtgatgaaggaggttctggaagttctaattacaaaattaagtattttggctttgatgatctcagtgaaagcgaagatgatgaagatgatgactgtcaagtagaaagaaagacaagcaaaaaaagaactaaaacagctccatcaccctccttgcagcctcccccagaaagcaatgataattcccaggacagtcagtctggtactaacaatgcagaggacttgcctggtgtgcctgaaagtgtgaagaagcccataaataaacaaggagataaatcaaaggaaaataccagaaagatttttagtggccccaaacggtcacccacaaaagctgtatataatgccagacattggaatcatccagattcagaagaactgcctgggccaccagtagtaaaacctcagagtgtcacagtgaggctgtcttcaaaggaaccaaatcaaaaagatgatggagtttttaaggctcctgcaccaccatccaaagtgataaaaactgtgacaatacctactcagccctaccaagatatagttactgcactgaaatgcagacgagaagacaaagaattatatactgttgttcagcacgtgaagcacttcaacgatgttgtagaatttggtgaaaatcaagagttcactgatgacattgagtacttgttaagtggcttaaagagcactcagcctctaaacacacgttgccttagtgttattagcttggctactaaatgtgccatgcccagttttcgaatgcacctgagagcacatgggatggtagcaatggtctttaaaaccttggatgattcccagcaccatcagaatctgtccctctgtacagctgccctcatgtatatactgagtagagatcgtttgaacatggatcttgatagagctagcttagatctaatgattcgacttttggaactggaacaagatgcttcatcagccaagctactgaatgaaaaagacatgaacaaaattaaagaaaaaatccgaaggctctgtgaaactgtacacaacaagcatcttgatctagaaaatataacgactgggcatttagctatggagacattattatcccttacttctaaacgagcaggagactggtttaaagaagaactccggcttttgggtggtctggatcatattgtagataaagtaaaagaatgtgtggatcatttaagtagagatgaggatgaagagaaactggtagcctcactatggggagcagagagatgtttacgagttttagaaagtgtaactgtgcataatcccgaaaatcaaagctacttgatagcatataaagattcccaacttattgtttcatcagctaaagcattacagcattgtgaagaactgattcagcagtacaaccgtgctgaggacagcatatgcttagctgacagtaagcctctgcctcaccagaatgtaactaaccatgtaggcaaagcagtggaggactgcatgagggccatcatcggggtgttgcttaatttaactaatgataatgagtggggcagcaccaaaacaggagagcaggacggtctcataggcacagcgctgaactgtgtgcttcaggttccaaagtacctacctcaggagcagagatttgatattcgagtgctgggcttaggtctgctgataaatctagtggagtatagtgctcggaatcggcactgtcttgtcaacatggaaacatcgtgctcttttgattcttccatctgtagtggagaaggggatgatagtttaaggataggtggacaagttcatgctgtccaggctttagtgcagctattccttgagcgagagcgggcagcccagctagcagaaagtaaaacagatgagttgatcaaagatgctcccaccactcagcatgataagagtggagagtggcaagaaacaagtggagaaatacagtgggtgtcaactgaaaagactgatggtacagaagagaaacataagaaggaggaggaggatgaagaacttgacctcaataaagcccttcagcatgccggcaaacacatggaggattgcattgtggcctcctacacggcactacttcttgggtgtctctgccaggaaagtccaatcaatgtaaccactgtgcgggaatatctgccagaaggagacttttcaataatgacagagatgctcaaaaaatttttgagttttatgaatctcacttgtgctgttggaacaactggccagaaatctatctctagagtgattgaatatttggaacattgctagctgctttacctttgcttcaggtgctcggtaatgctggagctatccttagacaaagaaaagtcaagtcatgaaagaagtccttgaagatataccaagaacattcatcagtatcattcgtgtttggatttttaaggccacctgatttcttcgtcatgcattcggcatttgctaaatgacagttactacatcaatctgcaactatcaaaaatgaggggaaaaggttcaggctgttaacaattccatgcagtatttaaatacatttactttggcagagtttataccctccccttgttttcttgctttattctgggcaagtttgaaggggaaaatttgtgctgctgttagtgcaactgctgtgtatgttgagccactgttgtcatgccagccaggtgcaaaggcagcttagctactgaggtagcgaatgttctgaggacattctagacaacagcttagttcctttttcaggctcatttgcttttgcttttttgttgaatgattccaatcgtaaataaagcttttaataattttgtgaattttttggttgttgttccctgaactactgtctatatttaaaattagatggaatccaaagatacacgggattaatagtatatttttttattcttgattaggtttgggttattgaactattttttacttttgagaccacaaccatattcaatatcataccataatgtgtcatagctataggcacaagaaaaacaacagtttgagagaatattatataagatgatgtgccctgttaaaaggaggaggcaaaatagtcaaacccagggtagtttacacttaatgctagggaggctcttaaaacattattagattttgaggaaagactctctagatatattttctaatgttcagtacaataaatataaggaagctaaaacaccaatgtggaattcctgtttccagataacatgtatattcttctatagagtgacaggatcaattgcataagcgcaaagccttaaattgctggtttagagaagacccttttttcattcagattctttgttcgtagagcagttatttgaaaaacagttatggaacacaaaacattttatagatttaatatcataacattgcaaatttttcttgtattattgttcacaccactggttatacttttttttttccttttttattgattgggcctgaatacaggctttctagagatctttttcattaatacttttaaatacctttcaggtagttacatcatgtttcttcattggatttgtaaaacttgaagccataaaaatattagtttggtgtgtattggggaaaatagctaaaagtctaatttttacccatttagactttgttatttccttgtataaagtgacaaatcggggctcttgtatcagtgccagctgtaatgtttttaaatgcagtggctgccttctattgtcttcctatttttgataatgcagattgttgggaaatctgtaaggaagtaactgattccaggcaaattgttttcttccttctacccaccccaacccctacccatcaccttttaagaacatagtacgccagtgtaacgtgggaaccattgagattgtatttgccctgagtattaaagctagcttagcaaaatacttttaaaaacatattggtaaatgatacccataaaattaaattagttatattttattttaaaatgcaaaatacattgatatttattaatcattggatttagggaaagggacagatttttggtgaacctgacttgtggcagatggtaaggaatattataaaacatttggatgagaacaatcagggcgaactgcatttttctgttacactggtaatcatttgaaaattgatttacctcagtgtttaacagttttttgttttgttttgttttttaaataataactaattgtcgagcactgatagagatgcagattttggtggggggaggtggtgggggagataatcacttcaccaactgcagtgcatttgtgtgtttttaaccctcagagaactctgcattttagggtacttgaggctgacttaactaaaagttttaaagtaaccttttttccattgtaaatatttctgtaaatactaccaattggaaattagaacagtagagtacttttctgaatccaatcctatttttattttatacagtatttctcagctgtgatctttggagcaaaagccaacggcaggaaaaaatagtttgtaccagtttcatgaagtatgtctttgggtttttgtaaataattttaactcaaataaaattgctactttcaata

SEQ ID NO: 416677 - DNA, 6139 bp, Homo sapiens
cgcgcggggactgtgggaagcggagtgacggagcgagcggctgttggaggaaggaggtgggggccgggagcgcaaatggcgttgagatggttcagggccctgttcaaactccagcactgaccattcaccggcggaagcggcggcgcaggaggcggcggcggcccagcgggggcacacagcaggctctgttaccagctccagcagtggcggccagcgagagctaggcccgggcccggccggcggcgctcgaggcggggagggaagttgcggggccgccgctcctgcccccccaaccgggcttcctatttaccgaaagcagagtccctcgcctctctcggctctcacctgccggccctgctctcccgcgcgagggttccgcgcccgcccgcgggccgtagggagcgggagaggcggaggcggcccgtggccaaagcacccgccaggctccgaggagaatatgaaactggtgtcaaaatgacatccagatttgggaaaacatacagtaggaaaggtggaaatggcagttcaaaattcgatgaagtcttttccaacaaacggactacccttagcacaaaatggggagagaccacatttatggctaaattagggcagaagaggcccaatttcaaaccagatatccaagaaattccgaagaaacctaaagtggaagaagaaagtactggagatccttttggatttgatagtgatgatgagtctctaccagtttcttcaaagaatttagcccaggttaagtgttcctcttattcagaatctagtgaagctgctcagttggaagaggtcacttcagtacttgaagctaatagcaaaattagtcatgtggtcgttgaagacactgtcgtttctgataaatgcttccctttggaggacactttacttgggaaagaaaagagcacaaaccgaattgtagaagatgatgcaagcataagtagctgtaataaattaataacttcagataaagtggagaattttcatgaagaacatgaaaagaatagtcaccatattcacaaaaatgctgatgacagtactaagaaacccaatgcagaaactacagtggcttctgaaatcaaggaaacaaatgatacttggaactcccagtttgggaaaaggccagaatcaccatcagaaatatctccaatcaagggatctgttagaactggtttgtttgaatgggataatgattttgaagatatcagatcagaagactgtattttaagtttggatagtgatccccttttggagatgaaggatgacgattttaaaaatcgattggaaaatctgaatgaagccattgaggaagatattgtacaaagtgttcttaggccaaccaactgtaggacgtactgtagggccaataaaacgaaatcctcccaaggagcatcaaattttgataagctgatggacggcaccagtcaggccttagccaaagcaaacagtgaatcgagtaaagatggcctgaatcaggcaaagaaagggggtgtaagttgtgggaccagttttagagggacagttggacggactagagattacactgttttacatccatcttgcttgtcagtttgtaatgttaccatacaggatactatggaacgcagcatggatgagttcactgcatccactcctgcagatttgggagaagctggtcgtctcagaaaaaaggcagatattgcaacttctaagactactactagatttcgacctagtaatactaaatccaaaaaggatgttaaacttgaattttttggttttgaagatcatgagacaggaggtgatgaaggaggttctggaagttctaattacaaaattaagtattttggctttgatgatctcagtgaaagcgaagatgatgaagatgatgactgtcaagtagaaagaaagacaagcaaaaaaagaactaaaacagctccatcaccctccttgcagcctcccccagaaagcaatgataattcccaggacagtcagtctggtactaacaatgcagaaaacttggattttacagaggacttgcctggtgtgcctgaaagtgtgaagaagcccataaataaacaaggagataaatcaaaggaaaataccagaaagatttttagtggccccaaacggtcacccacaaaagctgtatataatgccagacattggaatcatccagattcagaagaactgcctgggccaccagtagtaaaacctcagagtgtcacagtgaggctgtcttcaaaggaaccaaatcaaaaagatgatggagtttttaaggctcctgcaccaccatccaaagtgataaaaactgtgacaatacctactcagccctaccaagatatagttactgcactgaaatgcagacgagaagacaaagaattatatactgttgttcagcacgtgaagcacttcaacgatgttgtagaatttggtgaaaatcaagagttcactgatgacattgagtacttgttaagtggcttaaagagcactcagcctctaaacacacgttgccttagtgttattagcttggctactaaatgtgccatgcccagttttcgaatgcacctgagagcacatgggatggtagcaatggtctttaaaaccttggatgattcccagcaccatcagaatctgtccctctgtacagctgccctcatgtatatactgagtagagatcgtttgaacatggatcttgatagagctagcttagatctaatgattcgacttttggaactggaacaagatgcttcatcagccaagctactgaatgaaaaagacatgaacaaaattaaagaaaaaatccgaaggctctgtgaaacttggtagcctcactatggggagcagagagatgtttacgagttttagaaagtgtaactgtgcataatcccgaaaatcaaagctacttgatagcatataaagattcccaacttattgtttcatcagctaaagcattacagcattgtgaagaactgattcagcagtacaaccgtgctgaggacagcatatgcttagctgacagtaagcctctgcctcaccagaatgtaactaaccatgtaggcaaagcagtggaggactgcatgagggccatcatcggggtgttgcttaatttaactaatgataatgagtggggcagcaccaaaacaggagagcaggacggtctcataggcacagcgctgaactgtgtgcttcaggttccaaagtacctacctcaggagcagagatttgatattcgagtgctgggcttaggtctgctgataaatctagtggagtatagtgctcggaatcggcactgtcttgtcaacatggaaacatcgtgctcttttgattcttccatctgtagtggagaaggggatgatagtttaaggataggtggacaagttcatgctgtccaggctttagtgcagctattccttgagcgagagcgggcagcccagctagcagaaagtaaaacagatgagttgatcaaagatgctcccaccactcagcatgataagagtggagagtggcaagaaacaagtggagaaatacagtgggtgtcaactgaaaagactgatggtacagaagagaaacataagaaggaggaggaggatgaagaacttgacctcaataaagcccttcagcatgccggcaaacacatggaggattgcattgtggcctcctacacggcactacttcttgggtgtctctgccaggaaagtccaatcaatgtaaccactgtgcgggaatatctgccagaaggagacttttcaataatgacagagatgctcaaaaaatttttgagttttatgaatctcacttgtgctgttggaacaactggccagaaatctatctctagagtgattgaatatttggaacattgctagctgctttacctttgcttcaggtgctcggtaatgctggagctatccttagacaaagaaaagtcaagtcatgaaagaagtccttgaagatataccaagaacattcatcagtatcattcgtgtttggatttttaaggccacctgatttcttcgtcatgcattcggcatttgctaaatgacagttactacatcaatctgcaactatcaaaaatgaggggaaaaggttcaggctgttaacaattccatgcagtatttaaatacatttactttggcagagtttataccctccccttgttttcttgctttattctgggcaagtttgaaggggaaaatttgtgctgctgttagtgcaactgctgtgtatgttgagccactgttgtcatgccagccaggtgcaaaggcagcttagctactgaggtagcgaatgttctgaggacattctagacaacagcttagttcctttttcaggctcatttgcttttgcttttttgttgaatgattccaatcgtaaataaagcttttaataattttgtgaattttttggttgttgttccctgaactactgtctatatttaaaattagatggaatccaaagatacacgggattaatagtatatttttttattcttgattaggtttgggttattgaactattttttacttttgagaccacaaccatattcaatatcataccataatgtgtcatagctataggcacaagaaaaacaacagtttgagagaatattatataagatgatgtgccctgttaaaaggaggaggcaaaatagtcaaacccagggtagtttacacttaatgctagggaggctcttaaaacattattagattttgaggaaagactctctagatatattttctaatgttcagtacaataaatataaggaagctaaaacaccaatgtggaattcctgtttccagataacatgtatattcttctatagagtgacaggatcaattgcataagcgcaaagccttaaattgctggtttagagaagacccttttttcattcagattctttgttcgtagagcagttatttgaaaaacagttatggaacacaaaacattttatagatttaatatcataacattgcaaatttttcttgtattattgttcacaccactggttatacttttttttttccttttttattgattgggcctgaatacaggctttctagagatctttttcattaatacttttaaatacctttcaggtagttacatcatgtttcttcattggatttgtaaaacttgaagccataaaaatattagtttggtgtgtattggggaaaatagctaaaagtctaatttttacccatttagactttgttatttccttgtataaagtgacaaatcggggctcttgtatcagtgccagctgtaatgtttttaaatgcagtggctgccttctattgtcttcctatttttgataatgcagattgttgggaaatctgtaaggaagtaactgattccaggcaaattgttttcttccttctacccaccccaacccctacccatcaccttttaagaacatagtacgccagtgtaacgtgggaaccattgagattgtatttgccctgagtattaaagctagcttagcaaaatacttttaaaaacatattggtaaatgatacccataaaattaaattagttatattttattttaaaatgcaaaatacattgatatttattaatcattggatttagggaaagggacagatttttggtgaacctgacttgtggcagatggtaaggaatattataaaacatttggatgagaacaatcagggcgaactgcatttttctgttacactggtaatcatttgaaaattgatttacctcagtgtttaacagttttttgttttgttttgttttttaaataataactaattgtcgagcactgatagagatgcagattttggtggggggaggtggtgggggagataatcacttcaccaactgcagtgcatttgtgtgtttttaaccctcagagaactctgcattttagggtacttgaggctgacttaactaaaagttttaaagtaaccttttttccattgtaaatatttctgtaaatactaccaattggaaattagaacagtagagtacttttctgaatccaatcctatttttattttatacagtatttctcagctgtgatctttggagcaaaagccaacggcaggaaaaaatagtttgtaccagtttcatgaagtatgtctttgggtttttgtaaataattttaactcaaataaaattgctactttcaata

SEQ ID NO: 416678 - DNA, 6284 bp, Homo sapiens
cgcgcggggactgtgggaagcggagtgacggagcgagcggctgttggaggaaggaggtgggggccgggagcgcaaatggcgttgagatggttcagggccctgttcaaactccagcactgaccattcaccggcggaagcggcggcgcaggaggcggcggcggcccagcgggggcacacagcaggctctgttaccagctccagcagtggcggccagcgagagctaggcccgggcccggccggcggcgctcgaggcggggagggaagttgcggggccgccgctcctgcccccccaaccgggcttcctatttaccgaaagcagagtccctcgcctctctcggctctcacctgccggccctgctctcccgcgcgagggttccgcgcccgcccgcgggccgtagggagcgggagaggcggaggcggcccgtggccaaagcacccgccaggctccgaggagaatatgaaactggtgtcaaaatgacatccagatttgggaaaacatacagtaggaaaggtggaaatggcagttcaaaattcgatgaagtcttttccaacaaacggactacccttagcacaaaatggggagagaccacatttatggctaaattagggcagaagaggcccaatttcaaaccagatatccaagaaattccgaagaaacctaaagtggaagaagaaagtactggagatccttttggatttgatagtgatgatgagtctctaccagtttcttcaaagaatttagcccaggttaagtgttcctcttattcagaatctagtgaagctgctcagttggaagaggtcacttcagtacttgaagctaatagcaaaattagtcatgtggtcgttgaagacactgtcgtttctgataaatgcttccctttggaggacactttacttgggaaagaaaagagcacaaaccgaattgtagaagatgatgcaagcataagtagctgtaataaattaataacttcagataaagtggagaattttcatgaagaacatgaaaagaatagtcaccatattcacaaaaatgctgatgacagtactaagaaacccaatgcagaaactacagtggcttctgaaatcaaggaaacaaatgatacttggaactcccagtttgggaaaaggccagaatcaccatcagaaatatctccaatcaagggatctgttagaactggtttgtttgaatgggataatgattttgaagatatcagatcagaagactgtattttaagtttggatagtgatccccttttggagatgaaggatgacgattttaaaaatcgattggaaaatctgaatgaagccattgaggaagatattgtacaaagtgttcttaggccaaccaactgtaggacgtactgtagggccaataaaacgaaatcctcccaaggagcatcaaattttgataagctgatggacggcaccagtcaggccttagccaaagcaaacagtgaatcgagtaaagatggcctgaatcaggcaaagaaagggggtgtaagttgtgggaccagttttagagggacagttggacggactagagattacactgttttacatccatcttgcttgtcagtttgtaatgttaccatacaggatactatggaacgcagcatggatgagttcactgcatccactcctgcagatttgggagaagctggtcgtctcagaaaaaaggcagatattgcaacttctaagactactactagatttcgacctagtaatactaaatccaaaaaggatgttaaacttgaattttttggttttgaagatcatgagacaggaggtgatgaaggaggttctggaagttctaattacaaaattaagtattttggctttgatgatctcagtgaaagcgaagatgatgaagatgatgactgtcaagtagaaagaaagacaagcaaaaaaagaactaaaacagctccatcaccctccttgcagcctcccccagaaagcaatgataattcccaggacagtcagtctggtactaacaatgcagaaaacttggattttacagaggacttgcctggtgtgcctgaaagtgtgaagaagcccataaataaacaaggagataaatcaaaggaaaataccagaaagatttttagtggccccaaacggtcacccacaaaagctgtatataatgccagacattggaatcatccagattcagaagaactgcctgggccaccagtagtaaaacctcagagtgtcacagtgaggctgtcttcaaaggaaccaaatcaaaaagatgatggagtttttaaggctcctgcaccaccatccaaagtgataaaaactgtgacaatacctactcagccctaccaagatatagttactgcactgaaatgcagacgagaagacaaagaattatatactgttgttcagcacgtgaagcacttcaacgatgttgtagaatttggtgaaaatcaagagttcactgatgacattgagtacttgttaagtggcttaaagagcactcagcctctaaacacacgttgccttagtgttattagcttggctactaaatgtgccatgcccagttttcgaatgcacctgagagcacatgggatggtagcaatggtctttaaaaccttggatgattcccagcaccatcagaatctgtccctctgtacagctgccctcatgtatatactgagtagagatcgtttgaacatggatcttgatagagctagcttagatctaatgattcgacttttggaactggaacaagatgcttcatcagccaagctactgaatgaaaaagacatgaacaaaattaaagaaaaaatccgaaggctctgtgaaactgtacacaacaagcatcttgatctagaaaatataacgactgggcatttagctatggagacattattatcccttacttctaaacgagcaggagactggtttaaagaagaactccggcttttgggtggtctggatcatattgtagataaagtaaaagaatgtgtggatcatttaagtagagatgaggatgaagagaaactggtagcctcactatggggagcagagagatgtttacgagttttagaaagtgtaactgtgcataatcccgaaaatcaaagctacttgatagcatataaagattcccaacttattgtttcatcagctaaagcattacagcattgtgaagaactgattcagcagtacaaccgtgctgaggacagcatatgcttagctgacagtaagcctctgcctcaccagaatgtaactaaccatgtaggcaaagcagtggaggactgcatgagggccatcatcggggtgttgcttaatttaactaatgataatgagtggggcagcaccaaaacaggagagcaggacggtctcataggcacagcgctgaactgtgtgcttcaggttccaaagtacctacctcaggagcagagatttgatattcgagtgctgggcttaggtctgctgataaatctagtggagtatagtgctcggaatcggcactgtcttgtcaacatggaaacatcgtgctcttttgattcttccatctgtagtggagaaggggatgatagtttaaggataggtggacaagttcatgctgtccaggctttagtgcagctattccttgagcgagagcgggcagcccagctagcagaaagtaaaacagatgagttgatcaaagatgctcccaccactcagcatgataagagtggagagtggcaagaaacaagtggagaaatacagtgggtgtcaactgaaaagactgatggtacagaagagaaacataagaaggaggaggaggatgaagaacttgacctcaataaagcccttcagcatgccggcaaacacatggaggattgcattgtggcctcctacacggcactacttcttgggtgtctctgccaggaaagtccaatcaatgtaaccactgtgcgggaatatctgccagaaggagacttttcaataatgacagagatgctcaaaaaatttttgagttttatgaatctcacttgtgctgttggaacaactggccagaaatctatctctagagtgattgaatatttggaacattgctagctgctttacctttgcttcaggtgctcggtaatgctggagctatccttagacaaagaaaagtcaagtcatgaaagaagtccttgaagatataccaagaacattcatcagtatcattcgtgtttggatttttaaggccacctgatttcttcgtcatgcattcggcatttgctaaatgacagttactacatcaatctgcaactatcaaaaatgaggggaaaaggttcaggctgttaacaattccatgcagtatttaaatacatttactttggcagagtttataccctccccttgttttcttgctttattctgggcaagtttgaaggggaaaatttgtgctgctgttagtgcaactgctgtgtatgttgagccactgttgtcatgccagccaggtgcaaaggcagcttagctactgaggtagcgaatgttctgaggacattctagacaacagcttagttcctttttcaggctcatttgcttttgcttttttgttgaatgattccaatcgtaaataaagcttttaataattttgtgaattttttggttgttgttccctgaactactgtctatatttaaaattagatggaatccaaagatacacgggattaatagtatatttttttattcttgattaggtttgggttattgaactattttttacttttgagaccacaaccatattcaatatcataccataatgtgtcatagctataggcacaagaaaaacaacagtttgagagaatattatataagatgatgtgccctgttaaaaggaggaggcaaaatagtcaaacccagggtagtttacacttaatgctagggaggctcttaaaacattattagattttgaggaaagactctctagatatattttctaatgttcagtacaataaatataaggaagctaaaacaccaatgtggaattcctgtttccagataacatgtatattcttctatagagtgacaggatcaattgcataagcgcaaagccttaaattgctggtttagagaagacccttttttcattcagattctttgttcgtagagcagttatttgaaaaacagttatggaacacttgttcacaccactggttatacttttttttttccttttttattgattgggcctgaatacaggctttctagagatctttttcattaatacttttaaatacctttcaggtagttacatcatgtttcttcattggatttgtaaaacttgaagccataaaaatattagtttggtgtgtattggggaaaatagctaaaagtctaatttttacccatttagactttgttatttccttgtataaagtgacaaatcggggctcttgtatcagtgccagctgtaatgtttttaaatgcagtggctgccttctattgtcttcctatttttgataatgcagattgttgggaaatctgtaaggaagtaactgattccaggcaaattgttttcttccttctacccaccccaacccctacccatcaccttttaagaacatagtacgccagtgtaacgtgggaaccattgagattgtatttgccctgagtattaaagctagcttagcaaaatacttttaaaaacatattggtaaatgatacccataaaattaaattagttatattttattttaaaatgcaaaatacattgatatttattaatcattggatttagggaaagggacagatttttggtgaacctgacttgtggcagatggtaaggaatattataaaacatttggatgagaacaatcagggcgaactgcatttttctgttacactggtaatcatttgaaaattgatttacctcagtgtttaacagttttttgttttgttttgttttttaaataataactaattgtcgagcactgatagagatgcagattttggtggggggaggtggtgggggagataatcacttcaccaactgcagtgcatttgtgtgtttttaaccctcagagaactctgcattttagggtacttgaggctgacttaactaaaagttttaaagtaaccttttttccattgtaaatatttctgtaaatactaccaattggaaattagaacagtagagtacttttctgaatccaatcctatttttattttatacagtatttctcagctgtgatctttggagcaaaagccaacggcaggaaaaaatagtttgtaccagtttcatgaagtatgtctttgggtttttgtaaataattttaactcaaataaaattgctactttcaata

SEQ ID NO: 416679 - DNA, 3262 bp, Homo sapiens
atttgctgtgtacctattattatttactataatagtctatattttatttccttttaagagcattacagcattgtgaagaactgattcagcagtacaaccgtgctgaggacagcatatgcttagctgacagtaagcctctgcctcaccagaatgtaactaaccatgtaggcaaagcagtggaggactgcatgagggccatcatcggggtgttgcttaatttaactaatgataatgagtggggcagcaccaaaacaggagagcaggacggtctcataggcacagcgctgaactgtgtgcttcaggttccaaagtacctacctcaggagcagagatttgatattcgagtgctgggcttaggtctgctgataaatctagtggagtatagtgctcggaatcggcactgtcttgtcaacatggaaacatcgtgctcttttgattcttccatctgtagtggagaaggggatgatagtttaaggataggtggacaagttcatgctgtccaggctttagtgcagctattccttgagcgagagcgggcagcccagctagcagaaagtaaaacagatgagttgatcaaagatgctcccaccactcagcatgataagagtggagagtggcaagaaacaagtggagaaatacagtgggtgtcaactgaaaagactgatggtacagaagagaaacataagaaggaggaggaggatgaagaacttgacctcaataaagcccttcagcatgccggcaaacacatggaggattgcattgtggcctcctacacggcactacttcttgggtgtctctgccaggaaagtccaatcaatgtaaccactgtgcgggaatatctgccagaaggagacttttcaataatgacagagatgctcaaaaaatttttgagttttatgaatctcacttgtgctgttggaacaactggccagaaatctatctctagagtgattgaatatttggaacattgctagctgctttacctttgcttcaggtgctcggtaatgctggagctatccttagacaaagaaaagtcaagtcatgaaagaagtccttgaagatataccaagaacattcatcagtatcattcgtgtttggatttttaaggccacctgatttcttcgtcatgcattcggcatttgctaaatgacagttactacatcaatctgcaactatcaaaaatgaggggaaaaggttcaggctgttaacaattccatgcagtatttaaatacatttactttggcagagtttataccctccccttgttttcttgctttattctgggcaagtttgaaggggaaaatttgtgctgctgttagtgcaactgctgtgtatgttgagccactgttgtcatgccagccaggtgcaaaggcagcttagctactgaggtagcgaatgttctgaggacattctagacaacagcttagttcctttttcaggctcatttgcttttgcttttttgttgaatgattccaatcgtaaataaagcttttaataattttgtgaattttttggttgttgttccctgaactactgtctatatttaaaattagatggaatccaaagatacacgggattaatagtatatttttttattcttgattaggtttgggttattgaactattttttacttttgagaccacaaccatattcaatatcataccataatgtgtcatagctataggcacaagaaaaacaacagtttgagagaatattatataagatgatgtgccctgttaaaaggaggaggcaaaatagtcaaacccagggtagtttacacttaatgctagggaggctcttaaaacattattagattttgaggaaagactctctagatatattttctaatgttcagtacaataaatataaggaagctaaaacaccaatgtggaattcctgtttccagataacatgtatattcttctatagagtgacaggatcaattgcataagcgcaaagccttaaattgctggtttagagaagacccttttttcattcagattctttgttcgtagagcagttatttgaaaaacagttatggaacacaaaacattttatagatttaatatcataacattgcaaatttttcttgtattattgttcacaccactggttatacttttttttttccttttttattgattgggcctgaatacaggctttctagagatctttttcattaatacttttaaatacctttcaggtagttacatcatgtttcttcattggatttgtaaaacttgaagccataaaaatattagtttggtgtgtattggggaaaatagctaaaagtctaatttttacccatttagactttgttatttccttgtataaagtgacaaatcggggctcttgtatcagtgccagctgtaatgtttttaaatgcagtggctgccttctattgtcttcctatttttgataatgcagattgttgggaaatctgtaaggaagtaactgattccaggcaaattgttttcttccttctacccaccccaacccctacccatcaccttttaagaacatagtacgccagtgtaacgtgggaaccattgagattgtatttgccctgagtattaaagctagcttagcaaaatacttttaaaaacatattggtaaatgatacccataaaattaaattagttatattttattttaaaatgcaaaatacattgatatttattaatcattggatttagggaaagggacagatttttggtgaacctgacttgtggcagatggtaaggaatattataaaacatttggatgagaacaatcagggcgaactgcatttttctgttacactggtaatcatttgaaaattgatttacctcagtgtttaacagttttttgttttgttttgttttttaaataataactaattgtcgagcactgatagagatgcagattttggtggggggaggtggtgggggagataatcacttcaccaactgcagtgcatttgtgtgtttttaaccctcagagaactctgcattttagggtacttgaggctgacttaactaaaagttttaaagtaaccttttttccattgtaaatatttctgtaaatactaccaattggaaattagaacagtagagtacttttctgaatccaatcctatttttattttatacagtatttctcagctgtgatctttggagcaaaagccaacggcaggaaaaaatagtttgtaccagtttcatgaagtatgtctttgggtttttgtaaataattttaactcaaataaaattgctactttcaata

SEQ ID NO: 416680 - DNA, 4579 bp, Homo sapiens
cgcgcggggactgtgggaagcggagtgacggagcgagcggctgttggaggaaggaggtgggggccgggagcgcaaatggcgttgagatggttcagggccctgttcaaactccagcactgaccattcaccggcggaagcggcggcgcaggaggcggcggcggcccagcgggggcacacagcaggctctgttaccagctccagcagtggcggccagcgagagctaggcccgggcccggccggcggcgctcgaggcggggagggaagttgcggggccgccgctcctgcccccccaaccgggcttcctatttaccgaaagcagagtccctcgcctctctcggctctcacctgccggccctgctctcccgcgcgagggttccgcgcccgcccgcgggccgtagggagcgggagaggcggaggcggcccgtggccaaagcacccgccaggctccgaggagaatatgaaactggtgtcaaaatgacatccagatttgggaaaacatacagtaggaaaggtggaaatggcagttcaaaattcgatgaagtcttttccaacaaacggactacccttagcacaaaatggggagagaccacatttatggctaaattagggcagaagaggcccaatttcaaaccagatatccaagaaattccgaagaaacctaaagtggaagaagaaagtactggagatccttttggatttgatagtgatgatgagtctctaccagtttcttcaaagaatttagcccaggttaagtgttcctcttattcagaatctagtgaagctgctcagttggaagaggtcacttcagtacttgaagctaatagcaaaattagtcatgtggtcgttgaagacactgtcgtttctgataaatgcttccctttggaggacactttacttgggaaagaaaagagcacaaaccgaattgtagaagatgatgcaagcataagtagctgtaataaattaataacttcagataaagtggagaattttcatgaagaacatgaaaagaatagtcaccatattcacaaaaatgctgatgacagtactaagaaacccaatgcagaaactacagtggcttctgaaatcaaggaaacaaatgatacttggaactcccagtttgggaaaaggccagaatcaccatcagaaatatctccaatcaagggatctgttagaactggtttgtttgaatgggataatgattttgaagatatcagatcagaagactgtattttaagtttggatagtgatccccttttggagatgaaggatgacgattttaaaaatcgattggaaaatctgaatgaagccattgaggaagatattgtacaaagtgttcttaggccaaccaactgtaggacgtactgtagggccaataaaacgaaatcctcccaaggagcatcaaattttgataagctgatggacggcaccagtcaggccttagccaaagcaaacagtgaatcgagtaaagatggcctgaatcaggcaaagaaagggggtgtaagttgtgggaccagttttagagggacagttggacggactagagattacactgttttacatccatcttgcttgtcagtttgtaatgttaccatacaggatactatggaacgcagcatggatgagttcactgcatccactcctgcagatttgggagaagctggtcgtctcagaaaaaaggcagatattgcaacttctaagactactactagatttcgacctagtaatactaaatccaaaaaggatgttaaacttgaattttttggttttgaagatcatgagacaggaggtgatgaaggaggttctggaagttctaattacaaaattaagtattttggctttgatgatctcagtgaaagcgaagatgatgaagatgatgactgtcaagtagaaagaaagacaagcaaaaaaagaactaaaacagctccatcaccctccttgcagcctcccccagaaagcaatgataattcccaggacagtcagtctggtactaacaatgcagaaaacttggattttacagaggacttgcctggtgtgcctgaaagtgtgaagaagcccataaataaacaaggagataaatcaaaggaaaataccagaaagatttttagtggccccaaacggtcacccacaaaagctgtatataatgccagacattggaatcatccagattcagaagaactgcctgggccaccagtagtaaaacctcagagtgtcacagtgaggctgtcttcaaaggaaccaaatcaaaaagatgatggagtttttaaggctcctgcaccaccatccaaagtgataaaaactgtgacaatacctactcagccctaccaagatatagttactgcactgaaatgcagacgagaagacaaagaattatatactgttgttcagcacgtgaagcacttcaacgatgttgtagaatttggtgaaaatcaagagttcactgatgacattgagtacttgttaagtggcttaaagagcactcagcctctaaacacacgttgccttagtgttattagcttggctactaaatgtgccatgcccagttttcgaatgcacctgagagcacatgggatggtagcaatggtctttaaaaccttggatgattcccagcaccatcagaatctgtccctctgtacagctgccctcatgtatatactgagtagagatcgtttgaacatggatcttgatagagctagcttagatctaatgattcgacttttggaactggaacaagatgcttcatcagccaagctactgaatgaaaaagacatgaacaaaattaaagaaaaaatccgaaggctctgtgaaactgtacacaacaagcatcttgatctagaaaatataacgactgggcatttagctatggagacattattatcccttacttctaaacgagcaggagactggtttaaagaagaactccggcttttgggtggtctggatcatattgtagataaagtaaaagaatgtgtggatcatttaagtagagatgaggatgaagagaaactggtagcctcactatggggagcagagagatgtttacgagttttagaaagtgtaactgtgcataatcccgaaaatcaaagctacttgatagcatataaagattcccaacttattgtttcatcagctaaagcattacagcattgtgaagaactgattcagcagtacaaccgtgctgaggacagcatatgcttagctgacagtaagcctctgcctcaccagaatgtaactaaccatgtaggcaaagcagtggaggactgcatgagggccatcatcggggtgttgcttaatttaactaatgataatgagtggggcagcaccaaaacaggagagcaggacggtctcataggcacagcgctgaactgtgtgcttcaggttccaaagtacctacctcaggagcagagatttgatattcgagtgctgggcttaggtctgctgataaatctagtggagtatagtgctcggaatcggcactgtcttgtcaacatggaaacatcgtgctcttttgattcttccatctgtagtggagaaggggatgatagtttaaggataggtggacaagttcatgctgtccaggctttagtgcagctattccttgagcgagagcgggcagcccagctagcagaaagtaaaacagatgagttgatcaaagatgctcccaccactcagcatgataagagtggagagtggcaagaaacaagtggagaaatacagtgggtgtcaactgaaaagactgatggtacagaagagaaacataagaaggaggaggaggatgaagaacttgacctcaataaagcccttcagcatgccggcaaacacatggaggattgcattgtggcctcctacacggcactacttcttgggtgtctctgccaggaaagtccaatcaatgtaaccactgtgcgggaatatctgccagaaggagacttttcaataatgacagagatgctcaaaaaatttttgagttttatgaatctcacttgtgctgttggaacaactggccagaaatctatctctagagtgattgaatatttggaacattgctagctgctttacctttgcttcaggtgctcggtaatgctggagctatccttagacaaagaaaagtcaagtcatgaaagaagtccttgaagatataccaagaacattcatcagtatcattcgtgtttggatttttaaggccacctgatttcttcgtcatgcattcggcatttgctaaatgacagttactacatcaatctgcaactatcaaaaatgaggggaaaaggttcaggctgttaacaattccatgcagtatttaaatacatttactttggcagagtttataccctccccttgttttcttgctttattctgggcaagtttgaaggggaaaatttgtgctgctgttagtgcaactgctgtgtatgttgagccactgttgtcatgccagccaggtgcaaaggcagcttagctactgaggtagcgaatgttctgaggacattctagacaacagcttagttcctttttcaggctcatttgcttttgcttttttgttgaatgattccaatcgtaaataaagcttttaataattttgtga

SEQ ID NO: 416681 - DNA, 2551 bp, Homo sapiens
taataatcgtgttctatttcttcaaggtaatcattgcatgttatggcaaataactttatcaaacccacaatttaatctcggtgtactttgatttgtagtgttcagtttagtaaatctagaggtaaacttttatttatacttcttaaaatctgttaaatattaactgttacttcctttccccttcaccctgctttcagtgtgctgttggaacaactggccagaaatctatctctagagtgattgaatatttggaacattgctagctgctttacctttgcttcaggtgctcggtaatgctggagctatccttagacaaagaaaagtcaagtcatgaaagaagtccttgaagatataccaagaacattcatcagtatcattcgtgtttggatttttaaggccacctgatttcttcgtcatgcattcggcatttgctaaatgacagttactacatcaatctgcaactatcaaaaatgaggggaaaaggttcaggctgttaacaattccatgcagtatttaaatacatttactttggcagagtttataccctccccttgttttcttgctttattctgggcaagtttgaaggggaaaatttgtgctgctgttagtgcaactgctgtgtatgttgagccactgttgtcatgccagccaggtgcaaaggcagcttagctactgaggtagcgaatgttctgaggacattctagacaacagcttagttcctttttcaggctcatttgcttttgcttttttgttgaatgattccaatcgtaaataaagcttttaataattttgtgaattttttggttgttgttccctgaactactgtctatatttaaaattagatggaatccaaagatacacgggattaatagtatatttttttattcttgattaggtttgggttattgaactattttttacttttgagaccacaaccatattcaatatcataccataatgtgtcatagctataggcacaagaaaaacaacagtttgagagaatattatataagatgatgtgccctgttaaaaggaggaggcaaaatagtcaaacccagggtagtttacacttaatgctagggaggctcttaaaacattattagattttgaggaaagactctctagatatattttctaatgttcagtacaataaatataaggaagctaaaacaccaatgtggaattcctgtttccagataacatgtatattcttctatagagtgacaggatcaattgcataagcgcaaagccttaaattgctggtttagagaagacccttttttcattcagattctttgttcgtagagcagttatttgaaaaacagttatggaacacaaaacattttatagatttaatatcataacattgcaaatttttcttgtattattgttcacaccactggttatacttttttttttccttttttattgattgggcctgaatacaggctttctagagatctttttcattaatacttttaaatacctttcaggtagttacatcatgtttcttcattggatttgtaaaacttgaagccataaaaatattagtttggtgtgtattggggaaaatagctaaaagtctaatttttacccatttagactttgttatttccttgtataaagtgacaaatcggggctcttgtatcagtgccagctgtaatgtttttaaatgcagtggctgccttctattgtcttcctatttttgataatgcagattgttgggaaatctgtaaggaagtaactgattccaggcaaattgttttcttccttctacccaccccaacccctacccatcaccttttaagaacatagtacgccagtgtaacgtgggaaccattgagattgtatttgccctgagtattaaagctagcttagcaaaatacttttaaaaacatattggtaaatgatacccataaaattaaattagttatattttattttaaaatgcaaaatacattgatatttattaatcattggatttagggaaagggacagatttttggtgaacctgacttgtggcagatggtaaggaatattataaaacatttggatgagaacaatcagggcgaactgcatttttctgttacactggtaatcatttgaaaattgatttacctcagtgtttaacagttttttgttttgttttgttttttaaataataactaattgtcgagcactgatagagatgcagattttggtggggggaggtggtgggggagataatcacttcaccaactgcagtgcatttgtgtgtttttaaccctcagagaactctgcattttagggtacttgaggctgacttaactaaaagttttaaagtaaccttttttccattgtaaatatttctgtaaatactaccaattggaaattagaacagtagagtacttttctgaatccaatcctatttttattttatacagtatttctcagctgtgatctttggagcaaaagccaacggcaggaaaaaatagtttgtaccagtttcatgaagtatgtctttgggtttttgtaaataattttaactcaaataaaattgctactttcaata

SEQ ID NO: 416682 - DNA, 5150 bp, Homo sapiens
cgcgcggggactgtgggaagcggagtgacggagcgagcggctgttggaggaaggaggtgggggccgggagcgcaaatggcgttgagatggttcagggccctgttcaaactccagcactgaccattcaccggcggaagcggcggcgcaggaggcggcggcggcccagcgggggcacacagcaggctctgttaccagctccagcagtggcggccagcgagagctaggcccgggcccggccggcggcgctcgaggcggggagggaagttgcggggccgccgctcctgcccccccaaccgggcttcctatttaccgaaagcagagtccctcgcctctctcggctctcacctgccggccctgctctcccgcgcgagggttccgcgcccgcccgcgggccgtagggagcgggagaggcggaggcggcccgtggccaaagcacccgccaggctccgaggagaatatgaaactggtgtcaaaatgacatccagatttgggaaaacatacagtaggaaaggtggaaatggcagttcaaaattcgatgaagtcttttccaacaaacggactacccttagcacaaaatggggagagaccacatttatggctaaattagggcagaagaggcccaatttcaaaccagatatccaagaaattccgaagaaacctaaagtggaagaagaaagtactggagatccttttggatttgatagtgatgatgagtctctaccagtttcttcaaagaatttagcccaggttaagtgttcctcttattcagaatctagtgaagctgctcagttggaagaggtcacttcagtacttgaagctaatagcaaaattagtcatgtggtcgttgaagacactgtcgtttctgataaatgcttccctttggaggacactttacttgggaaagaaaagagcacaaaccgaattgtagaagatgatgcaagcataagtagctgtaataaattaataacttcagataaagtggagaattttcatgaagaacatgaaaagaatagtcaccatattcacaaaaatgctgatgacagtactaagaaacccaatgcagaaactacagtggcttctgaaatcaaggaaacaaatgatacttggaactcccagtttgggaaaaggccagaatcaccatcagaaatatctccaatcaagggatctgttagaactggtttgtttgaatgggataatgattttgaagatatcagatcagaagactgtattttaagtttggatagtgatccccttttggagatgaaggatgacgattttaaaaatcgattggaaaatctgaatgaagccattgaggaagatattgtacaaagtgttcttaggccaaccaactgtaggacgtactgtagggccaataaaacgaaatcctcccaaggagcatcaaattttgataagctgatggacggcaccagtcaggccttagccaaagcaaacagtgaatcgagtaaagatggcctgaatcaggcaaagaaagggggtgtaagttgtgggaccagttttagagggacagttggacggactagagattacactgttttacatccatcttgcttgtcagtttgtaatgttaccatacaggatactatggaacgcagcatggatgagttcactgcatccactcctgcagatttgggagaagctggtcgtctcagaaaaaaggcagatattgcaacttctaagactactactagatttcgacctagtaatactaaatccaaaaaggatgttaaacttgaattttttggttttgaagatcatgagacaggaggtgatgaaggaggttctggaagttctaattacaaaattaagtattttggctttgatgatctcagtgaaagcgaagatgatgaagatgatgactgtcaagtagaaagaaagacaagcaaaaaaagaactaaaacagctccatcaccctccttgcagcctcccccagaaagcaatgataattcccaggacagtcagtctggtactaacaatgcagaaaacttggattttacagaggacttgcctggtgtgcctgaaagtgtgaagaagcccataaataaacaaggagataaatcaaaggaaaataccagaaagatttttagtggccccaaacggtcacccacaaaagctgtatataatgccagacattggaatcatccagattcagaagaactgcctgggccaccagtagtaaaacctcagagtgtcacagtgaggctgtcttcaaaggaaccaaatcaaaaagatgatggagtttttaaggctcctgcaccaccatccaaagtgataaaaactgtgacaatacctactcagccctaccaagatatagttactgcactgaaatgcagacgagaagacaaagaattatatactgttgttcagcacgtgaagcacttcaacgatgttgtagaatttggtgaaaatcaagagttcactgatgacattgagtacttgttaagtggcttaaagagcactcagcctctaaacacacgttgccttagtgttattagcttggctactaaatgtgccatgcccagttttcgaatgcacctgagagcacatgggatggtagcaatggtctttaaaaccttggatgattcccagcaccatcagaatctgtccctctgtacagctgccctcatgtatatactgagtagagatcgtttgaacatggatcttgatagagctagcttagatctaatgattcgacttttggaactggaacaagatgcttcatcagccaagctactgaatgaaaaagacatgaacaaaattaaagaaaaaatccgaaggctctgtgaaactgtacacaacaagcatcttgatctagaaaatataacgactgggcatttagctatggagacattattatcccttacttctaaacgagcaggagactggtttaaagaagaactccggcttttgggtggtctggatcatattgtagataaagtaaaagaatgtgtggatcatttaagtagagatgaggatgaagagaaactggtagcctcactatggggagcagagagatgtttacgagttttagaaagtgtaactgtgcataatcccgaaaatcaaagctacttgatagcatataaagattcccaacttattgtttcatcagctaaagcattacagcattgtgaagaactgattcagcagtacaaccgtgctgaggacagcatatgcttagctgacagtaagcctctgcctcaccagaatgtaactaaccatgtaggcaaagcagtggaggactgcatgagggccatcatcggggtgttgcttaatttaactaatgataatgagtggggcagcaccaaaacaggagagcaggacggtctcataggcacagcgctgaactgtgtgcttcaggttccaaagtacctacctcaggagcagagatttgatattcgagtgctgggcttaggtctgctgataaatctagtggagtatagtgctcggaatcggcactgtcttgtcaacatggaaacatcgtgctcttttgattcttccatctgtagtggagaaggggatgatagtttaaggataggtggacaagttcatgctgtccaggctttagtgcagctattccttgagcgagagcgggcagcccagctagcagaaagtaaaacagatgagttgatcaaagatgctcccaccactcagcatgataagagtggagagtggcaagaaacaagtggagaaatacagtgggtgtcaactgaaaagactgatggtacagaagagaaacataagaaggaggaggaggatgaagaacttgacctcaataaagcccttcagcatgccggcaaacacatggaggattgcattgtggcctcctacacggcactacttcttgggtgtctctgccaggaaagtccaatcaatgtaaccactgtgcgggaatatctgccagaaggagacttttcaataatgacagagatgctcaaaaaatttttgagttttatgaatctcacttgtgctgttggaacaactggccagaaatctatctctagagtgattgaatatttggaacattgctagctgctttacctttgcttcaggtgctcggtaatgctggagctatccttagacaaagaaaagtcaagtcatgaaagaagtccttgaagatataccaagaacattcatcagtatcattcgtgtttggatttttaaggccacctgatttcttcgtcatgcattcggcatttgctaaatgacagttactacatcaatctgcaactatcaaaaatgaggggaaaaggttcaggctgttaacaattccatgcagtatttaaatacatttactttggcagagtttataccctccccttgttttcttgctttattctgggcaagtttgaaggggaaaatttgtgctgctgttagtgcaactgctgtgtatgttgagccactgttgtcatgccagccaggtgcaaaggcagcttagctactgaggtagcgaatgttctgaggacattctagacaacagcttagttcctttttcaggctcatttgcttttgcttttttgttgaatgattccaatcgtaaataaagcttttaataattttgtgaattttttggttgttgttccctgaactactgtctatatttaaaattagatggaatccaaagatacacgggattaatagtatatttttttattcttgattaggtttgggttattgaactattttttacttttgagaccacaaccatattcaatatcataccataatgtgtcatagctataggcacaagaaaaacaacagtttgagagaatattatataagatgatgtgccctgttaaaaggaggaggcaaaatagtcaaacccagggtagtttacacttttttaaccctcagagaactctgcattttagggtacttgaggctgacttaactaaaagttttaaagtaaccttttttccattgtaaatatttctgtaaatactaccaattggaaattagaacagtagagtacttttctgaatccaatcctatttttattttatacagtatttctcagctgtgatctttggagcaaaagccaacggcaggaaaaaatagtttgtaccagtttcatgaagtatgtctttgggtttttgtaaataattttaactcaaataaaattgctactttcaata

SEQ ID NO: 416683 - DNA, 2114 bp, Homo sapiens
agttggtatcctaaagtattacggactacgagcagtaagcatatagcttgtctcaaagattaattccatgcagtatttaaatacatttactttggcagagtttataccctccccttgttttcttgctttattctgggcaagtttgaaggggaaaatttgtgctgctgttagtgcaactgctgtgtatgttgagccactgttgtcatgccagccaggtgcaaaggcagcttagctactgaggtagcgaatgttctgaggacattctagacaacagcttagttcctttttcaggctcatttgcttttgcttttttgttgaatgattccaatcgtaaataaagcttttaataattttgtgaattttttggttgttgttccctgaactactgtctatatttaaaattagatggaatccaaagatacacgggattaatagtatatttttttattcttgattaggtttgggttattgaactattttttacttttgagaccacaaccatattcaatatcataccataatgtgtcatagctataggcacaagaaaaacaacagtttgagagaatattatataagatgatgtgccctgttaaaaggaggaggcaaaatagtcaaacccagggtagtttacacttaatgctagggaggctcttaaaacattattagattttgaggaaagactctctagatatattttctaatgttcagtacaataaatataaggaagctaaaacaccaatgtggaattcctgtttccagataacatgtatattcttctatagagtgacaggatcaattgcataagcgcaaagccttaaattgctggtttagagaagacccttttttcattcagattctttgttcgtagagcagttatttgaaaaacagttatggaacacaaaacattttatagatttaatatcataacattgcaaatttttcttgtattattgttcacaccactggttatacttttttttttccttttttattgattgggcctgaatacaggctttctagagatctttttcattaatacttttaaatacctttcaggtagttacatcatgtttcttcattggatttgtaaaacttgaagccataaaaatattagtttggtgtgtattggggaaaatagctaaaagtctaatttttacccatttagactttgttatttccttgtataaagtgacaaatcggggctcttgtatcagtgccagctgtaatgtttttaaatgcagtggctgccttctattgtcttcctatttttgataatgcagattgttgggaaatctgtaaggaagtaactgattccaggcaaattgttttcttccttctacccaccccaacccctacccatcaccttttaagaacatagtacgccagtgtaacgtgggaaccattgagattgtatttgccctgagtattaaagctagcttagcaaaatacttttaaaaacatattggtaaatgatacccataaaattaaattagttatattttattttaaaatgcaaaatacattgatatttattaatcattggatttagggaaagggacagatttttggtgaacctgacttgtggcagatggtaaggaatattataaaacatttggatgagaacaatcagggcgaactgcatttttctgttacactggtaatcatttgaaaattgatttacctcagtgtttaacagttttttgttttgttttgttttttaaataataactaattgtcgagcactgatagagatgcagattttggtggggggaggtggtgggggagataatcacttcaccaactgcagtgcatttgtgtgtttttaaccctcagagaactctgcattttagggtacttgaggctgacttaactaaaagttttaaagtaaccttttttccattgtaaatatttctgtaaatactaccaattggaaattagaacagtagagtacttttctgaatccaatcctatttttattttatacagtatttctcagctgtgatctttggagcaaaagccaacggcaggaaaaaatagtttgtaccagtttcatgaagtatgtctttgggtttttgtaaataattttaactcaaataaaattgctactttcaata

SEQ ID NO: 416684 - DNA, 3071 bp, Homo sapiens
cgcgcggggactgtgggaagcggagtgacggagcgagcggctgttggaggaaggaggtgggggccgggagcgcaaatggcgttgagatggttcagggccctgttcaaactccagcactgaccattcaccggcggaagcggcggcgcaggaggcggcggcggcccagcgggggcacacagcaggctctgttaccagctccagcagtggcggccagcgagagctaggcccgggcccggccggcggcgctcgaggcggggagggaagttgcggggccgccgctcctgcccccccaaccgggcttcctatttaccgaaagcagagtccctcgcctctctcggctctcacctgccggccctgctctcccgcgcgagggttccgcgcccgcccgcgggccgtagggagcgggagaggcggaggcggcccgtggccaaagcacccgccaggctccgaggagaatatgaaactggtgtcaaaatgacatccagatttgggaaaacatacagtaggaaaggtggaaatggcagttcaaaattcgatgaagtcttttccaacaaacggactacccttagcacaaaatggggagagaccacatttatggctaaattagggcagaagaggcccaatttcaaaccagatatccaagaaattccgaagaaacctaaagtggaagaagaaagtactggagatccttttggatttgatagtgatgatgagtctctaccagtttcttcaaagaatttagcccaggttaagtgttcctcttattcagaatctagtgaagctgctcagttggaagaggtcacttcagtacttgaagctaatagcaaaattagtcatgtggtcgttgaagacactgtcgtttctgataaatgcttccctttggaggacactttacttgggaaagaaaagagcacaaaccgaattgtagaagatgatgcaagcataagtagctgtaataaattaataacttcagataaagtggagaattttcatgaagaacatgaaaagaatagtcaccatattcacaaaaatgctgatgacagtactaagaaacccaatgcagaaactacagtggcttctgaaatcaaggaaacaaatgatacttggaactcccagtttgggaaaaggccagaatcaccatcagaaatatctccaatcaagggatctgttagaactggtttgtttgaatgggataatgattttgaagatatcagatcagaagactgtattttaagtttggatagtgatccccttttggagatgaaggatgacgattttaaaaatcgattggaaaatctgaatgaagccattgaggaagatattgtacaaagtgttcttaggccaaccaactgtaggacgtactgtagggccaataaaacgaaatcctcccaaggagcatcaaattttgataagctgatggacggcaccagtcaggccttagccaaagcaaacagtgaatcgagtaaagatggcctgaatcaggcaaagaaagggggtgtaagttgtgggaccagttttagagggacagttggacggactagagattacactgttttacatccatcttgcttgtcagtttgtaatgttaccatacaggatactatggaacgcagcatggatgagttcactgcatccactcctgcagatttgggagaagctggtcgtctcagaaaaaaggcagatattgcaacttctaagactactactagatttcgacctagtaatactaaatccaaaaaggatgttaaacttgaattttttggttttgaagatcatgagacaggaggtgatgaaggaggttctggaagttctaattacaaaattaagtattttggctttgatgatctcagtgaaagcgaagatgatgaagatgatgactgtcaagtagaaagaaagacaagcaaaaaaagaactaaaacagctccatcaccctccttgcagcctcccccagaaagcaatgataattcccaggacagtcagtctggtactaacaatgcagaaaacttggattttacagaggacttgcctggtgtgcctgaaagtgtgaagaagcccataaataaacaaggagataaatcaaaggaaaataccagaaagatttttagtggccccaaacggtcacccacaaaagctgtatataatgccagacattggaatcatccagattcagaagaactgcctgggccaccagtagtaaaacctcagagtgtcacagtgaggctgtcttcaaaggaaccaaatcaaaaagatgatggagtttttaaggctcctgcaccaccatccaaagtgataaaaactgtgacaatacctactcagccctaccaagatatagttactgcactgaaatgcagacgagaagacaaagaattatatactgttgttcagcacgtgaagcacttcaacgatgttgtagaatttggtgaaaatcaagagttcactgatgacattgagtacttgttaagtggcttaaagagcactcagcctctaaacacacgttgccttagtgttattagcttggctactaaatgtgccatgcccagttttcgaatgcacctgagagcacatgggatggtagcaatggtctttaaaaccttggatgattcccagcaccatcagaatctgtccctctgtacagctgccctcatgtatatactgagtagagatcgtttgaacatggatcttgatagagctagcttagatctaatgattcgacttttggaactggaacaagatgcttcatcagccaagctactgaatgaaaaagacatgaacaaaattaaagaaaaaatccgaaggctctgtgaaactgtacacaacaagcatcttgatctagaaaatataacggtgggttccttcttccttccttctaagatgagaattactttcagaaagtctttggttagttgcagtagctgtgtgactgtgggcaaattattttaattctaaccttggtttacagtttggcaaatttcttatgtttagatctgagcataatttcattccttgcctgaacttcctaaactagtttatctgtatttaggctttttgcccaataaatagttgcacatttt

SEQ ID NO: 416685 - DNA, 310 bp, Homo sapiens
taagtagcgtaggaatatgtactcattgtggaggaaaattgacatggaagcatgtagggtaataaatcagcctttctttataccccttcctcatatttgtttatttaaaagtctgtgtggtgagtgtcaaaagtcatgagggaagaatccctaggtttttatttttatatgcactgtttaacacttgtatttgatgattatatgttttcttaaattttttttcacagagaatatgaaactggtgtcaaaatgacatccagatttgggaaaacatacagtaggaaaggtggaaatggcagttcaaaattcg

SEQ ID NO: 416686 - DNA, 762 bp, Homo sapiens
ttttgttgtttttgagacagagtcttgctctgtcacccaggctggagagcagtggcacgatcagggcttactgcagccttgacgtcccaggctcaagcgatcctcccacctcagccttgcaagtagctgggagctacaggcgtgcaccgccacacccattaaaggtttttgaattttaatggagaggaggtctcactatgttgcccaggctggtctcaaactcctgagctcaagtgatccttccaactcagccttccaaagtgctagaattataggtgtgaggcaccacgcctggccctttgcccagttttaattgggttgtttttgttgttgagttgtaagaatgttttttatatgttctggatacttgacccttatcaagttcatgatttgcaaatatattttctcattctgtggattaatcttttcagtttgttaattgtgtcctttgcaacacaaaaattttaactaaaagttttatggtttcagcttttcttttggatccctatttcattttgattaaatttttgttaatctgtggatatccagttgtcctagcatcattcgttgatttgtagcagttttaaagtaaagataactaacagaatggttggttttgtgaggtttgtgttaattaatatactgttacaattctttacttcaattctctcagcccttcagcatgccggcaaacacatggaggattgcattgtggcctcctacacggcactacttcttgggtgtctctgccaggaaagtcca

SEQ ID NO: 416687 - DNA, 270 bp, Homo sapiens
tcttgtgaactgtctaatcttcaatgaggcctatccagtaaaatattcattgctaagatggtattttttggtttcacttgttttttttcatagcttaaatttctctcattatgtttatgtttccgaaacttcaagtccctgcacatataattactatttttttatgtttttgagagtgacaggatctcactttgttgcccaggctcagactgatcacaaactcctggcctcaagtggttcctcttggcccagcctataatcacttttttc

SEQ ID NO: 416688 - DNA, 492 bp, Homo sapiens
tgtcacttgactctgtagtgccacttaggtgtcatttcactgttgcacagatctactggaacttcactctccaagtcctctcacaacttgcttggccttactgtacttctcttatttgtggtacctgactattagccaacctttccttggtcttccactgtcatgcatgattctataactttttcctggtgcttataatattattttactggtcacatcctttctatctctctctctctctctctcccctttgggctcttctttctctctctctttttttttttttgaggtggagtctccttctgtcgctcagactggagtgcagtggcaccatctcagctcactgcaacctccactttccaggttcaagcgattctcctgcctcagcctcccgagtagctgggattccaggcaagcaccaccacacccagctaatttttgtatttttagtagagacgggtttttgccatgttggccaggctggtcttgaac

SEQ ID NO: 416689 - DNA, 378 bp, Homo sapiens
gaagtggattaaatcagttgctaccatcttcagtacgtattactgatgtgcctttgccctagtgtcatggtccctggacagtgatacattttctgaaagaagtaagatatttaaatgaaaaatctttcacctgctgcccccctataaaaccccacccactggctgggaatgggggtggggttcagggggagtgcctggcaattaaagttgtaaaaactcttgaacaaatagtctgggtccaaatagtctgggtccagtggttcatgcctgtaatcccagcactttgggaggccgaggtgtaagaatggcttgaacccaggagtttaagatcagcctgggcaacatagtaagacctttatttgtctctacaaaaaattt

SEQ ID NO: 416690 - DNA, 1346 bp, Homo sapiens
gttcttattccccctcccccatttttatgtaggagaaaataccgtacaaacccttctgcacattggacttgagatggcttttccatctcagtgcaaaaaggcgacattttttcttaaccactgcacattatttggttatcacccagtttagggacattgagtttcttttgtactctagtgcttgaatgattatccttggatgtacatctttccttgtatatttaaatatgtctcatctcagtttccacaggtggaattgctctgcaaaaaggcatatatgtatttttaatttgccctctatgtaccaaatgttttcaccccagcattgctgatggattagagtgctgccaagtttttggatttttacctaccagcttttgaagggcagattatttcaagtcttaattaatattttcaggaacagtaacaatatcatttggttaaattgagagaaatggggttcagttgacagaatttgttcaggatatagaatttttctgctgctgctcctgcagctacacacctacaactagtaaaaacatggttgcttaggttgtcaaatgaccagcaaacctggagaggaacctggaatgactataaacagctccacccacactttttttgggcaaatgtgcaagcttagtagaatctaaaaggatacttcagcctttgtttgagttgcagaaaattaacatggtaaggaggaaaaaatcactaatttttttaaaaagttccctgatacaggaactgaaaatgatttttgaccaacctgggcaatagagcaaaatcccatctctacaaaaaaatacaaaaattagtcgggcatggtggtgctgcctgtagtgacggctactcatcctgaggtgggaagattgcttggggccaggaggttgaggctgcagtgagccaggatcacaccactgcaccagcctgggctacagagtaagactcaagaaaaaaaaaagatgtttaattaatcttgcttcagtgctgaggtggtacagggagggagaaagggatattgggctatgaattccatctaaactggggatttttatcagggtgtgaagaaagattttcaggaataattatctgagttacttggagtaaaagtagcaggaggaggaaaagagatatggcctgtgggtctctgacttgccaaacttcttattcattttacaaatcatgatttctagagcatcttaatctttgaggcccagctgcttggaagttgcataatctctatacttcagttcccccctataaaatggggaatatgatagaatctaccttgtatttgagaggactaaataaatataaagtgcttagaaaagtaaggactcaac

SEQ ID NO: 416691 - DNA, 1195 bp, Homo sapiens
gttcttattccccctcccccatttttatgtaggagaaaataccgtacaaacccttctgcacattggacttgagatggcttttccatctcagtgcaaaaaggcgacattttttcttaaccactgcacattatttggttatcacccagtttagggacattgagtttcttttgtactctagtgcttgaatgattatccttggatgtacatctttccttgtatatttaaatatgtctcatctcagtttccacaggtggaattgctctgcaaaaaggcatatatgtatttttaatttgccctctatgtaccaaatgttttcaccccagcattgctgatggattagagtgctgccaagtttttggatttttacctaccagcttttgaagggcagattatttcaagtcttaattaatattttcaggaacagtaacaatatcatttggttaaattgagagaaatggggttcagttgacagaatttgttcaggatatagaatttttctgctgctgctcctgcagctacacacctacaactagtaaaaacatggttgcttaggttgtcaaatgaccagcaaacctggagaggaacctggaatgactataaacagctccacccacactttttttgggcaaatgtgcaagcttagtagaatctaaaaggatacttcagcctttgtttgagttgcagaaaattaacatggtaaggaggaaaaaatcactaatttttttaaaaagttccctgatacaggaactgaaaatgatttttgaccaacctgggcaatagagcaaaatcccatctctacaaaaaaatacaaaaattagtcgggcatggtggtgctgcctgtagtgacggctactcatcctgaggtgggaagattgcttggggccaggaggttgaggctgcagtgagccaggatcacaccactgcaccagcctgggctacagagcgagagctccgtctcaaaaaaaaaaaaaaaaaaaaaaataaatttattatcattgactattatattatcatgatacaccacccaacgcctacctacccaaaaatccttcctatcttgcttaccaattaaattattaaattgaggaatcaatagtgatgcctaggtttggggcatgttgtctaggtggaattaattttaattacacttttaacccctagcatatccaaatattatttcacatgtgatcaacat

SEQ ID NO: 416692 - DNA, 594 bp, Homo sapiens
  misc_feature (36)..(36): n is a, c, g, or t
  misc_feature (98)..(99): n is a, c, g, or t
  misc_feature (131)..(131): n is a, c, g, or t
ggggtcaagaccagcccgggcaacatggcaaaaccncatctctaccagaaatacacagaattagccaggcatggtggctgcgcctgcagttccagccnntaaggaggctgaggtgggagaatccccgagcntgggaaatccaggctgcagtgagccaggatcacaccactgcaccagcctgggctacagagtaagactcaagaaaaaaaaaagatgtttaattaatcttgcttcagtgctgaggtggtacagggagggagaaagggatattgggctatgaattccatctaaactggggatttttatcagggtgtgaagaaagattttcaggaataattatctgagttacttggagtaaaagtagcaggaggaggaaaagagatatggcctgtgggtctctgacttgccaaacttcttattcattttacaaatcatgatttctagagcatcttaatctttgaggcccagctgcttggaagttgcataatctctatacttcagttcccccctataaaatggggaatatgatagaatctaccttgtatttgagaggactaaataaatataaagtgcttagaaaagtaaggactcaac

SEQ ID NO: 416693 - DNA, 682 bp, Homo sapiens
aggggaaaggggaagtttgggaggaaggcttctgagaagactggtgggagagaaggagagcctgcagacagaggcctccagcttggtctgtctccccacctctaccagcatctgctgagctatgagccaaaccagggatttacagggaggaaaagctttcagactgctgaaggcccagcaggaagagaggctggatgagatcaacaagcaattcctagacgatcccaaatatagcagtgatgaggatctgccctccaaactggaaggcttcaaagagaaatacatggagtttgaccttaatggaaatggcgatattgatatcatgtccctgaaacgaatgctggagaaacttggagtccccaagactcacctagagctaaagaaattaattggagaggtgtccagtggctccggggagacgttcagctaccctgactttctcaggatgatgctgggcaagagatctgccatcctaaaaatgatcctgatgtatgaggaaaaagcgagagaaaaggaaaagccaacaggccccccagccaagaaagctatctctgagttgccctgatttgaagggaaaagggatgatgggattgaaggggcttctaatgacccagatatggaaacagaagacaaaattgtaagccagagtcaacaaattaaataaattaccccctcctccaga

SEQ ID NO: 416694 - DNA, 738 bp, Homo sapiens
  misc_feature (738)..(738): n is a, c, g, or t
aggggaaaggggaagtttgggaggaaggcttctgagaagactggtgggagagaaggagagcctgcagacagaggcctccagcttggtctgtctccccacctctaccagcatctgctgagctatgagccaaaccagggatttacagggaggaaaagctttcagactgctgaaggcccagcaggaagagaggctggatgagatcaacaagcaattcctagacgatcccaaatatagcagtgatgaggatctgccctccaaactggaaggcttcaaagagaaatacatggagtttgaccttaatggaaatggcgatattgatatcatgtccctgaaacgaatgctggagaaacttggagtccccaagactcacctagagctaaagaaattaattggagaggtgtccagtggctccggggagacgttcagctaccctgactttctcaggatgatgctgggcaagagatctgccatcctaaaaatgatcctgatgtatgaggaaaaagcgagagaaaaggaaaagccaacaggccccccagccaagaaagctatctctgagttgccctgatttgaagggaaaagggatgatgggattgaaggggcttctaatgacccagatatggaaacagaagacaaaattgtaagccagagtcaacaaattaaataaattaccccctcctccagaaaaaaatcgaccaagcttatgcatgcgggcgcatttgagctaacttgccaattccn

SEQ ID NO: 416695 - DNA, 620 bp, Homo sapiens
aggggaaaggggaagtttgggaggaaggcttctgagaagactggtgggagagaaggagagcctgcagacagaggcctccagcttggtctgtctccccacctctaccagcatctgctgagctatgagccaaaccagggatttacaggcaattcctagacgatcccaaatatagcagtgatgaggatctgccctccaaactggaaggcttcaaagagaaatacatggagtttgaccttaatggaaatggcgatattgatatcatgtccctgaaacgaatgctggagaaacttggagtccccaagactcacctagagctaaagaaattaattggagaggtgtccagtggctccggggagacgttcagctaccctgactttctcaggatgatgctgggcaagagatctgccatcctaaaaatgatcctgatgtatgaggaaaaagcgagagaaaaggaaaagccaacaggccccccagccaagaaagctatctctgagttgccctgatttgaagggaaaagggatgatgggattgaaggggcttctaatgacccagatatggaaacagaagacaaaattgtaagccagagtcaacaaattaaataaattaccccctcctccaga

SEQ ID NO: 416696 - DNA, 1046 bp, Homo sapiens
aggggaaaggggaagtttgggaggaaggcttctgagaagactggtgggagagaaggagagcctgcagacagaggcctccagcttggtctgtctccccacctctaccagcatctgctgagctatgagccaaaccagggatttacagggaggaaaagctttcagactgctgaaggcccagcaggaagagaggctggatgagatcaacaagcaattcctagacgatcccaaatatagcagtgatgaggatctgccctccaaactggaaggcttcaaaggtgagggggaaactgtaggcggtggagacagggctgggggtaggagggttaggatttccacaagaacaaggcaggaacagcagagataaaaagtttacttttgtggtagcaaaaggggaacctgcctttattgccctcctgccacactgcggtccctttcccgggcctgcctctctcagcatcccctctagctccttacaccctagcggggcccctcaactccccaaccccacttcctctgcctgcccctcctcctccttccacgttgtctcctccacctagcagttggttggcaaccccttcctcagtcccctgctgaaaaccctccagtcagcgcttatcccttctgctctctcccctcaccagaaatacatggagtttgaccttaatggaaatggcgatattgatatcatgtccctgaaacgaatgctggagaaacttggagtccccaagactcacctagagctaaagaaattaattggagaggtgtccagtggctccggggagacgttcagctaccctgactttctcaggatgatgctgggcaagagatctgccatcctaaaaatgatcctgatgtatgaggaaaaagcgagagaaaaggaaaagccaacaggccccccagccaagaaagctatctctgagttgccctgatttgaagggaaaagggatgatgggattgaaggggcttctaatgacccagatatggaaacagaagacaaaattgtaagccagagtcaacaaattaaataaattaccccctcctccaga

SEQ ID NO: 416697 - DNA, 1183 bp, Homo sapiens
aggggaaaggggaagtttgggaggaaggcttctgagaagactggtgggagagaaggagagcctgcagacagaggcctccagcttggaggaaaagctttcagactgctgaaggcccagcaggaagagaggctggatgagatcaacaagcaattcctagacgatcccaaatatagcagtgatgaggatctgccctccaaactggaaggcttcaaaggtgagggggaaactgtaggcggtggagacagggctgggggtaggagggttaggatttccacaagaacaaggcaggaacagcagagataaaaagtttacttttgtggtagcaaaaggggaacctgcctttattgccctcctgccacactgcggtccctttcccgggcctgcctctctcagcatcccctctagctccttacaccctagcggggcccctcaactccccaaccccacttcctctgcctgcccctcctcctccttccacgttgtctcctccacctagcagttggttggcaaccccttcctcagtcccctgctgaaaaccctccagtcagcgcttatcccttctgctctctcccctcaccagaaatacatggagtttgaccttaatggaaatggcgatattggtgagaaacgggtgatttgcgggggcagggtggtgtgcaggcctaagaagacagaggtctctcctacatgctccattcctcatgatttgggagggggcccacctaccacagtgggaggaaggagaatggggatgcggaagtgggagaggagagagagggtctccccaccttctccccatccccatcctctgcccccagatatcatgtccctgaaacgaatgctggagaaacttggagtccccaagactcacctagagctaaagaaattaattggagaggtgtccagtggctccggggagacgttcagctaccctgactttctcaggatgatgctgggcaagagatctgccatcctaaaaatgatcctgatgtatgaggaaaaagcgagagaaaaggaaaagccaacaggccccccagccaagaaagctatctctgagttgccctgatttgaagggaaaagggatgatgggattgaaggggcttctaatgacccagatatggaaacagaagacaaaattgtaagccagagtcaacaaattaaataaattaccccctcctccaga

SEQ ID NO: 416698 - DNA, 1496 bp, Homo sapiens
aggggaaaggggaagtttgggaggaaggcttctgagaagactggtgggagagaaggagagcctgcagacagaggcctccagcttggtctgtctccccacctctaccagcatctgctgagctatgagccaaaccagggatttacagggaggaaaagctttcagactgctgaaggcccagcaggaagagaggctggatgagatcaacaagcaattcctagacgatcccaaatatagcagtgatgaggatctgccctccaaactggaaggcttcaaaggtgagggggaaactgtaggcggtggagacagggctgggggtaggagggttaggatttccacaagaacaaggcaggaacagcagagataaaaagtttacttttgtggtagcaaaaggggaacctgcctttattgccctcctgccacactgcggtccctttcccgggcctgcctctctcagcatcccctctagctccttacaccctagcggggcccctcaactccccaaccccacttcctctgcctgcccctcctcctccttccacgttgtctcctccacctagcagttggttggcaaccccttcctcaagaaatacatggagtttgaccttaatggaaatggcgatattggtgagaaacgggtgatttgcgggggcagggtggtgtgcaggcctaagaagacagaggtctctcctacatgctccattcctcatgatttgggagggggcccacctaccacagtgggaggaaggagaatggggatgcggaagtgggagaggagagagagggtctccccaccttctccccatccccatcctctgcccccagatatcatgtccctgaaacgaatgctggagaaacttggagtccccaagactcacctagagctaaagaaattaattggagaggtgtccagtggctccggggagacgttcagctaccctgactttctcaggatgatgctgggcaagagatctgccatcctaaaaatgtgagtgtcaatttccaacctcccctgtacttacctgttttctcctcccccatccctacccttgtccacaggctcaacatttctacacgttgcccatcatcccttcttccatccttagagggacccttccaaggtcccgaccccatccctatccatagtcctggtccccagaaactccaacccctgcccttcctcttcccccttccaccctcacatccccatccccttctagcctttcctagcaccctatgatttattcccttgagaggagtgttccctgatccctgtgcctcttcccatctcaaccaggatcctgatgtatgaggaaaaagcgagagaaaaggaaaagccaacaggccccccagccaagaaagctatctctgagttgccctgatttgaagggaaaagggatgatgggattgaaggggcttctaatgacccagatatggaaacagaagacaaaattgtaagccagagtcaacaaattaaataaattaccccctcctccaga

SEQ ID NO: 416699 - DNA, 621 bp, Homo sapiens
aggggaaaggggaagtttgggaggaaggcttctgagaagactggtgggagagaaggagagcctgcagacagaggcctccagcttggaggaaaagctttcagactgctgaaggcccagcaggaagagaggctggatgagatcaacaagcaattcctagacgatcccaaatatagcagtgatgaggatctgccctccaaactggaaggcttcaaagagaaatacatggagtttgaccttaatggaaatggcgatattgatatcatgtccctgaaacgaatgctggagaaacttggagtccccaagactcacctagagctaaagaaattaattggagaggtgtccagtggctccggggagacgttcagctaccctgactttctcaggatgatgctgggcaagagatctgccatcctaaaaatgatcctgatgtatgaggaaaaagcgagagaaaaggaaaagccaacaggccccccagccaagaaagctatctctgagttgccctgatttgaagggaaaagggatgatgggattgaaggggcttctaatgacccagatatggaaacagaagacaaaattgtaagccagagtcaacaaattaaataaattaccccctcctccaga

SEQ ID NO: 416700 - DNA, 476 bp, Homo sapiens
tggatggggagggcctaccctggctcttattttcccctccatagcaattcctagacgatcccaaatatagcagtgatgaggatctgccctccaaactggaaggcttcaaagatatcatgtccctgaaacgaatgctggagaaacttggagtccccaagactcacctagagctaaagaaattaattggagaggtgtccagtggctccggggagacgttcagctaccctgactttctcaggatgatgctgggcaagagatctgccatcctaaaaatgatcctgatgtatgaggaaaaagcgagagaaaaggaaaagccaacaggccccccagccaagaaagctatctctgagttgccctgatttgaagggaaaagggatgatgggattgaaggggcttctaatgacccagatatggaaacagaagacaaaattgtaagccagagtcaacaaattaaataaattaccccctcctccaga

SEQ ID NO: 416701 - DNA, 1363 bp, Homo sapiens
aggggaaaggggaagtttgggaggaaggcttctgagaagactggtgggagagaaggagagcctgcagacagaggcctccagcttggtctgtctccccacctctaccagcatctgctgagctatgagccaaaccagggatttacagggaggaaaagctttcagactgctgaaggcccagcaggaagagaggctggatgagatcaacaagcaattcctagacgatcccaaatatagcagtgatgaggatctgccctccaaactggaaggcttcaaaggtgagggggaaactgtaggcggtggagacagggctgggggtaggagggttaggatttccacaagaacaaggcaggaacagcagagataaaaagtttacttttgtggtagcaaaaggggaacctgcctttattgccctcctgccacactgcggtccctttcccgggcctgcctctctcagcatcccctctagctccttacaccctagcggggcccctcaactccccaaccccacttcctctgcctgcccctcctcctccttccacgttgtctcctccacctagcagttggttggcaaccccttcctcagtcccctgctgaaaaccctccagtcagcgcttatcccttctgctctctcccctcaccagaaatacatggagtttgaccttaatggaaatggcgatattgatatcatgtccctgaaacgaatgctggagaaacttggagtccccaagactcacctagagctaaagaaattaattggagaggtgtccagtggctccggggagacgttcagctaccctgactttctcaggatgatgctgggcaagagatctgccatcctaaaaatgatcctgatgtatgaggaaaaagcgagagaaaaggaaaagccaacaggccccccagccaagaaagctatctctgagttgccctgatttgaagggaaaagggatgatgggattgaaggggcttctaatgacccagatatggaaacagaagacaaaattgtaagccagagtcaacaaattaaataaattaccccctcctccagagaagaacaaaaaagaaaaaaaacaaaccgtggtggggcgcgctgtgggcccggagaaaagttcttcgagagaacccaccggtgggagcgcgccggggccccaatgggtctaggcgaaccgggggccaagacgggttcccaaagaggaaacccgggccaagagaactaaggggcgggggattcctcccaccaataataaaaaggccccgggggggaacaccgacgggttttctgaaacaatcccgaaagagaacccggagggcacaatagcgggcactttcacacgggggacccccgagggagccgattataaataca

SEQ ID NO: 416702 - DNA, 420 bp, Homo sapiens
  misc_feature (1)..(1): n is a, c, g, or t
  misc_feature (9)..(9): n is a, c, g, or t
nacattctnaggaaactcgaaggaaggaaggcattgtaaagctgaaacctcatgaggaacctcttcgttctgagatcctcagtggaaaattcaccatcttagtccacctaatcatcctgtgaaagtggtttctctatggaaagctttgtttgcttcctacaaatacatgcttattccttaagggatgtgttagagttactgtggatttctctgttttctgtcttacaagaaacttgtctatgtaccttaatactttgtttaggatgaggagtctttgtgtccctgtacagtagtctgacgtatttccccttctgtcccctagtaagcccagttgctgtatctgaacagtttgagctctttttgtaatatactctaaacctgttatttctgtgctaataaacgagatgcagaacccttgaa

SEQ ID NO: 416703 - DNA, 1133 bp, Homo sapiens
gtcaaactcttattcttcttgaataggctctattatttgaatctctggagttattaccagctcattgcttcaaaattaagttgaggaattcaagaataatttattttagtaaattctatttaagatgtttaagaatttgaactgccaaaaatctttcctctccacagaggttgtttctttaatattaacacaaagtaagtgaccttcaggtcttattggaaactcagagtaatatggccttgcctgggaattgcaaatttccttagttttgaaattttcatagatgtctttggttcttggttgtaactgttgactgagaagagccatttacattttttgataccaacagggcaaagctttttacttaattacctctaccaggctttaagggaaatctgatacttcagcatgtgttaaactataaaatacctactccaagtatctgcccagttccttgtcccctctccccaggcccttaaaggaagttctcgatacatatttgtagaataactgaatgttttcaggattcctgtactttgctgagttaaaatggatatggtacccttgctgattggttgagcccctaagagggggcagaatattaaatattccatatcagatatgcttttacaggtttgactttagaaaagtcttagcatgtgaagcctgttggataaagggctgtgtttgcatttaatctgtcacttttgtatctcctgtcctggctggccattttgatctcatgctgttctttttttcttttgaacttgtaggtcaccatgtacttgacaagatttcatttacttaagtgccatgttgatgataataaaacaattcgtactccccaatggtggatttattactattaaagaaaccagggaaaatattaattttaatattataacaacctgaaaataatggaaaagaggtttttgaatttttttttttaaataaacaccttcttaagtgcatgagatggtttgatggtttgctgcattaaaggtatttgggcaaacaaaattggagggcaagtgactgcagttttgagaatcagttttgaccttgatgattttttgtttccactgtggaaataaatgtttgtaaataagtgtaataaaaatccctttgcattc

SEQ ID NO: 416704 - DNA, 494 bp, Homo sapiens
  misc_feature (1)..(1): n is a, c, g, or t
  misc_feature (9)..(9): n is a, c, g, or t
nacattctnaggaaactcgaaggaaggaaggcattgtaaagctgaaacctcatgaggaacctcttcgttctgagatcctcagtggaaaattcaccatcttagtccacctaatcatcctgtgaaagtggtttctctatggaaagctttgtttgcttcctacaaatacatgcttattccttaagggatgtgttagagttactgtggatttctctgttttctgtcttacaagaaacttgtctatgtaccttaatactttgtttaggatgaggagtctttgtgtccctgtacagtagtctgacgtatttccccttctgtcccctagtaagcccagttgctgtatctgaacagtttgagctctttttgtaatatactctaaacctgttatttctgtgctaataaacgagatgcagaacccttgaaaaaaaacaaccattcttaggcttgtggccacgaacctgtgggtatacaaaacaaaaggccttcctggccccagg

SEQ ID NO: 416705 - DNA, 398 bp, Homo sapiens
aaatgaaatggaagacatttttgcacacacagtgaggaaatagtggaagacgctggcaatccacagccatgtggagctgtgagtcaattacatctcctttctttgtaaattaccaagtcttgggtagtttatttaagcagtgtgagaatgtactaatacagtgttcttcaatccttgaggatcccaaatggaagcccagggaatggtagctggggacaaccccagatgttcaccggggacagggacattaagtaactggtccatgattcacacaggtaattagtgacagagcctgaatttgaacccagatagtcttactcaagagccctttctctgacctgtggtccttctagattctccgactcttaaagtcttgtaataaatatcttacacgtata

SEQ ID NO: 416706 - DNA, 2638 bp, Homo sapiens
actggagcttcctctccgcctccttcgcctagcctgcgagtgttctgagggaagcaaggaggcggcggcggccgcagcgagtggcgagtagtggaaacgttgcttctgaggggagcccaagatgaccggttctaacgagttcaagctgaaccagccacccgaggatggcatctcctccgtgaagttcagccccaacacctcccagttcctgcttgtctcctcctgggacacgtccgtgcgtctctacgatgtgccggccaactccatgcggctcaagtaccagcacaccggcgccgtcctggactgcgccttctacgatccaacgcatgcctggagtggaggactagatcatcaattgaaaatgcatgatttgaacactgatcaagaaaatcttgttgggacccatgatgcccctatcagatgtgttgaatactgtccagaagtgaatgtgatggtcactggaagttgggatcagacagttaaactgtgggatcccagaactccttgtaatgctgggaccttctctcagcctgaaaaggtatataccctctcagtgtctggagaccggctgattgtgggaacagcaggccgcagagtgttggtgtgggacttacggaacatgggttacgtgcagcagcgcagggagtccagcctgaaataccagactcgctgcatacgagcgtttccaaacaagcagggttatgtattaagctctattgaaggccgagtggcagttgagtatttggacccaagccctgaggtacagaagaagaagtatgccttcaaatgtcacagactaaaagaaaataatattgagcagatttacccagtcaatgccatttcttttcacaatatccacaatacatttgccacaggtggttctgatggctttgtaaatatttgggatccatttaacaaaaagcgactgtgccaattccatcggtaccccacgagcatcgcatcacttgccttcagtaatgatgggactacgcttgcaatagcgtcatcatatatgtatgaaatggatgacacagaacatcctgaagatggtatcttcattcgccaagtgacagatgcagaaacaaaacccaagtcaccatgtacttgacaagatttcatttacttaagtgccatgttgatgataataaaacaattcgtactccccaatggtggatttattactattaaagaaaccagggaaaatattaattttaatattataacaacctgaaaataatggaaaagaggtttttgaatttttttttttaaataaacaccttcttaagtgcatgagatggtttgatggtttgctgcattaaaggtatttgggcaaacaaaattggagggcaagtgactgcagttttgagaatcagttttgaccttgatgattttttgtttccactgtggaaataaatgtttgtaaataagtgtaataaaaatccctttgcattctttctggaccttaaatggtagaggaaaaggctcgtgagccatttgtttcttttgctggttatagttgctaattctaaagctgcttcagactgcttcatgaggaggttaatctacaattaaacaatatttcctcttggccgtccattattttctgaagcagatggttcatcatttcctgggctgttaaacaaagcgaggttaaggttagactcttgggaatcagctagttttcaatcttattagggtgcagaaggaaaactaataagaaaacctcctaatatcattttgtgactgtaaacaattatttattagcaaacaattgatcccagaagggcaaattgtttgagtcagtaatgagctgagaaaagacagagcatatctgtgtatttggaaaaataattgtaacgtaattgcagtgcatttagacaggcatctatttggacctgtttctatctctaaatgaatttttggaaacattaatgaggtttacatatttctctgacatttatatagttcttatgtccatttcagttgaccagccgctggtgattaaagttaaaaagaaaaaaattatagtgagaatgagattcatttcaatgtaatgcactaaagcagaacacgaacttagcttggcctattctaggtagttccaaatagtatttttgttgtcaaactttaaaatttatattaatttgcaaatgtatgtctctgagtaggacttggacctttcctgagatttattttatccgtgatgtattttttttaattcttttgatacagagaagggtctttttttttttaagtatttcagtgaaaacttggtgtaagtctgaacccatcttttgaaatgtattttcttcattgcaggtccacctaatcatcctgtgaaagtggtttctctatggaaagctttgtttgcttcctacaaatacatgcttattccttaagggatgtgttagagttactgtggatttctctgttttctgtcttacaagaaacttgtctatgtaccttaatactttgtttaggatgaggagtctttgtgtccctgtacagtagtctgacgtatttccccttctgtcccctagtaagcccagttgctgtatctgaacagtttgagctctttttgtaatatactctaaacctgttatttctgtgctaataaacgagatgcagaacccttgaa

SEQ ID NO: 416707 - DNA, 2623 bp, Homo sapiens
  misc_feature (15)..(15): n is a, c, g, or t
  misc_feature (17)..(17): n is a, c, g, or t
ttgttcagaggatcncnttcgacggtgttctgagggaagcaaggaggcggcggcggccgcagcgagtggcgagtagtggaaacgttgcttctgaggggagcccaagatgaccggttctaacgagttcaagctgaaccagccacccgaggatggcatctcctccgtgaagttcagccccaacacctcccagttcctgcttgtctcctcctgggacacgtccgtgcgtctctacgatgtgccggccaactccatgcggctcaagtaccagcacaccggcgccgtcctggactgcgccttctacgatccaacgcatgcctggagtggaggactagatcatcaattgaaaatgcatgatttgaacactgatcaagaaaatcttgttgggacccatgatgcccctatcagatgtgttgaatactgtccagaagtgaatgtgatggtcactggaagttgggatcagacagttaaactgtgggatcccagaactccttgtaatgctgggaccttctctcagcctgaaaaggtatataccctctcagtgtctggagaccggctgattgtgggaacagcaggccgcagagtgttggtgtgggacttacggaacatgggttacgtgcagcagcgcagggagtccagcctgaaataccagactcgctgcatacgagcgtttccaaacaagcagggttatgtattaagctctattgaaggccgagtggcagttgagtatttggacccaagccctgaggtacagaagaagaagtatgccttcaaatgtcacagactaaaagaaaataatattgagcagatttacccagtcaatgccatttcttttcacaatatccacaatacatttgccacaggtggttctgatggctttgtaaatatttgggatccatttaacaaaaagcgactgtgccaattccatcggtaccccacgagcatcgcatcacttgccttcagtaatgatgggactacgcttgcaatagcgtcatcatatatgtatgaaatggatgacacagaacatcctgaagatggtatcttcattcgccaagtgacagatgcagaaacaaaacccaagtcaccatgtacttgacaagatttcatttacttaagtgccatgttgatgataataaaacaattcgtactccccaatggtggatttattactattaaagaaaccagggaaaatattaattttaatattataacaacctgaaaataatggaaaagaggtttttgaatttttttttttaaataaacaccttcttaagtgcatgagatggtttgatggtttgctgcattaaaggtatttgggcaaacaaaattggagggcaagtgactgcagttttgagaatcagttttgaccttgatgattttttgtttccactgtggaaataaatgtttgtaaataagtgtaataaaaatccctttgcattctttctggaccttaaatggtagaggaaaaggctcgtgagccatttgtttcttttgctggttatagttgctaattctaaagctgcttcagactgcttcatgaggaggttaatctacaattaaacaatatttcctcttggccgtccattattttctgaagcagatggttcatcatttcctgggctgttaaacaaagcgaggttaaggttagactcttgggaatcagctagttttcaatcttattagggtgcagaaggaaaactaataagaaaacctcctaatatcattttgtgactgtaaacaattatttattagcaaacaattgatcccagaagggcaaattgtttgagtcagtaatgagctgagaaaagacagagcatatctgtgtatttggaaaaataattgtaacgtaattgcagtgcatttagacaggcatctatttggacctgtttctatctctaaatgaatttttggaaacattaatgaggtttacatatttctctgacatttatatagttcttatgtccatttcagttgaccagccgctggtgattaaagttaaaaagaaaaaaattatagtgagaatgagattcatttcaatgtaatgcactaaagcagaacacgaacttagcttggcctattctaggtagttccaaatagtatttttgttgtcaaactttaaaatttatattaatttgcaaatgtatgtctctgagtaggacttggacctttcctgagatttattttatccgtgatgtattttttttaattcttttgatacagagaagggtctttttttttttaagtatttcagtgaaaacttggtgtaagtctgaacccatcttttgaaatgtattttcttcattgcaggtccacctaatcatcctgtgaaagtggtttctctatggaaagctttgtttgcttcctacaaatacatgcttattccttaagggatgtgttagagttactgtggatttctctgttttctgtcttacaagaaacttgtctatgtaccttaatactttgtttaggatgaggagtctttgtgtccctgtacagtagtctgacgtatttccccttctgtcccctagtaagcccagttgctgtatctgaacagtttgagctctttttgtaatatactctaaacctgttatttctgtgctaataaacgagatgcagaacccttgaa

SEQ ID NO: 416708 - DNA, 2877 bp, Homo sapiens
actggagcttcctctccgcctccttcgcctagcctgcgagtgttctgagggaagcaaggaggcggcggcggccgcagcgagtggcgagtagtggaaacgttgcttctgaggggagcccaagatgaccggttctaacgagttcaagctgaaccagccacccgaggatggcatctcctccgtgaagttcagccccaacacctcccagttcctgcttgtctcctcctgggacacgtccgtgcgtctctacgatgtgccggccaactccatgcggctcaagtaccagcacaccggcgccgtcctggactgcgccttctacgatccaacgcatgcctggagtggaggactagatcatcaattgaaaatgcatgatttgaacactgatcaagaaaatcttgttgggacccatgatgcccctatcagatgtgttgaatactgtccagaagtgaatgtgatggtcactggaagttgggatcagacagttaaactgtgggatcccagaactccttgtaatgctgggaccttctctcagcctgaaaaggtatataccctctcagtgtctggagaccggctgattgtgggaacagcaggccgcagagtgttggtgtgggacttacggaacatgggttacgtgcagcagcgcagggagtccagcctgaaataccagactcgctgcatacgagcgtttccaaacaagcagggttatgtattaagctctattgaaggccgagtggcagttgagtatttggacccaagccctgaggtacagaagaagaagtatgccttcaaatgtcacagactaaaagaaaataatattgagcagatttacccagtcaatgccatttcttttcacaatatccacaatacatttgccacaggtggttctgatggctttgtaaatatttgggatccatttaacaaaaagcgactgtgccaattccatcggtaccccacgagcatcgcatcacttgccttcagtaatgatgggactacgcttgcaatagcgtcatcatatatgtatgaaatggatgacacagaacatcctgaagatggtatcttcattcgccaagtgacagatgcagaaacaaaacccaagtcaccatgtacttgacaagatttcatttacttaagtgccatgttgatgataataaaacaattcgtactccccaatggtggatttattactattaaagaaaccagggaaaatattaattttaatattataacaacctgaaaataatggaaaagaggtttttgaatttttttttttaaataaacaccttcttaagtgcatgagatggtttgatggtttgctgcattaaaggtatttgggcaaacaaaattggagggcaagtgactgcagttttgagaatcagttttgaccttgatgattttttgtttccactgtggaaataaatgtttgtaaataagtgtaataaaaatccctttgcattctttctggaccttaaatggtagaggaaaaggctcgtgagccatttgtttcttttgctggttatagttgctaattctaaagctgcttcagactgcttcatgaggaggttaatctacaattaaacaatatttcctcttggccgtccattattttctgaagcagatggttcatcatttcctgggctgttaaacaaagcgaggttaaggttagactcttgggaatcagctagttttcaatcttattagggtgcagaaggaaaactaataagaaaacctcctaatatcattttgtgactgtaaacaattatttattagcaaacaattgatcccagaagggcaaattgtttgagtcagtaatgagctgagaaaagacagagcatatctgtgtatttggaaaaataattgtaacgtaattgcagtgcatttagacaggcatctatttggacctgtttctatctctaaatgaatttttggaaacattaatgaggtttacatatttctctgacatttatatagttcttatgtccatttcagttgaccagccgctggtgattaaagttaaaaagaaaaaaattatagtgagaatgagattcatttcaatgtaatgcactaaagcagaacacgaacttagcttggcctattctaggtagttccaaatagtatttttgttgtcaaactttaaaatttatattaatttgcaaatgtatgtctctgagtaggacttggacctttcctgagatttattttatccgtgatgtattttttttaattcttttgatacagagaagggtctttttttttttaagtatttcagtgaaaacttggtgtaagtctgaacccatcttttgaaatgtattttcttcattgcaggtccacctaatcatcctgtgaaagtggtttctctatggaaagctttgtttgcttcctacaaatacatgcttattccttaagggatgtgttagagttactgtggatttctctgttttctgtcttacaagaaacttgtctatgtaccttaatactttgtttaggatgaggagtctttgtgtccctgtacagtagtctgacgtatttccccttctgtcccctagtaagcccagttgctgtatctgaacagtttatgctgacagcataaactattacctacttgggacatgagctatctcagggcattcagaagctcacccccaaatgtcttaagtcaattttgtttatctctctccccaaaacaaaaaaaaaaaacaactttatacggctgggcgcagtgtttcacgcctgtatttccagcactctggaaggccaaggtgggaccacaggcgtgagccacggcgcccactgtggctcaccttttatgtaacaaagtcaaagttgtgagttttttttcagttgctgtggatcctcagaatagtttatgcggggattcctcta

SEQ ID NO: 416709 - DNA, 1452 bp, Homo sapiens
actggagcttcctctccgcctccttcgcctagcctgcgagtgttctgagggaagcaaggaggcggcggcggccgcagcgagtggcgagtagtggaaacgttgcttctgaggggagcccaagatgaccggttctaacgagttcaagctgaaccagccacccgaggatggcatctcctccgtgaagttcagccccaacacctcccagttcctgcttgtctcctcctgggacacgtccgtgcgtctctacgatgtgccggccaactccatgcggctcaagtaccagcacaccggcgccgtcctggactgcgccttctacgatccaacgcatgcctggagtggaggactagatcatcaattgaaaatgcatgatttgaacactgatcaagaaaatcttgttgggacccatgatgcccctatcagatgtgttgaatactgtccagaagtgaatgtgatggtcactggaagttgggatcagacagttaaactgtgggatcccagaactccttgtaatgctgggaccttctctcagcctgaaaaggtatataccctctcagtgtctggagaccggctgattgtgggaacagcaggccgcagagtgttggtgtgggacttacggaacatgggttacgtgcagcagcgcagggagtccagcctgaaataccagactcgctgcatacgagcgtttccaaacaagcagggttatgtattaagctctattgaaggccgagtggcagttgagtatttggacccaagccctgaggtacagaagaagaagtatgccttcaaatgtcacagactaaaagaaaataatattgagcagatttacccagtcaatgccatttcttttcacaatatccacaatacatttgccacaggtggttctgatggctttgtaaatatttgggatccatttaacaaaaagcgactgtgccaattccatcggtaccccacgagcatcgcatcacttgccttcagtaatgatgggactacgcttgcaatagcgtcatcatatatgtatgaaatggatgacacagaacatcctgaagatggtatcttcattcgccaagtgacagatgcagaaacaaaacccaagtcaccatgtacttgacaagatttcatttacttaagtgccatgttgatgataataaaacaattcgtactccccaatggtggatttattactattaaagaaaccagggaaaatattaattttaatattataacaacctgaaaataatggaaaagaggtttttgaatttttttttttaaataaacaccttcttaagtgcatgagatggtttgatggtttgctgcattaaaggtatttgggcaaacaaaattggagggcaagtgactgcagttttgagaatcagttttgaccttgatgattttttgtttccactgtggaaataaatgtttgtaaataagtgtaataaaaatccctttgcattc

SEQ ID NO: 416710 - DNA, 1411 bp, Homo sapiens
actggagcttcctctccgcctccttcgcctagcctgcgagtgttctgagggaagcaaggaggcggcggcggccgcagcgagtggcgagtagtggaaacgttgcttctgaggggagcccaagatgaccggttctaacgagttcaagctgaaccagccacccgaggatggcatctcctccgtgaagttcagccccaacacctcccagttcctgcttgtctcctcctgggacacgtccgtgcgtctctacgatgtgccggccaactccatgcggctcaagtaccagcacaccggcgccgtcctggactgcgccttctacgatccaacgcatgcctggagtggaggactagatcatcaattgaaaatgcatgatttgaacactgatcaagaaaatcttgttgggacccatgatgcccctatcagatgtgttgaatactgtccagaagtgaatgtgatggtcactggaagttgggatcagacagttaaactgtgggatcccagaactccttgtaatgctgggaccttctctcagcctgaaaaggtatataccctctcagtgtctggagaccggctgattgtgggaacagcaggccgcagagtgttggtgtgggacttacggaacatgggttacgtgcagcagcgcagggagtccagcctgaaataccagactcgctgcatacgagcgtttccaaacaagcagggttatgtattaagctctattgaaggccgagtggcagttgagtatttggacccaagccctgaggtacagaagaagaagtatgccttcaaatgtcacagactaaaagaaaataatattgagcagatttacccagtcaatgccatttcttttcacaatatccacaatacatttgccacaggtggttctgatggctttgtaaatatttgggatccatttaacaaaaagcgactgtgccaattccatcggtaccccacgagcatcgcatcacttgccttcagtaatgatgggactacgcttgcaatagcgtcatcatatatgtatgaaatggatgacacagaacatcctgaagatggtatcttcattcgccaagtgacagatgcagaaacaaaacccaagtccacctaatcatcctgtgaaagtggtttctctatggaaagctttgtttgcttcctacaaatacatgcttattccttaagggatgtgttagagttactgtggatttctctgttttctgtcttacaagaaacttgtctatgtaccttaatactttgtttaggatgaggagtctttgtgtccctgtacagtagtctgacgtatttccccttctgtcccctagtaagcccagttgctgtatctgaacagtttgagctctttttgtaatatactctaaacctgttatttctgtgctaataaacgagatgcagaacccttgaa

SEQ ID NO: 416711 - DNA, 1738 bp, Homo sapiens
  misc_feature (1453)..(1453): n is a, c, g, or t
  misc_feature (1475)..(1475): n is a, c, g, or t
actggagcttcctctccgcctccttcgcctagcctgcgagtgttctgagggaagcaaggaggcggcggcggccgcagcgagtggcgagtagtggaaacgttgcttctgaggggagcccaagatgaccggttctaacgagttcaagctgaaccagccacccgaggatggcatctcctccgtgaagttcagccccaacacctcccagttcctgcttgtctcctcctgggacacgtccgtgcgtctctacgatgtgccggccaactccatgcggctcaagtaccagcacaccggcgccgtcctggactgcgccttctacgatccaacgcatgcctggagtggaggactagatcatcaattgaaaatgcatgatttgaacactgatcaagaaaatcttgttgggacccatgatgcccctatcagatgtgttgaatactgtccagaagtgaatgtgatggtcactggaagttgggatcagacagttaaactgtgggatcccagaactccttgtaatgctgggaccttctctcagcctgaaaaggtatataccctctcagtgtctggagaccggctgattgtgggaacagcaggccgcagagtgttggtgtgggacttacggaacatgggttacgtgcagcagcgcagggagtccagcctgaaataccagactcgctgcatacgagcgtttccaaacaagcagggttatgtattaagctctattgaaggccgagtggcagttgagtatttggacccaagccctgaggtacagaagaagaagtatgccttcaaatgtcacagactaaaagaaaataatattgagcagatttacccagtcaatgccatttcttttcacaatatccacaatacatttgccacaggtggttctgatggctttgtaaatatttgggatccatttaacaaaaagcgactgtgccaattccatcggtaccccacgagcatcgcatcacttgccttcagtaatgatgggactacgcttgcaatagcgtcatcatatatgtatgaaatggatgacacagaacatcctgaagatggtatcttcattcgccaagtgacagatgcagaaacaaaacccaagtcaccatgtacttgacaagatttcatttacttaagtgccatgttgatgataataaaacaattcgtactccccaatggtggatttattactattaaagaaaccagggaaaatattaattttaatattataacaacctgaaaataatggaaaagaggtttttgaatttttttttttaaataaacaccttcttaagtgcatgagatggtttgatggtttgctgcattaaaggtatttgggcaaacaaaattggagggcaagtgactgcagttttgagaatcagttttgaccttgatgattttttgtttccactgtggaaataaatgtttgtaaataagtgtaataaaaatccctttgcattcnaaaaaaaaaaaaaaaaaaaaanaaaaaaaaaaaaaaaaaaaaaaaaaaaaaaaaaaaaaaaaaaaaaaaaaaaaaaaaaaaaaaaagaaaaagagaaaagaatagcaaaacaacagaaaagaaaaacagaggccgcagcgatatcacaagaggaaagggaaaagaaaaaaaggcagaaccaagaggggagggggaaggaagatcagaatcagcagcagagcgacgacgggaggagacaagcagacaaaggacgaaggaaaaaagacagacgaaacaaaacaaaca

SEQ ID NO: 416712 - DNA, 1404 bp, Homo sapiens
actggagcttcctctccgcctccttcgcctagcctgcgagtgttctgagggaagcaaggaggcggcggcggccgcagcgagtggcgagtagtggaaacgttgcttctgaggggagcccaagatgaccggttctaacgagttcaagctgaaccagccacccgaggatggcatctcctccgtgaagttcagccccaacacctcccagttcctgcttgtctcctcctgggacacgtccgtgcgtctctacgatgtgccggccaactccatgcggctcaagtaccagcacaccggcgccgtcctggactgcgccttctacgatccaacgcatgcctggagtggaggactagatcatcaattgaaaatgcatgatttgaacactgatcaagaaaatcttgttgggacccatgatgcccctatcagatgtgttgaatactgtccagaagtgaatgtgatggtcactggaagttgggatcagacagttaaactgtgggatcccagaactccttgtaatgctgggaccttctctcagcctgaaaaggtatataccctctcagtgtctggagaccggctgattgtgggaacagcaggccgcagagtgttggtgtgggacttacggaacatgggttacgtgcagcagcgcagggagtccagcctgaaataccagactcgctgcatacgagcgtttccaaacaagcagggttatgtattaagctctattgaaggccgagtggcagttgagtatttggacccaagccctgaggtacagaagaagaagtatgccttcaaatgtcacagactaaaagaaaataatattgagcagatttacccagtcaatgccatttcttttcacaatatccacaatacatttgccacaggtggttctgatggctttgtaaatatttgggatccatttaacaaaaagcgactgtgccaattccatcggtaccccacgagcatcgcatcacttgccttcagtaatgatgggactacgcttgcaatagcgtcatcatatatgtatgaaatggatgacacagaacatcctgaagatggtatcttcattcgccaagtgacagatgcagaaacaaaacccaagtcaccatgtacttgacaagatttcatttacttaagtgccatgttgatgataataaaacaattcgtactccccaatggtggatttattactattaaagaaccggacatttatttatgatatacacgaaatatggacgaggttgacttttgaaaaacctcttaggtgaaagtggaggtgcgcaaaggatgggcacactgggcaggcgcctggacttgaccacgatggacgggaaaacggaaatgaacccacctgcacaggggaagccactggaggcaaagaggggaaaaccgcagcacaaggtcatctcacgt

SEQ ID NO: 416713 - DNA, 1398 bp, Homo sapiens
actggagcttcctctccgcctccttcgcctagcctgcgagtgttctgagggaagcaaggaggcggcggcggccgcagcgagtggcgagtagtggaaacgttgcttctgaggggagcccaagatgaccggttctaacgagttcaagctgaaccagccacccgaggatggcatctcctccgtgaagttcagccccaacacctcccagttcctgcttgtctcctcctgggacacgtccgtgcgtctctacgatgtgccggccaactccatgcggctcaagtaccagcacaccggcgccgtcctggactgcgccttctacgatccaacgcatgcctggagtggaggactagatcatcaattgaaaatgcatgatttgaacactgatcaagaaaatcttgttgggacccatgatgcccctatcagatgtgttgaatactgtccagaagtgaatgtgatggtcactggaagttgggatcagacagttaaactgtgggatcccagaactccttgtaatgctgggaccttctctcagcctgaaaaggtatataccctctcagtgtctggagaccggctgattgtgggaacagcaggccgcagagtgttggtgtgggacttacggaacatgggttacgtgcagcagcgcagggagtccagcctgaaataccagactcgctgcatacgagcgtttccaaacaagcagggttatgtattaagctctattgaaggccgagtggcagttgagtatttggacccaagccctgaggtacagaagaagaagtatgccttcaaatgtcacagactaaaagaaaataatattgagcagatttacccagtcaatgccatttcttttcacaatatccacaatacatttgccacaggtggttctgatggctttgtaaatatttgggatccatttaacaaaaagcgactgtgccaattccatcggtaccccacgagcatcgcatcacttgccttcagtaatgatgggactacgcttgcaatagcgtcatcatatatgtatgaaatggatgacacagaacatcctgaagatggtatcttcattcgccaagtgacagatgcagaaacaaaacccaagtcaccatgtacttgacaagatttcatttacttaagtgccatgttgatgataataaaacaattcgtaaatattataacaacctgaaaataatggaaaagaggtttttgaatttttttttttaaataaacaccttcttaagtgcatgagatggtttgatggtttgctgcattaaaggtatttgggcaaacaaaattggagggcaagtgactgcagttttgagaatcagttttgaccttgatgattttttgtttccactgtggaaataaatgtttgtaaataagtgtaataaaaatccctttgcattc

SEQ ID NO: 416714 - DNA, 1697 bp, Homo sapiens
  misc_feature (1412)..(1412): n is a, c, g, or t
  misc_feature (1434)..(1434): n is a, c, g, or t
actggagcttcctctccgcctccttcgcctagcctgcgagtgttctgagggaagcaaggaggcggcggcggccgcagcgagtggcgagtagtggaaacgttgcttctgaggggagcccaagatgaccggttctaacgagttcaagctgaaccagccacccgaggatggcatctcctccgtgaagttcagccccaacacctcccagttcctgcttgtctcctcctgggacacgtccgtgcgtctctacgatgtgccggccaactccatgcggctcaagtaccagcacaccggcgccgtcctggactgcgccttctacgatccaacgcatgcctggagtggaggactagatcatcaattgaaaatgcatgatttgaacactgatcaagaaaatcttgttgggacccatgatgcccctatcagatgtgttgaatactgtccagaagtgaatgtgatggtcactggaagttgggatcagacagttaaactgtgggatcccagaactccttgtaatgctgggaccttctctcagcctgaaaaggtatataccctctcagtgtctggagaccggctgattgtgggaacagcaggccgcagagtgttggtgtgggacttacggaacatgggttacgtgcagcagcgcagggagtccagcctgaaataccagactcgctgcatacgagcgtttccaaacaagcagggttatgtattaagctctattgaaggccgagtggcagttgagtatttggacccaagccctgaggtacagaagaagaagtatgccttcaaatgtcacagactaaaagaaaataatattgagcagatttacccagtcaatgccatttcttttcacaatatccacaatacatttgccacaggtggttctgatggctttgtaaatatttgggatccatttaacaaaaagcgactgtgccaattccatcggtaccccacgagcatcgcatcacttgccttcagtaatgatgggactacgcttgcaatagcgtcatcatatatgtatgaaatggatgacacagaacatcctgaagatggtatcttcattcgccaagtgacagatgcagaaacaaaacccaagtccacctaatcatcctgtgaaagtggtttctctatggaaagctttgtttgcttcctacaaatacatgcttattccttaagggatgtgttagagttactgtggatttctctgttttctgtcttacaagaaacttgtctatgtaccttaatactttgtttaggatgaggagtctttgtgtccctgtacagtagtctgacgtatttccccttctgtcccctagtaagcccagttgctgtatctgaacagtttgagctctttttgtaatatactctaaacctgttatttctgtgctaataaacgagatgcagaacccttgaanaaaaaaaaaaaaaaaaaaaaanaaaaaaaaaaaaaaaaaaaaaaaaaaaaaaaaaaaaaaaaaaaaaaaaaaaaaaaaaaaaaaaagaaaaagagaaaagaatagcaaaacaacagaaaagaaaaacagaggccgcagcgatatcacaagaggaaagggaaaagaaaaaaaggcagaaccaagaggggagggggaaggaagatcagaatcagcagcagagcgacgacgggaggagacaagcagacaaaggacgaaggaaaaaagacagacgaaacaaaacaaaca

SEQ ID NO: 416715 - DNA, 1220 bp, Homo sapiens
actggagcttcctctccgcctccttcgcctagcctgcgagtgttctgagggaagcaaggaggcggcggcggccgcagcgagtggcgagtagtggaaacgttgcttctgaggggagcccaagatgaccggttctaacgagttcaagctgaaccagccacccgaggatggcatctcctccgtgaagttcagccccaacacctcccagttcctgcttgtctcctcctgggacacgtccgtgcgtctctacgatgtgccggccaactccatgcggctcaagtaccagcacaccggcgccgtcctggactgcgccttctacgatccaacgcatgcctggagtggaggactagatcatcaattgaaaatgcatgatttgaacactgatcaagaaaatcttgttgggacccatgatgcccctatcagatgtgttgaatactgtccagaagtgaatgtgatggtcactggaagttgggatcagacagttaaactgtgggatcccagaactccttgtaatgctgggaccttctctcagcctgaaaaggtatataccctctcagtgtctggagaccggctgattgtgggaacagcaggccgcagagtgttggtgtgggacttacggaacatgggttacgtgcagcagcgcagggagtccagcctgaaataccagactcgctgcatacgagcgtttccaaacaagcagggttatgtattaagctctattgaaggccgagtggcagttgagtatttggacccaagccctgaggtacagaagaagaagtatgccttcaaatgtcacagactaaaagaaaataatattgagcagatttacccagtcaatgccatttcttttcacaatatccacaatacatttgccacaggtggttctgatggctttgtaaatatttgggatccatttaacaaaaagcgactgtgccaattccatcggtaccccacgagcatcgcatcacttgccttcagtaatgatgggactacgcttgcaatagcgtcatcatatatgtatgaaatggatgacacagaacatcctgaagatggtatcttcattcgccaagtgacagatgcagaaacaaaacccaaattggctccatttaaagcgattaaagtggagatctgattggataacttcatccaaattctgtaaacgccacttccgcacaaacggttgcttgcaatcaatttaatttttcaaataaaatgattaaatt

SEQ ID NO: 416716 - DNA, 2580 bp, Homo sapiens
aggctgtcagtgcgcagccccagcccgcgggacccctggggactctgggcgcctgttctgcagatgaccggttctaacgagttcaagctgaaccagccacccgaggatggcatctcctccgtgaagttcagccccaacacctcccagttcctgcttgtctcctcctgggacacgtccgtgcgtctctacgatgtgccggccaactccatgcggctcaagtaccagcacaccggcgccgtcctggactgcgccttctacgatccaacgcatgcctggagtggaggactagatcatcaattgaaaatgcatgatttgaacactgatcaagaaaatcttgttgggacccatgatgcccctatcagatgtgttgaatactgtccagaagtgaatgtgatggtcactggaagttgggatcagacagttaaactgtgggatcccagaactccttgtaatgctgggaccttctctcagcctgaaaaggtatataccctctcagtgtctggagaccggctgattgtgggaacagcaggccgcagagtgttggtgtgggacttacggaacatgggttacgtgcagcagcgcagggagtccagcctgaaataccagactcgctgcatacgagcgtttccaaacaagcagggttatgtattaagctctattgaaggccgagtggcagttgagtatttggacccaagccctgaggtacagaagaagaagtatgccttcaaatgtcacagactaaaagaaaataatattgagcagatttacccagtcaatgccatttcttttcacaatatccacaatacatttgccacaggtggttctgatggctttgtaaatatttgggatccatttaacaaaaagcgactgtgccaattccatcggtaccccacgagcatcgcatcacttgccttcagtaatgatgggactacgcttgcaatagcgtcatcatatatgtatgaaatggatgacacagaacatcctgaagatggtatcttcattcgccaagtgacagatgcagaaacaaaacccaagtcaccatgtacttgacaagatttcatttacttaagtgccatgttgatgataataaaacaattcgtactccccaatggtggatttattactattaaagaaaccagggaaaatattaattttaatattataacaacctgaaaataatggaaaagaggtttttgaatttttttttttaaataaacaccttcttaagtgcatgagatggtttgatggtttgctgcattaaaggtatttgggcaaacaaaattggagggcaagtgactgcagttttgagaatcagttttgaccttgatgattttttgtttccactgtggaaataaatgtttgtaaataagtgtaataaaaatccctttgcattctttctggaccttaaatggtagaggaaaaggctcgtgagccatttgtttcttttgctggttatagttgctaattctaaagctgcttcagactgcttcatgaggaggttaatctacaattaaacaatatttcctcttggccgtccattattttctgaagcagatggttcatcatttcctgggctgttaaacaaagcgaggttaaggttagactcttgggaatcagctagttttcaatcttattagggtgcagaaggaaaactaataagaaaacctcctaatatcattttgtgactgtaaacaattatttattagcaaacaattgatcccagaagggcaaattgtttgagtcagtaatgagctgagaaaagacagagcatatctgtgtatttggaaaaataattgtaacgtaattgcagtgcatttagacaggcatctatttggacctgtttctatctctaaatgaatttttggaaacattaatgaggtttacatatttctctgacatttatatagttcttatgtccatttcagttgaccagccgctggtgattaaagttaaaaagaaaaaaattatagtgagaatgagattcatttcaatgtaatgcactaaagcagaacacgaacttagcttggcctattctaggtagttccaaatagtatttttgttgtcaaactttaaaatttatattaatttgcaaatgtatgtctctgagtaggacttggacctttcctgagatttattttatccgtgatgtattttttttaattcttttgatacagagaagggtctttttttttttaagtatttcagtgaaaacttggtgtaagtctgaacccatcttttgaaatgtattttcttcattgcaggtccacctaatcatcctgtgaaagtggtttctctatggaaagctttgtttgcttcctacaaatacatgcttattccttaagggatgtgttagagttactgtggatttctctgttttctgtcttacaagaaacttgtctatgtaccttaatactttgtttaggatgaggagtctttgtgtccctgtacagtagtctgacgtatttccccttctgtcccctagtaagcccagttgctgtatctgaacagtttgagctctttttgtaatatactctaaacctgttatttctgtgctaataaacgagatgcagaacccttgaa

SEQ ID NO: 416717 - DNA, 2569 bp, Homo sapiens
cacgcgtcgcccacgcgtccggtggaaacgttgcttctgaggggagcccaagatgaccggttctaacgagttcaagctgaaccagccacccgaggatggcatctcctccgtgaagttcagccccaacacctcccagttcctgcttgtctcctcctgggacacgtccgtgcgtctctacgatgtgccggccaactccatgcggctcaagtaccagcacaccggcgccgtcctggactgcgccttctacgatccaacgcatgcctggagtggaggactagatcatcaattgaaaatgcatgatttgaacactgatcaagaaaatcttgttgggacccatgatgcccctatcagatgtgttgaatactgtccagaagtgaatgtgatggtcactggaagttgggatcagacagttaaactgtgggatcccagaactccttgtaatgctgggaccttctctcagcctgaaaaggtatataccctctcagtgtctggagaccggctgattgtgggaacagcaggccgcagagtgttggtgtgggacttacggaacatgggttacgtgcagcagcgcagggagtccagcctgaaataccagactcgctgcatacgagcgtttccaaacaagcagggttatgtattaagctctattgaaggccgagtggcagttgagtatttggacccaagccctgaggtacagaagaagaagtatgccttcaaatgtcacagactaaaagaaaataatattgagcagatttacccagtcaatgccatttcttttcacaatatccacaatacatttgccacaggtggttctgatggctttgtaaatatttgggatccatttaacaaaaagcgactgtgccaattccatcggtaccccacgagcatcgcatcacttgccttcagtaatgatgggactacgcttgcaatagcgtcatcatatatgtatgaaatggatgacacagaacatcctgaagatggtatcttcattcgccaagtgacagatgcagaaacaaaacccaagtcaccatgtacttgacaagatttcatttacttaagtgccatgttgatgataataaaacaattcgtactccccaatggtggatttattactattaaagaaaccagggaaaatattaattttaatattataacaacctgaaaataatggaaaagaggtttttgaatttttttttttaaataaacaccttcttaagtgcatgagatggtttgatggtttgctgcattaaaggtatttgggcaaacaaaattggagggcaagtgactgcagttttgagaatcagttttgaccttgatgattttttgtttccactgtggaaataaatgtttgtaaataagtgtaataaaaatccctttgcattctttctggaccttaaatggtagaggaaaaggctcgtgagccatttgtttcttttgctggttatagttgctaattctaaagctgcttcagactgcttcatgaggaggttaatctacaattaaacaatatttcctcttggccgtccattattttctgaagcagatggttcatcatttcctgggctgttaaacaaagcgaggttaaggttagactcttgggaatcagctagttttcaatcttattagggtgcagaaggaaaactaataagaaaacctcctaatatcattttgtgactgtaaacaattatttattagcaaacaattgatcccagaagggcaaattgtttgagtcagtaatgagctgagaaaagacagagcatatctgtgtatttggaaaaataattgtaacgtaattgcagtgcatttagacaggcatctatttggacctgtttctatctctaaatgaatttttggaaacattaatgaggtttacatatttctctgacatttatatagttcttatgtccatttcagttgaccagccgctggtgattaaagttaaaaagaaaaaaattatagtgagaatgagattcatttcaatgtaatgcactaaagcagaacacgaacttagcttggcctattctaggtagttccaaatagtatttttgttgtcaaactttaaaatttatattaatttgcaaatgtatgtctctgagtaggacttggacctttcctgagatttattttatccgtgatgtattttttttaattcttttgatacagagaagggtctttttttttttaagtatttcagtgaaaacttggtgtaagtctgaacccatcttttgaaatgtattttcttcattgcaggtccacctaatcatcctgtgaaagtggtttctctatggaaagctttgtttgcttcctacaaatacatgcttattccttaagggatgtgttagagttactgtggatttctctgttttctgtcttacaagaaacttgtctatgtaccttaatactttgtttaggatgaggagtctttgtgtccctgtacagtagtctgacgtatttccccttctgtcccctagtaagcccagttgctgtatctgaacagtttgagctctttttgtaatatactctaaacctgttatttctgtgctaataaacgagatgcagaacccttgaa

SEQ ID NO: 416718 - DNA, 2590 bp, Homo sapiens
  misc_feature (15)..(15): n is a, c, g, or t
  misc_feature (17)..(17): n is a, c, g, or t
ttgttcagaggatcncnttcgacggtgttctgagggaagcaaggaggcggcggcggccgcagcgagtggcgagtagtggaaacgttgcttctgaggggagcccaagccacccgaggatggcatctcctccgtgaagttcagccccaacacctcccagttcctgcttgtctcctcctgggacacgtccgtgcgtctctacgatgtgccggccaactccatgcggctcaagtaccagcacaccggcgccgtcctggactgcgccttctacgatccaacgcatgcctggagtggaggactagatcatcaattgaaaatgcatgatttgaacactgatcaagaaaatcttgttgggacccatgatgcccctatcagatgtgttgaatactgtccagaagtgaatgtgatggtcactggaagttgggatcagacagttaaactgtgggatcccagaactccttgtaatgctgggaccttctctcagcctgaaaaggtatataccctctcagtgtctggagaccggctgattgtgggaacagcaggccgcagagtgttggtgtgggacttacggaacatgggttacgtgcagcagcgcagggagtccagcctgaaataccagactcgctgcatacgagcgtttccaaacaagcagggttatgtattaagctctattgaaggccgagtggcagttgagtatttggacccaagccctgaggtacagaagaagaagtatgccttcaaatgtcacagactaaaagaaaataatattgagcagatttacccagtcaatgccatttcttttcacaatatccacaatacatttgccacaggtggttctgatggctttgtaaatatttgggatccatttaacaaaaagcgactgtgccaattccatcggtaccccacgagcatcgcatcacttgccttcagtaatgatgggactacgcttgcaatagcgtcatcatatatgtatgaaatggatgacacagaacatcctgaagatggtatcttcattcgccaagtgacagatgcagaaacaaaacccaagtcaccatgtacttgacaagatttcatttacttaagtgccatgttgatgataataaaacaattcgtactccccaatggtggatttattactattaaagaaaccagggaaaatattaattttaatattataacaacctgaaaataatggaaaagaggtttttgaatttttttttttaaataaacaccttcttaagtgcatgagatggtttgatggtttgctgcattaaaggtatttgggcaaacaaaattggagggcaagtgactgcagttttgagaatcagttttgaccttgatgattttttgtttccactgtggaaataaatgtttgtaaataagtgtaataaaaatccctttgcattctttctggaccttaaatggtagaggaaaaggctcgtgagccatttgtttcttttgctggttatagttgctaattctaaagctgcttcagactgcttcatgaggaggttaatctacaattaaacaatatttcctcttggccgtccattattttctgaagcagatggttcatcatttcctgggctgttaaacaaagcgaggttaaggttagactcttgggaatcagctagttttcaatcttattagggtgcagaaggaaaactaataagaaaacctcctaatatcattttgtgactgtaaacaattatttattagcaaacaattgatcccagaagggcaaattgtttgagtcagtaatgagctgagaaaagacagagcatatctgtgtatttggaaaaataattgtaacgtaattgcagtgcatttagacaggcatctatttggacctgtttctatctctaaatgaatttttggaaacattaatgaggtttacatatttctctgacatttatatagttcttatgtccatttcagttgaccagccgctggtgattaaagttaaaaagaaaaaaattatagtgagaatgagattcatttcaatgtaatgcactaaagcagaacacgaacttagcttggcctattctaggtagttccaaatagtatttttgttgtcaaactttaaaatttatattaatttgcaaatgtatgtctctgagtaggacttggacctttcctgagatttattttatccgtgatgtattttttttaattcttttgatacagagaagggtctttttttttttaagtatttcagtgaaaacttggtgtaagtctgaacccatcttttgaaatgtattttcttcattgcaggtccacctaatcatcctgtgaaagtggtttctctatggaaagctttgtttgcttcctacaaatacatgcttattccttaagggatgtgttagagttactgtggatttctctgttttctgtcttacaagaaacttgtctatgtaccttaatactttgtttaggatgaggagtctttgtgtccctgtacagtagtctgacgtatttccccttctgtcccctagtaagcccagttgctgtatctgaacagtttgagctctttttgtaatatactctaaacctgttatttctgtgctaataaacgagatgcagaacccttgaa

SEQ ID NO: 416719 - DNA, 2592 bp, Homo sapiens
actggagcttcctctccgcctccttcgcctagcctgcgagtgttctgagggaagcaaggaggcggcggcggccgcagcgagtggcgagtagtggaaacgttgcttctgaggggagcccaagatgaccggttctaacgagttcaagctgaaccagccacccgaggatggcatctcctccgtgaagttcagccccaacacctcccagttcctgcttgtctcctcctgggacacgtccgtgcgtctctacgatgtgccggccaactccatgcggctcaagtaccagcacaccggcgccgtcctggactgcgccttctacgatccaacgcatgcctggagtggaggactagatcatcaattgaaaatgcatgatttgaacactgatcaagaaaatcttgttgggacccatgatgcccctatcagatgtgttgaatactgtccagaagtgaatgtgatggtcactggaagttgggatcagacagttaaactgtgggatcccagaactccttgtaatgctgggaccttctctcagcctgaaaagcaggccgcagagtgttggtgtgggacttacggaacatgggttacgtgcagcagcgcagggagtccagcctgaaataccagactcgctgcatacgagcgtttccaaacaagcagggttatgtattaagctctattgaaggccgagtggcagttgagtatttggacccaagccctgaggtacagaagaagaagtatgccttcaaatgtcacagactaaaagaaaataatattgagcagatttacccagtcaatgccatttcttttcacaatatccacaatacatttgccacaggtggttctgatggctttgtaaatatttgggatccatttaacaaaaagcgactgtgccaattccatcggtaccccacgagcatcgcatcacttgccttcagtaatgatgggactacgcttgcaatagcgtcatcatatatgtatgaaatggatgacacagaacatcctgaagatggtatcttcattcgccaagtgacagatgcagaaacaaaacccaagtcaccatgtacttgacaagatttcatttacttaagtgccatgttgatgataataaaacaattcgtactccccaatggtggatttattactattaaagaaaccagggaaaatattaattttaatattataacaacctgaaaataatggaaaagaggtttttgaatttttttttttaaataaacaccttcttaagtgcatgagatggtttgatggtttgctgcattaaaggtatttgggcaaacaaaattggagggcaagtgactgcagttttgagaatcagttttgaccttgatgattttttgtttccactgtggaaataaatgtttgtaaataagtgtaataaaaatccctttgcattctttctggaccttaaatggtagaggaaaaggctcgtgagccatttgtttcttttgctggttatagttgctaattctaaagctgcttcagactgcttcatgaggaggttaatctacaattaaacaatatttcctcttggccgtccattattttctgaagcagatggttcatcatttcctgggctgttaaacaaagcgaggttaaggttagactcttgggaatcagctagttttcaatcttattagggtgcagaaggaaaactaataagaaaacctcctaatatcattttgtgactgtaaacaattatttattagcaaacaattgatcccagaagggcaaattgtttgagtcagtaatgagctgagaaaagacagagcatatctgtgtatttggaaaaataattgtaacgtaattgcagtgcatttagacaggcatctatttggacctgtttctatctctaaatgaatttttggaaacattaatgaggtttacatatttctctgacatttatatagttcttatgtccatttcagttgaccagccgctggtgattaaagttaaaaagaaaaaaattatagtgagaatgagattcatttcaatgtaatgcactaaagcagaacacgaacttagcttggcctattctaggtagttccaaatagtatttttgttgtcaaactttaaaatttatattaatttgcaaatgtatgtctctgagtaggacttggacctttcctgagatttattttatccgtgatgtattttttttaattcttttgatacagagaagggtctttttttttttaagtatttcagtgaaaacttggtgtaagtctgaacccatcttttgaaatgtattttcttcattgcaggtccacctaatcatcctgtgaaagtggtttctctatggaaagctttgtttgcttcctacaaatacatgcttattccttaagggatgtgttagagttactgtggatttctctgttttctgtcttacaagaaacttgtctatgtaccttaatactttgtttaggatgaggagtctttgtgtccctgtacagtagtctgacgtatttccccttctgtcccctagtaagcccagttgctgtatctgaacagtttgagctctttttgtaatatactctaaacctgttatttctgtgctaataaacgagatgcagaacccttgaa

SEQ ID NO: 416720 - DNA, 2480 bp, Homo sapiens
gctgtggctgacttagaggatccgatgttatgccaacaacctcccagttcctgcttgtctcctcctgggacacgtccgtgcgtctctacgatgtgccggccaactccatgcggctcaagtaccagcacaccggcgccgtcctggactgcgccttctacgatccaacgcatgcctggagtggaggactagatcatcaattgaaaatgcatgatttgaacactgatcaagaaaatcttgttgggacccatgatgcccctatcagatgtgttgaatactgtccagaagtgaatgtgatggtcactggaagttgggatcagacagttaaactgtgggatcccagaactccttgtaatgctgggaccttctctcagcctgaaaaggtatataccctctcagtgtctggagaccggctgattgtgggaacagcaggccgcagagtgttggtgtgggacttacggaacatgggttacgtgcagcagcgcagggagtccagcctgaaataccagactcgctgcatacgagcgtttccaaacaagcagggttatgtattaagctctattgaaggccgagtggcagttgagtatttggacccaagccctgaggtacagaagaagaagtatgccttcaaatgtcacagactaaaagaaaataatattgagcagatttacccagtcaatgccatttcttttcacaatatccacaatacatttgccacaggtggttctgatggctttgtaaatatttgggatccatttaacaaaaagcgactgtgccaattccatcggtaccccacgagcatcgcatcacttgccttcagtaatgatgggactacgcttgcaatagcgtcatcatatatgtatgaaatggatgacacagaacatcctgaagatggtatcttcattcgccaagtgacagatgcagaaacaaaacccaagtcaccatgtacttgacaagatttcatttacttaagtgccatgttgatgataataaaacaattcgtactccccaatggtggatttattactattaaagaaaccagggaaaatattaattttaatattataacaacctgaaaataatggaaaagaggtttttgaatttttttttttaaataaacaccttcttaagtgcatgagatggtttgatggtttgctgcattaaaggtatttgggcaaacaaaattggagggcaagtgactgcagttttgagaatcagttttgaccttgatgattttttgtttccactgtggaaataaatgtttgtaaataagtgtaataaaaatccctttgcattctttctggaccttaaatggtagaggaaaaggctcgtgagccatttgtttcttttgctggttatagttgctaattctaaagctgcttcagactgcttcatgaggaggttaatctacaattaaacaatatttcctcttggccgtccattattttctgaagcagatggttcatcatttcctgggctgttaaacaaagcgaggttaaggttagactcttgggaatcagctagttttcaatcttattagggtgcagaaggaaaactaataagaaaacctcctaatatcattttgtgactgtaaacaattatttattagcaaacaattgatcccagaagggcaaattgtttgagtcagtaatgagctgagaaaagacagagcatatctgtgtatttggaaaaataattgtaacgtaattgcagtgcatttagacaggcatctatttggacctgtttctatctctaaatgaatttttggaaacattaatgaggtttacatatttctctgacatttatatagttcttatgtccatttcagttgaccagccgctggtgattaaagttaaaaagaaaaaaattatagtgagaatgagattcatttcaatgtaatgcactaaagcagaacacgaacttagcttggcctattctaggtagttccaaatagtatttttgttgtcaaactttaaaatttatattaatttgcaaatgtatgtctctgagtaggacttggacctttcctgagatttattttatccgtgatgtattttttttaattcttttgatacagagaagggtctttttttttttaagtatttcagtgaaaacttggtgtaagtctgaacccatcttttgaaatgtattttcttcattgcaggtccacctaatcatcctgtgaaagtggtttctctatggaaagctttgtttgcttcctacaaatacatgcttattccttaagggatgtgttagagttactgtggatttctctgttttctgtcttacaagaaacttgtctatgtaccttaatactttgtttaggatgaggagtctttgtgtccctgtacagtagtctgacgtatttccccttctgtcccctagtaagcccagttgctgtatctgaacagtttgagctctttttgtaatatactctaaacctgttatttctgtgctaataaacgagatgcagaacccttgaa

SEQ ID NO: 416721 - DNA, 2429 bp, Homo sapiens
ggcctatcctgagagtgtactgatggaatcaaaggatgcggtggtggacgaatgaagtggtgagtactgaaaatgttgattatgaggtcaggccaagggatccaatgaccatgtcactggtagtggtaggactagatctatcatgatgaaattgcctgatttgtacactgtctcaagaaaatcttgttgggacccatgatgcccctatcagatgtgttgaatactgtccagaagtgaatgtgatggtcactggaagttgggatcagacagttaaactgtgggatcccagaactccttgtaatgctgggaccttctctcagcctgaaaaggtatataccctctcagtgtctggagaccggctgattgtgggaacagcaggccgcagagtgttggtgtgggacttacggaacatgggttacgtgcagcagcgcagggagtccagcctgaaataccagactcgctgcatacgagcgtttccaaacaagcagggttatgtattaagctctattgaaggccgagtggcagttgagtatttggacccaagccctgaggtacagaagaagaagtatgccttcaaatgtcacagactaaaagaaaataatattgagcagatttacccagtcaatgccatttcttttcacaatatccacaatacatttgccacaggtggttctgatggctttgtaaatatttgggatccatttaacaaaaagcgactgtgccaattccatcggtaccccacgagcatcgcatcacttgccttcagtaatgatgggactacgcttgcaatagcgtcatcatatatgtatgaaatggatgacacagaacatcctgaagatggtatcttcattcgccaagtgacagatgcagaaacaaaacccaagtcaccatgtacttgacaagatttcatttacttaagtgccatgttgatgataataaaacaattcgtactccccaatggtggatttattactattaaagaaaccagggaaaatattaattttaatattataacaacctgaaaataatggaaaagaggtttttgaatttttttttttaaataaacaccttcttaagtgcatgagatggtttgatggtttgctgcattaaaggtatttgggcaaacaaaattggagggcaagtgactgcagttttgagaatcagttttgaccttgatgattttttgtttccactgtggaaataaatgtttgtaaataagtgtaataaaaatccctttgcattctttctggaccttaaatggtagaggaaaaggctcgtgagccatttgtttcttttgctggttatagttgctaattctaaagctgcttcagactgcttcatgaggaggttaatctacaattaaacaatatttcctcttggccgtccattattttctgaagcagatggttcatcatttcctgggctgttaaacaaagcgaggttaaggttagactcttgggaatcagctagttttcaatcttattagggtgcagaaggaaaactaataagaaaacctcctaatatcattttgtgactgtaaacaattatttattagcaaacaattgatcccagaagggcaaattgtttgagtcagtaatgagctgagaaaagacagagcatatctgtgtatttggaaaaataattgtaacgtaattgcagtgcatttagacaggcatctatttggacctgtttctatctctaaatgaatttttggaaacattaatgaggtttacatatttctctgacatttatatagttcttatgtccatttcagttgaccagccgctggtgattaaagttaaaaagaaaaaaattatagtgagaatgagattcatttcaatgtaatgcactaaagcagaacacgaacttagcttggcctattctaggtagttccaaatagtatttttgttgtcaaactttaaaatttatattaatttgcaaatgtatgtctctgagtaggacttggacctttcctgagatttattttatccgtgatgtattttttttaattcttttgatacagagaagggtctttttttttttaagtatttcagtgaaaacttggtgtaagtctgaacccatcttttgaaatgtattttcttcattgcaggtccacctaatcatcctgtgaaagtggtttctctatggaaagctttgtttgcttcctacaaatacatgcttattccttaagggatgtgttagagttactgtggatttctctgttttctgtcttacaagaaacttgtctatgtaccttaatactttgtttaggatgaggagtctttgtgtccctgtacagtagtctgacgtatttccccttctgtcccctagtaagcccagttgctgtatctgaacagtttgagctctttttgtaatatactctaaacctgttatttctgtgctaataaacgagatgcagaacccttgaa

SEQ ID NO: 416722 - DNA, 2319 bp, Homo sapiens
gtcaaactcttattcttcttgaataggctctattatttgaatctctggagttattaccagctcattgcttcaaaattaagttgaggaattcaagaataatttattttagtaaattctatttaagatgtttaagaatttgaactgccaaaaatctttcctctccacagaggttgtttctttaatattaacacaaagtaagtgaccttcaggtcttattggaaactcagagtaatatggccttgcctgggaattgcaaatttccttagttttgaaattttcatagatgtctttggttcttggttgtaactgttgactgagaagagccatttacattttttgataccaacagggcaaagctttttacttaattacctctaccaggctttaagggaaatctgatacttcagcatgtgttaaactataaaatacctactccaagtatctgcccagttccttgtcccctctccccaggcccttaaaggaagttctcgatacatatttgtagaataactgaatgttttcaggattcctgtactttgctgagttaaaatggatatggtacccttgctgattggttgagcccctaagagggggcagaatattaaatattccatatcagatatgcttttacaggtttgactttagaaaagtcttagcatgtgaagcctgttggataaagggctgtgtttgcatttaatctgtcacttttgtatctcctgtcctggctggccattttgatctcatgctgttctttttttcttttgaacttgtaggtcaccatgtacttgacaagatttcatttacttaagtgccatgttgatgataataaaacaattcgtactccccaatggtggatttattactattaaagaaaccagggaaaatattaattttaatattataacaacctgaaaataatggaaaagaggtttttgaatttttttttttaaataaacaccttcttaagtgcatgagatggtttgatggtttgctgcattaaaggtatttgggcaaacaaaattggagggcaagtgactgcagttttgagaatcagttttgaccttgatgattttttgtttccactgtggaaataaatgtttgtaaataagtgtaataaaaatccctttgcattctttctggaccttaaatggtagaggaaaaggctcgtgagccatttgtttcttttgctggttatagttgctaattctaaagctgcttcagactgcttcatgaggaggttaatctacaattaaacaatatttcctcttggccgtccattattttctgaagcagatggttcatcatttcctgggctgttaaacaaagcgaggttaaggttagactcttgggaatcagctagttttcaatcttattagggtgcagaaggaaaactaataagaaaacctcctaatatcattttgtgactgtaaacaattatttattagcaaacaattgatcccagaagggcaaattgtttgagtcagtaatgagctgagaaaagacagagcatatctgtgtatttggaaaaataattgtaacgtaattgcagtgcatttagacaggcatctatttggacctgtttctatctctaaatgaatttttggaaacattaatgaggtttacatatttctctgacatttatatagttcttatgtccatttcagttgaccagccgctggtgattaaagttaaaaagaaaaaaattatagtgagaatgagattcatttcaatgtaatgcactaaagcagaacacgaacttagcttggcctattctaggtagttccaaatagtatttttgttgtcaaactttaaaatttatattaatttgcaaatgtatgtctctgagtaggacttggacctttcctgagatttattttatccgtgatgtattttttttaattcttttgatacagagaagggtctttttttttttaagtatttcagtgaaaacttggtgtaagtctgaacccatcttttgaaatgtattttcttcattgcaggtccacctaatcatcctgtgaaagtggtttctctatggaaagctttgtttgcttcctacaaatacatgcttattccttaagggatgtgttagagttactgtggatttctctgttttctgtcttacaagaaacttgtctatgtaccttaatactttgtttaggatgaggagtctttgtgtccctgtacagtagtctgacgtatttccccttctgtcccctagtaagcccagttgctgtatctgaacagtttgagctctttttgtaatatactctaaacctgttatttctgtgctaataaacgagatgcagaacccttgaa

SEQ ID NO: 416723 - DNA, 1794 bp, Homo sapiens
  misc_feature (7)..(7): n is a, c, g, or t
  misc_feature (69)..(69): n is a, c, g, or t
  misc_feature (71)..(71): n is a, c, g, or t
  misc_feature (81)..(81): n is a, c, g, or t
  misc_feature (105)..(105): n is a, c, g, or t
  misc_feature (114)..(114): n is a, c, g, or t
  misc_feature (119)..(120): n is a, c, g, or t
  misc_feature (133)..(133): n is a, c, g, or t
  misc_feature (138)..(138): n is a, c, g, or t
  misc_feature (191)..(191): n is a, c, g, or t
  misc_feature (193)..(193): n is a, c, g, or t
  misc_feature (205)..(205): n is a, c, g, or t
  misc_feature (208)..(208): n is a, c, g, or t
  misc_feature (210)..(210): n is a, c, g, or t
  misc_feature (217)..(217): n is a, c, g, or t
  misc_feature (226)..(226): n is a, c, g, or t
  misc_feature (231)..(231): n is a, c, g, or t
  misc_feature (317)..(317): n is a, c, g, or t
  misc_feature (342)..(342): n is a, c, g, or t
  misc_feature (344)..(344): n is a, c, g, or t
gcttatnggcgctttttgttgttcttatgatattaccctcttattttcaaggcttatcagcccccgagncnttggggaacngggcggttacggggcgacagctgngcaacgttnggtannatcattcttttanaaganataacatcagtagatgctaactttcttaccattattcgcgctacgatggttcnanatttcggtagcnggngncctttcnctcatgctnccgcnccaggagccttgcgagcttacgtttcgcctactttgcttcagatcactatagagctatttcttccccccacccgccaggtccgggnggccttttatcttacatcgtctacncncgaaaccagggaaaatattaattttaatattataacaacctgaaaataatggaaaagaggtttttgaatttttttttttaaataaacaccttcttaagtgcatgagatggtttgatggtttgctgcattaaaggtatttgggcaaacaaaattggagggcaagtgactgcagttttgagaatcagttttgaccttgatgattttttgtttccactgtggaaataaatgtttgtaaataagtgtaataaaaatccctttgcattctttctggaccttaaatggtagaggaaaaggctcgtgagccatttgtttcttttgctggttatagttgctaattctaaagctgcttcagactgcttcatgaggaggttaatctacaattaaacaatatttcctcttggccgtccattattttctgaagcagatggttcatcatttcctgggctgttaaacaaagcgaggttaaggttagactcttgggaatcagctagttttcaatcttattagggtgcagaaggaaaactaataagaaaacctcctaatatcattttgtgactgtaaacaattatttattagcaaacaattgatcccagaagggcaaattgtttgagtcagtaatgagctgagaaaagacagagcatatctgtgtatttggaaaaataattgtaacgtaattgcagtgcatttagacaggcatctatttggacctgtttctatctctaaatgaatttttggaaacattaatgaggtttacatatttctctgacatttatatagttcttatgtccatttcagttgaccagccgctggtgattaaagttaaaaagaaaaaaattatagtgagaatgagattcatttcaatgtaatgcactaaagcagaacacgaacttagcttggcctattctaggtagttccaaatagtatttttgttgtcaaactttaaaatttatattaatttgcaaatgtatgtctctgagtaggacttggacctttcctgagatttattttatccgtgatgtattttttttaattcttttgatacagagaagggtctttttttttttaagtatttcagtgaaaacttggtgtaagtctgaacccatcttttgaaatgtattttcttcattgcaggtccacctaatcatcctgtgaaagtggtttctctatggaaagctttgtttgcttcctacaaatacatgcttattccttaagggatgtgttagagttactgtggatttctctgttttctgtcttacaagaaacttgtctatgtaccttaatactttgtttaggatgaggagtctttgtgtccctgtacagtagtctgacgtatttccccttctgtcccctagtaagcccagttgctgtatctgaacagtttgagctctttttgtaatatactctaaacctgttatttctgtgctaataaacgagatgcagaacccttgaa

SEQ ID NO: 416724 - DNA, 429 bp, Homo sapiens
  misc_feature (15)..(15): n is a, c, g, or t
  misc_feature (17)..(17): n is a, c, g, or t
ttgttcagaggatcncnttcgacggtgttctgagggaagcaaggaggcggcggcggccgcagcgagtggcgagtagtggaaacgttgcttctgaggggagcccaagatgaccggttctaacgagttcaagctgaaccagccacccgaggatggcatctcctccgtgaagttcagccccaacacctcccagttcctgcttgtctcctcctgggacacgtccgtgcgtctctacgatgtgccggccaactccatgcggctcaagtaccagcacaccggcgccgtcctggactgcgccttctacgatccaacgcatgcctggagtggaggactagatcatcaattgaaaatgcatgatttgaacactgatcaagaaatcttgttgggacccatgagcccctatcagatgtgtgggcgataggtaccggctca

SEQ ID NO: 416725 - DNA, 459 bp, Homo sapiens
cacgcgtcgcccacgcgtccggtggaaacgttgcttctgaggggagcccaagatgaccggttctaacgagttcaagctgaaccagccacccgaggatggcatctcctccgtgaagttcagccccaacccatgtggagctgtgagtcaattacatctcctttctttgtaaattaccaagtcttgggtagtttatttaagcagtgtgagaatgtactaatacagtgttcttcaatccttgaggatcccaaatggaagcccagggaatggtagctggggacaaccccagatgttcaccggggacagggacattaagtaactggtccatgattcacacaggtaattagtgacagagcctgaatttgaacccagatagtcttactcaagagccctttctctgacctgtggtccttctagattctccgactcttaaagtcttgtaataaatatcttacacgtata

SEQ ID NO: 416726 - DNA, 802 bp, Homo sapiens
ggcctgttgatgccactgctgttgaagtctatgtgaatggtgccccctggtggaaggaaaaagagaatgggacgccaggaatgtcagatgcttttcagcctctcccctgctctcacgcctagaaacaagagctccacaaaggtctctcattcctcaaggctgatgaaaagcccagcagctaaatggccagaagcctgtctttgtgagaaagcaagaagtctctcggtttgaactcttcggtctagagacagattcttctaccagtggtgtaaaaccctaaagaggctctgcataagacctaccactgctctgtgtctcatgacaccctgcccccaccactggaaggccacacttattctttgtgttcatgcttctctatgatctgcaagtttcccaagaacacctggattcgaagctcaagtccaccgctaaatagctatgtgacctaatgtgtcagatggttataaggattacagagaaagaggtatagatagagctggtagcagtgacagacacatctttacatcatataattctgacatgcattattattgtagttttctgttattcagacatacttgttaagaaggtgctggggacaatttgtacatgctgggtatgaaagggcttggaaagtatttcatgaatggagttggcattgaggagtccaatccatgtacaatgggtagaattagaaaggcattgaggatagtgtattagtctgttttcaaactgctgataaaaacatacctgagagtgggtaatttataaagaaagaagaggtttaatggactcacagttc

SEQ ID NO: 416727 - DNA, 737 bp, Homo sapiens
atcattagagatttaagggttatatgtacaccataaggactgttctcattggcttttcttcagtaacattattaatttacatcatttgcttggtttgctgtcactattgtgttcttatctccccaacaaataaaaagcattcaaaaaggtttattgaaacataaaattaataatgaaagtgagaacagatgtctgtaactcatcaacttggacagtatactggattgcagagtaaattctgtatgttcacccatatgtccttgaagaagtaaatatttgggatgactttgaaattattcgaaaagggaaagtacaaacagatgctctgattattattgaaatgatccttcattgatctgtccctagttttctgtgcatttgacatgaaacatggtcaaagtatgttcccactgaaattttgcattgtttttcaacaaagcatggtagtaaattaaggaaattattctagaataagtcattaaatgcagagaagagatcaaaagagtagaggcatcttttacagttgcactgcttacagcaatgataggtaacaagtcatactgttcctaagaagtttctaaaggcatccacagagaatgggaaaaatgctctgaacgatcgttgaatgatctattggcaaaatttctttgtcatgtgccaccgttaagcattccatatttgctagtgggtataatgggcatacattgtgacaggaacaattacttgcatatgtggct

SEQ ID NO: 416728 - DNA, 2652 bp, Homo sapiens
  misc_feature (1053)..(1053): n is a, c, g, or t
  misc_feature (1148)..(1148): n is a, c, g, or t
  misc_feature (1308)..(1308): n is a, c, g, or t
  misc_feature (1313)..(1313): n is a, c, g, or t
  misc_feature (1838)..(1838): n is a, c, g, or t
  misc_feature (2328)..(2328): n is a, c, g, or t
gctgccttagagcttctagggtaacaaagacgtccctcaggaggatcctgagacttacttccagaacagagcttcagggcgaccacagggcacggcacctgtactactgccacttgaaggagcgcgtgctgaggtcacagtgcgctcaccgggaggaagcctacttcctgctggctgcctgcgcgctgcaggctgacctgggcgagcaccgggagtcggcccatgccgggaggtacttcgagccacactcctacttcccacagtggatcatcaccaagagggggattgactacatcctccggcacatgcctaccctgcaccgtgagcgccagggcctgagccccaaggaggccatgctgtgcttcatccaggaggcctgccggctggaggacgtgcccgtgcacttcttcaggctgcacaaggataagaaggaaggtcgtcccaccgtgatcctgggactggccctcaggggagtgcacatctaccaggaggtggaccgtgctccgcagctgctgtacgacctcccctggccccacgttgggaagctggcatttctgggaaagaagctggagatccagctggatgggctgcccgcagcacagaagctggtttactacacggggtgcacctggcggtccaggcacctgctgcacctgctgcgcgccagccaccagctccacctccgcgtgcggcccactctgcaacagctgcggcagcgggaggaggcagaagagaagcagcactaccgggagtcctatatcagcgatgagctggagctggacctggccagcaggagcttcccgggcagtggggtcagcagccagcactgcccccactgcctctcacgccactccgccgacagccacggcagttcctacacgtcaggcatcaaggccaactcctggctcagggaatccagagagatgtctgtggacgtgcccttggaggtccacgggctccatgagaaggagccgtcctccagccccaggaccagccgcagccaccccagcacacgtggtgacagccaagccactcgtcaggagccctgcaccnaggtcaggaccagaggccagagcgccgaggccgtgcaccagatccaggaaatgacagccggggtcagtgaggagcagcacagccatggcctggangacatgcagctgcaccagctggccctgcacccagcgcccacctcactcagccataccttccaccgcgccctggactgcaggctggcaggcccctgcgagaccagggccactctccccagcaagaggtccagcaactgtctcgccctggacctgttcgganaggcnccaccacaggagtttgtggtgtaggcaccacccacccagcagtaccgtccgcaccgccaggctcagcccctgcccaccccacttccacatggccctcgtcccttcctgcccgccagatgctgcctgcacttccgcagccagcacgctccacaggttcacctgtaagaggtgtggagctggctctgacatcaacctgggaggtaacaaacaggtcccgcacctcatgcctgtctgccatacacccgggagctctttccctcagggtctcagggagccagttcaaggtctggctgtcaagtgtccagagagccatggtgttggcccctgaggcagcctgtcacccatcctaatctgggagagaaggtgacacagctgggcccagaccctggagagacagctctgcagtttcccacactgtcagctccccaagagacagtcctgatgggcacaggctgccagagctcccaagccggagttcacagttatcatcactgtgcaggacccaggttcctcccagacctgaanccctctctgcaactcctgtttgcaagcgctgggcctgccagacagaggcccctcttgtggtgcaagcccagctctgtcacctgagatccagccagagaccctcctccaccatccacagtcaatggctgtgctttcccttccaagccagggcttccaaagaccccactgccccggagctgaagccgactctgctcccatctcagccatgaggcctcaggacccactctgctcacaggtggcttccttaagccattgccctggctggggttgggctggtgcagcccagctggcggaggggcgaagctttggtgacagacggagagtgggggactagctgtgcatggcacctgctctgatccggtgggctccacgggtagtgcgacctcggttctgtgggctctggaaggccaccagggtagggtctccccagggctcctccccctgcacaacactcctgcacacgtgcaaacctgctgtcctctgcatttanaggaatggcccgtgcatccctgctagtctcaggcccatcccagagcactgagaggccacaatcgttcagccctgtgccctgaacaccactgcccccttcactgtctgtgtgtggtgaagaccacgccacaccaccctccagctcactggagacaagcatgagcttgagccccatggcctggtgcagggctgcgtgcattgaggccgcctctttgacgggtccatccagggggaccctctcctttctgtgaaagggaatcgtgtgtgtgccccaggcacgtgtaataaagaacccgagcagatgcctcctgcttgaaccaggacc

SEQ ID NO: 416729 - DNA, 1640 bp, Homo sapiens
cgcgacccctccccgctgacctcactcgagccgccgcctggcgcagatataagcggcggcccatctgaagagggctcggcaggcgcccggggtcctcagcgctgcagactcctgacctgccgactgcggatcccgagtccccggatcccggacccatcctgtggagcccactcctggcagacgccgcgatgcccggcccttggttgctgctcgctctggctttgaccctgaacctgaccggtgtccccggcggccgtgctcagccagaggcggcccagcaggaggcagtgacggccgcggagcatccgggcctggatgacttcctgcgccaggtggagcgcctcctcttcctccgggaaaacatccagcggctgcaaggggaccagggtgagcactccgcgtcccagatctttcaatctgactggctctccaaacgtcagcatccaggcaaaagagaggaggaggaggaagagggagttgaagaagaggaagaggaagaagggggggctgtgggaccccacaaacggcagcaccctggccgacgagaagatgaggcttcatggtcagtcgatgtaacccagcacaagcggcagcatcctggccggcgctccccctggcttgcatatgctgtcccgaagcggcagcacccaggcagaaggctggcagatcccaaggctcaaaggagctgggaagaagaggaggaggaggaagagagagaggaagacctgatgcctgaaaaacgccagcatccgggcaagagggccctgggaggcccctgtgggccccagggagcctatggtcaagcgggcctcctgctggggctcctggatgacctgagtaggagccagggagctgaggaaaagcggcagcaccctggtcggcgggcagcctgggtcagggagcccctggaggagtgaacccagttttccctgaagtcgagtttgtggtctaaggatgtcttgagccctgtgtgccccaccattcatgacctctgtattctctagttagatccctgaccataagcctgagcccctccctcccagccccatattcacacacatcccagcccctggccttgccctcttcctttaggcatgtgagaaaatcagcctagcagtttaaaccccactttcctccacttagcaccataggcaagggggcagatcccagagcccctctcaccccccccaccacaggcctgctccttccttagccttggctaagatggtccttctgtgtcttgcaaagactccccaagtgggacagggagcccctgggagggcagccagtgagggtggggtgggactgaagcgttgtgtgcaaatccagcttccatcccctccccaacctggcaggattctccatgtgtaaacttcacccccaggacccaggatcttctcctttctgggcatccctttgtgggtgggcagagccctgacccacagctgtgttactgcttggagaagcatatgtaggggcataccctgtggtgttgtgctgtgtctggctgtgggataaatgtgtgtgggaatattgaaacatcgcctaggaattgtggtttgtatataaccctctaagcccctatcccttgtcgatgacagtcatcctaatgataataaaacctgcatccagataatcac

SEQ ID NO: 416730 - DNA, 522 bp, Homo sapiens
cgcgacccctccccgctgacctcactcgagccgccgcctggcgcagatataagcggcggcccatctgaagagggctcggcaggcgcccggggtcctcagcgctgcagactcctgacctgccgactgcggatcccgagtccccggatcccggacccatcctgtggagcccactcctggcagacgccgcgatgcccggcccttggttgctgctcgctctggctttgaccctgaacctgaccggtgtccccggcggccgtgctcagccagaggcggcccagcaggaggcagtgacggccgcggagcatccgggcctggatgacttcctgcgccaggtggagcgcctcctcttcctccgggaaaacatccagcggctgcaaggggaccagggtgagcactccgcgtcccagatctttcaatctgactggctctccaaacgtcagcatccaggcaaaagagaggaggaggaggaagagggagttttttccctcaaatgttcctgatcctttctagcaccccggcctt

SEQ ID NO: 416731 - DNA, 392 bp, Homo sapiens
  misc_feature (22)..(22): n is a, c, g, or t
ctgcagagtaaagggtgctganttagaggtgatgctgtagaggtaaacagaggcaacccggtcaagacatctgggcttcctgaaaacagcaaggaaccactgaaggatcttaagcaggatttgtcatgtatctttttcaccaaactgcaaattccaggagcccagtagcagtgtctcttttttcttcttcacattatttatccagggcctaacccagtgcatgatacatagaaaatgctcggtaaacatctgaagaataaatgggatgatcagatatgcagaaacatcacttgtcaataatgtgaaaaacgtgtgaggaaataaatgctggaaaaaattaaaacagtaggccacggagaaaggcacagattaaagagattctgttttaaggg

SEQ ID NO: 416732 - DNA, 696 bp, Homo sapiens
agtgtttctctatcctgaagtcatgaagatattcttattgtcctccaggagttttaagatttttgccttttccatggacagtgctggtctaatgagttccactccacatagtatgcacagataggccagaatgctaatatactaacatttgaagagtgagaaagtcagttataaaaatccaaactccatccactgttgcccagatgtagtagaagctgaacagtttgagcttagaagtagaagaatctgacccagagagtaccctaaattcttggagaggagacagaagcagcagatttaaagggcttattgtggaggactcatggtaggacagaacttggtttttgcaaaatctctagacattgagttatgtgtaagtcttcagaggcaaattcatttagcgttttaccttttgcagtcctgaaggaagagatgtcacagataaccgcttggtggttctcctggcccgaaggagtgtgtttccctgggttatctcctctgtctctgcctctacaacatcaagttgtatagtcgcttccaagaaagggggaaaaaggaatctgtaaggatcacaatgaggaacacattcttcctgttaaaaatacagtattcttagaagacagcatcacttgctgcttcagtggctttttttttctttagagttaagaataaaaaattgatttgctcttcccaatc

SEQ ID NO: 416733 - DNA, 479 bp, Homo sapiens
attgggagagttgaccacccaagatcatactttatggatatgaacattcatctttcaattaggattcattcagtttcatcatttcgagcactcttatgcctcaaacccctacacatctctgttaaaataaaatcccattagtcatctaactgtcctaatatcccctcatagtcattaaattgttttgaagtgttcttaacaccttctcctttgcatgtgtctgttttcaaaattgaaacatcagtgtttggaagtttttcagtggttattaaagtgttgactctggaggactgtttacagctggaaatctaaagatttttctcatcaatgtacacaataaggaccccattcttatctacaggatatacattaaaagcagaattgagaatgtcacatgctgggttgagaatgacacaccaacaaactctctaatggaggagactgtacccatgaaaaatgcaataaactatcttgtgtga

SEQ ID NO: 416734 - DNA, 1127 bp, Homo sapiens
aggaaggtccgtggctgtagataagaagggggtccttatggtgtacatggatgagaaaaatctttagatttccagcggtaaacagtcctccagagtcaacactttaataaccacggaaaaactgtaatctccccgccactcaggaggctgaggcaggtgaatcactggaatccaggaagtagaagtgggatggagccaaatacgcaccactgcactccagcctgggcgacagagtgagactctgtctcaaaacaaacaaacacacaaacaaaacccatgcatacctatggataagtaaaagcattggtttggagagtcctagataatctacgctgcactgtctgtgttgtacatatggctatttacattttagtttcaatgaaaattaagattaaaaattcagttcctcagttgcactgaccagatttcaaagtctcaaagccaaatgtggctaacggctactatattggacaatgcatacttacatcttcacagaaagttccactggacagtgctggtctaatgagttccactccacatagtatgcacagataggccagaatgctaatatactaacatttgaagagtgagaaagtcagttataaaaatccaaactccatccactgttgcccagatgtagtagaagctgaacagtttgagcttagaagtagaagaatctgacccagagagtaccctaaattcttggagaggagacagaagcagcagatttaaagggcttattgtggaggactcatggtaggacagaacttggtttttgcaaaatctctagacattgagttatgtgtaagtcttcagaggcaaattcatttagcgttttaccttttgcagtcctgaaggaagagatgtcacagataaccgcttggtggttctcctggcccgaaggagtgtgtttccctgggttatctcctctgtctctgcctctacaacatcaagttgtatagtcgcttccaagaaagggggaaaaaggaatctgtaaggatcacaatgaggaacacattcttcctgttaaaaatacagtattcttagaagacagcatcacttgctgcttcagtggctttttttttctttagagttaagaataaaaaattgatttgctcttcccaatc

SEQ ID NO: 416735 - DNA, 862 bp, Homo sapiens
  misc_feature (844)..(844): n is a, c, g, or t
  misc_feature (847)..(847): n is a, c, g, or t
aggaaggtccgtggctgtagataagaagggggtccttatggtgtacatggatgagaaaaatctttagatttccagcggtaaacagtcctccagagtcaacactttaataaccacggaaaaactgtaatctccccgccactcaggaggctgaggcaggtgaatcactggaatccaggaagtagaagtgggatggagccaaatacgcaccactgcactccagcctgggcgacagagtgagactctgtctcaaaacaaacaaacacacaaacaaaacccatgcatacctatggataagtaaaagcattggtttggagagtcctagataatctacgctgcactgtctgtgttgtacatatggctatttacattttagtttcaatgaaaattaagattaaaaattcagttcctcagttgcactgaccagatttcaaagtctcaaagccaaatgtggctaacggctactatattggacaatgcatacttacatcttcacagaaagttccactggacagtgctggtctaatgagttccactccacatagtatgcacagataggccagaatgctaatatactaacatttgaagagtgagaaagtcagttataaaaatccaaactccatccactgttgccccaggctggagtgcagtggtgcgtatttggctcaatccaacttctacttcctggattcaagggattcacctgcctcagcctcctgagtagctgggagattacagtttttcagtggttattaaagtgttgactctggaggactgtttacagctggaaatctaaagatttttctcatcaatgtacacaataaggaccccattcttatctacagcnacngtgaggatgctcgtg

SEQ ID NO: 416736 - DNA, 611 bp, Homo sapiens
cctcagtcaatgacaccatcacccacacagctgtctaagttagagcctgagagtcattttagatttcgctttccctcactattcgcatctaatttattaactaatctgatcaattctaactcatatacatctccctagtctttctccttttctccacgtcaacaatcactgccctaagactgttatcatctctctagtggcagtttgtaccgtgtccgtttggtatagctaaaactactttcccagaattatttcctcgtcgaaattcaggttagagttggacaaaagaatttgagtgatatttgggaggtagaagagaagccacagccattaccctctgacagctgttgttgcaacatacagacagttaccagtggattccagctcattctgctctccctcgctctgtgctcagctcttcccagtggccagccctgtccattagcagtagccccagtagccaccaccagatacttgtctgaggacctacagaaatggtagctaaatttctttggagtttttctctagactctttgtagccccacttcagcagctgaatgtgcttggattctcagggctccctgcaatctcaatttgtccaccttgccatg

SEQ ID NO: 416737 - DNA, 539 bp, Homo sapiens
tactcctctcttcaagaggcggcttaaatgtctttcctcttgtgtgtgagctgaacttagtgattcacttctaatgaataaggcagtgacagtgggggacttcatggactaggtcataagaagacactgggacttccattttggccacactctctcagatcactcactttggaggaggccagatgccacactgtgaacaggcccatggagaaacccatagtgaggaactgagggctcctacagcagctaagtaagtgggcttggaggtggattctccactttcagtcaagtcccagctgacataccacttgcaacttcatgagagaccctgagtcagaaccatccagctaaactgcttgcaaaattcctacagaaactatgacataataaatgtgcgttgttgtaagtaaatcaatttggggtaattttttgtgcagcaataattaactaatatgagtgtctaaagcagtcttttaaaacacaaacagattatttcccttctccgcttaatacatctcagtgacctctcatttcatctg

SEQ ID NO: 416738 - DNA, 673 bp, Homo sapiens
aatagctaccatttatttcatgcttatcataattgagatactgaactgggtatattatgtacctatgtcaattaaattttcataccttacattcttcaccacaattattaaggtgaaatttattaacccagcttaatgataaggaagctaaatatcaagatacccaattataatataaaagacacaaaatattatttaggaagaaaatttttcagcaacccagaatatgtttcttgttgtattaaggcacattttagttctctagcatttgagggttaggcaggggaagctcttactgtgtttataaatctcattgcccattaatgaacctgaagacataatcatacctggcaacaaattctagaaggaatatatactatgaatgtttatctaatgtatgttagagactataattatggtgtggcaaaaatataaagttatttttaaaactctttctctgttgactcactacaaaagccaagggcacaatatgatgtcataatgcagggaagtaatttcttcaggaaatgcaggtagtagagtctgagcatattgatttttggagctctagctcagtgtttcccaacctttgttcttcataaaactaaccctgctagatgtgaatagttactccatcagaaatgggttcgagttaaattgtcttggaaatgca

SEQ ID NO: 416739 - DNA, 447 bp, Homo sapiens
  misc_feature (329)..(329): n is a, c, g, or t
  misc_feature (369)..(369): n is a, c, g, or t
  misc_feature (440)..(440): n is a, c, g, or t
agctaacttagaaactccacaagtaaactttcccagtctggaatggtttagccatagtctagttgatgagaacaaataaaagggtaacattttaaactcaaaatgtttttgagttctttacagataactagaagatgaaattaagatcctataaagtggccacgcactgtggctcacacctgtaatcccagcacttttggaggcccaaagtgggagaatcgcttgagccccaagagtttgacaccagccccaggcagcatggcaagactccatttctacaaaaaataataaagaaatttagctgggtgtgatggtttgtaactgtagtnccaagctacttaggaggcagaggtaggaggactgattcancctgggaagttgcggctccagtaagcagagatcatgccaccacactccaacctaggtgacagaggcgattnctatctc

SEQ ID NO: 416740 - DNA, 535 bp, Homo sapiens
gctgctcatggccctctccctgcccaggaatgctcttcctggtggatgccccatcagctcttagggtgagggcagagcgaggagcaggtccacagctacctctcccagttcagccccatcctgggtccagtataatgtgtcccatgtgataagagacttgcagtcatagtcatcgggatcctgtgaccagggatctcacctaggagtctgttctccatcactgaatgccaatctgcgggggatcctggcaaatgactttgcagtgttttgctaaagagcaaaacaagcaaatatgctcagtatttgaagatggaagagttaaaacttcagcttgttttgaccagagtctgtacttaagtgagcctgacacgtggtagcttttaggatcaaccattccaactaggatgtttaggaaagaatactgttcaaaatcgctaatgagtgttttgggcatgtctgaaagatgatagaaattattcatctttgatgtgtaatgaaatctagaatatgatacattaaaaacagtaaactgaag

SEQ ID NO: 416741 - DNA, 552 bp, Homo sapiens
agaccagagaagtccctgctgcactccagggtctgagaagagacttcgacttggtggcatcacaggggaagaaggaagaagggactacaggagaaccaagggcatatgggcatgacctgaagattcctggtgttcaggtgaagatgtaaggaagtccacgaagtagatacagacttgcagtcatagtcatcgggatcctgtgaccagggatctcacctaggagtctgttctccatcactgaatgccaatctgcgggggatcctggcaaatgactttgcagtgttttgctaaagagcaaaacaagcaaatatgctcagtatttgaagatggaagagttaaaacttcagcttgttttgaccagagtctgtacttaagtgagcctgacacgtggtagcttttaggatcaaccattccaactaggatgtttaggaaagaatactgttcaaaatcgctaatgagtgttttgggcatgtctgaaagatgatagaaattattcatctttgatgtgtaatgaaatctagaatatgatacattaaaaacagtaaactgaag

SEQ ID NO: 416742 - DNA, 418 bp, Homo sapiens
aaggtgaaagagggtaaaaactcaatggtttaaatgtctttaggaccataatattgtaaggagggaatttaatggaatcaagaagagaggagaggaaatgtggtcccaaggcagaatgttttctttccaggtttcgtgatggtgcctattctaatgatgatgaagagtgatcaggtcatcaggagaaaggatatgggagatattgtgatgggaaagatcctctgatacaagaaggttaagaacctaggggtcttgtgattgcatggatcacctactggctgaagtttgtgtggtaaggaagagtgggtccaaagcagaactcatttgtgaatcaagaggaatgaccaagaactgagtacaaactactccaaaggggtagtttggaggtcagaatagcaagttttacaagaggaggatt

SEQ ID NO: 416743 - DNA, 2278 bp, Homo sapiens
  misc_feature (1625)..(1625): n is a, c, g, or t
atcccggccggcatggaggcggatttgagccagctgagcgaagaggagaggagacagatcgccgctgtcatgtcaagggcgcaggggctgcccaagggaagcgtccccccggccgctgcggagtcgccttccatgcacaggaaacaagagttggatagtagtcatcctccaaagcaatcaggaagacccccggaccctgggcgtccagctcaacctggtctcagtaaaagtagaactacagacactttcaggtcagagcagaaattgcctgggaggagtccttccactattagcttgaaagaatcaaagtccagaactgatttaaaggaagagcacaagtctagtatgatgcctggcttcctctcagaggttaacgctttaagtgctgtttcctctgttgtaaataaattcaacccttttgatttgatatcagactctgaggcatcccaggaagaaaccaccaagaaacaaaaagtggttcagaaggagcaaggaaaacctgaaggaatcataaaacctcctttacaacaacagccacccaagccgattcctaagcagcaaggacctggtagggatccgcttcagcaggatggcactcccaaatcaatatcttctcaacaaccagaaaaaattaaatcacaacctccaggtacaggaaagccaattcagggtcctacccagactcctcagacagaccatgcaaaattgccacttcaacgagatgcatccaggcctcagactaaacaggcagacatagtaaggggagaatcagttaaaccctcactgccaagcccatccaaaccacctattcagcaaccaactcctggaaaacctccagcacagcagcctggacatgaaaaatcacagcctgggcctgcaaagcccccagctcagccctcagggctaacaaagccattggctcaacaaccagggacagtgaaacccccagtccagccaccagggacaacaaagcctccagctcagcctcttggtcctgctaagcctccagctcagcagactgggtcagagaagccttcatcggagcagcctgggccaaaggctttagctcagcctcctggagttggaaagactccagctcaacagccagggccagcaaagcctccaacccagcaggtggggacaccaaaacccctagctcaacaacctgggctacagtctccagctaaggcacctgggcctacaaagactccagctcagacaaagcccccatctcaacagcctggctcaacaaaacccccacctcaacagcctggcccagcaaagccctcacctcaacagcctggctcaacaaaacccccatctcaacagcctggctcagcaaaaccctcagctcaacagcctagcccagcaaagccctcggctcagcaatttacaaaaccagtaagccaaacaggatttggaaaacctctgcagccaccaacagtgtctccatctgcaaaacagcctccttcacaaggcctccctaaaaccatctgtcctctttgcaataccactgaacttctgttgcatgttccagaaaaggccaattttaacacatgcactgagtgtcaaaccactgtctgtagtctctgtggttttaatcccaatcctcatttaacggaggnaaaagagtggctctgtttgaactgtcaaatgaaaagagctctaggcggggatctggctccagttccgtcatcaccccagcccaaactgaagactgcacctgttaccactacatcagcagtgagcaaatcatccccacagccacagcagacttccccaaagaaggatgctgcaccaaaacaggatctctccaaggcacctgagcctaaaaagccaccaccactagtgaaacaaccaacccttcatggctctccttcagccaaggccaagcagccccctgaggcagattctttgtccaagccagcccctcccaaagaaccttctgtcccatctgagcaggacaaggcccctgttgctgatgataaaccaaagcagcccaagatggtaaagccaaccactgaccttgtatcttcatcatcagcaacaacaaaacctgatattccaagctccaaagtacagtcacaagctgaagagaaaacaacccctcctctaaaaacagactctgccaaaccctcacagagttttccaccaacaggggaaaaagtcaccccatttgattctaaagccatacctcgacctgcatcagattcaaaaattatttcacatcctggtcccagttcagagagcaaaggtcaaaaacaagttgaccccgtac

SEQ ID NO: 416744 - DNA, 374 bp, Homo sapiens
tgaagttctttcttcagcgtgttcaattctattgctgagagtttccagagccttttgcatttctataactgtgtccattgtttcctgaagttttgattgttttttatttatgctatctatttcattgaaaatctctcccttcacctgttgtatcatttttttgatttccttaagttggactttgcctttcactggtgccttcctgattagcttaataactaaccttctgaattctttttcaggtgaaacagggatttcttcttggtttgcatccattgctggtgacctagtgtgattttttggggggtattaaggaaccttgttttgtcatattactagagttgggtttctggttcctcctcatttgtgtagtg

SEQ ID NO: 416745 - DNA, 272 bp, Homo sapiens
aggtaggggattttattggaaatacggatctagagctagtggaagtgtgaaacgcctagagaccccggcgccccaggtgcctgcacgccgcctcttgccaccctgagcactgcccggatcccgtgcaccctgggacccagaagtgcccccgccatcccgccaccaggactgctccccgccagcacgtccagagcaacttaccccggccagccagccctctcacccgaggatccctaccccctggccccacaataaacatgatctgaagcagc

SEQ ID NO: 416746 - DNA, 1050 bp, Homo sapiens
ggcgtgcgcagccgcagagcgccgcagcctcgccagctcgccccggcactgcgcacttgccagccagtccgcccgtccggagcccggctcgctggggcagcatggcggggtcgccgctgctctgggggccgcgggccgggggcgtcggccttttggtgctgctgctgctcggcctgtttcggccgccccccgcgctctgcgcgcggccggtaaaggagccccgcggcctaagcgcagcgtctccgcccttggctgagactggcgctcctcgccgcttccggcggtcagtgccccgaggtgaggcggcgggggcggtgcaggagctggcgcgggcgctggcgcatctgctggaggccgaacgtcaggagcgggcgcgggccgaggcgcaggaggctgaggatcagcaggcgcgcgtcctggcgcagctgctgcgcgtctggggcgccccccgcaactctgatccggctctgggcctggacgacgaccccgacgcgcctgcagcgcagctcgctcgcgctctgctccgcgcccgccttgaccctgccgccctcgcagcccagcttgtccccgcgcccgtccccgccgcggcgctccgaccccggcccccggtctacgacgacggccccgcgggcccggatgctgaggaggcaggcgacgagacacccgacgtggaccccgagctgttgaggtacttgctgggacggattcttgcgggaagcgcggactccgagggggtggcagccccgcgccgcctccgccgtgccgccgaccacgatgtgggctctgagctgccccctgagggcgtgctgggggcgctgctgcgtgtgaaacgcctagagaccccggcgccccaggtgcctgcacgccgcctcttgccaccctgagcactgcccggatcccgtgcaccctgggacccagaagtgcccccgccatcccgccaccaggactgctccccgccagcacgtccagagcaacttaccccggccagccagccctctcacccgaggatccctaccccctggccccacaataaacatgatctgaagcagc

SEQ ID NO: 416747 - DNA, 1608 bp, Homo sapiens
  misc_feature (1059)..(1059): n is a, c, g, or t
  misc_feature (1061)..(1062): n is a, c, g, or t
  misc_feature (1064)..(1064): n is a, c, g, or t
ggcgtgcgcagccgcagagcgccgcagcctcgccagctcgccccggcactgcgcacttgccagccagtccgcccgtccggagcccggctcgctggggcagcatggcggggtcgccgctgctctgggggccgcgggccgggggcgtcggccttttggtgctgctgctgctcggcctgtttcggccgccccccgcgctctgcgcgcggccggtaaaggagccccgcggcctaagcgcagcgtctccgcccttggctgagactggcgctcctcgccgcttccggcggtcagtgccccgaggtgaggcggcgggggcggtgcaggagctggcgcgggcgctggcgcatctgctggaggccgaacgtcaggagcgggcgcgggccgaggcgcaggaggctgaggatcagcaggcgcgcgtcctggcgcagctgctgcgcgtctggggcgccccccgcaactctgatccggctctgggcctggacgacgaccccgacgcgcctgcagcgcagctcgctcgcgctctgctccgcgcccgccttgaccctgccgccctcgcagcccagcttgtccccgcgcccgtccccgccgcggcgctccgaccccggcccccggtctacgacgacggccccgcgggcccggatgctgaggaggcaggcgacgagacacccgacgtggaccccgagctgttgaggtacttgctgggacggattcttgcgggaagcgcggactccgagggggtggcagccccgcgccgcctccgccgtgccgccgaccacgatgtgggctctgagctgccccctgagggcgtgctgggggcgctgctgcgtgtgaaacgcctagagaccccggcgccccaggtgcctgcacgccgcctcttgccaccctgagcactgcccggatcccgtgcaccctgggacccagaagtgcccccgccatcccgccaccaggactgctccccgccagcacgtccagagcaacttaccccggccagccagccctctcacccgaggatccctaccccctggccccacaataaacatgatctgaagcagcaaaaaaaanannanaaaaaaaaaaaaaaaaaaaaaaaaagggggggcgcagcacatacaaaaagttacccccggaaggggccacaaatataagcctcgatcaccagaatttgtgttgaaacgaaggtgggcaccccaaaaagagagcatgtgacatataaaagcacagagcagaaataaggagacagataaaattaaaaacagagtcgacgatatgatgaaaaaaaatcggacccaatcagagggaagaacacatttaggagagaaaggaagagaacccaataaaacactaggggaggaggagagggcaacacacaaaataaaagttggggcaagaaagaaaactatcacaaaacataggaagatatatagaagacagcagtataaaggggccaaaaattaataaacaatttagaaaaagatgaataaaaaagagattggtgaaaaaaacaaatagggagaaataaatagtaggcagtagagataaaagaagttggtaaaagagaggaataattatatagaacaaaattatataccacggaagaaggtaataatagtg

SEQ ID NO: 416748 - DNA, 1028 bp, Homo sapiens
  misc_feature (917)..(917): n is a, c, g, or t
  misc_feature (919)..(919): n is a, c, g, or t
ggcgtgcgcagccgcagagcgccgcagcctcgccagctcgccccggcactgcgcacttgccagccagtccgcccgtccggagcccggctcgctggggcagcatggcggggtcgccgctgctctgggggccgcgggccgggggcgtcggccttttggtgctgctgctgctcggcctgtttcggccgccccccgcgctctgcgcgcggccggtaaaggagccccgcggcctaagcgcagcgtctccgcccttggctgagactggcgctcctcgccgcttccggcggtcagtgccccgaggtgaggcggcgggggcggtgcaggagctggcgcgggcgctggcgcatctgctggaggccgaacgtcaggagcgggcgcgggccgaggcgcaggaggctgaggatcagcaggcgcgcgtcctggcgcagctgctgcgcgtctggggcgccccccgcaactctgatccggctctgggcctggacgacgaccccgacgcgcctgcagcgcagctcgctcgcgctctgctccgcgcccgccttgaccctgccgccctcgcagcccagcttgtccccgcgcccgtccccgccgcggcgctccgaccccggcccccggtctacgacgacggccccgcgggcccggatgctgaggaggcaggcgacgagacacccgacgtggaccccgagctgttgaggtacttgctgggacggattcttgcgggaagcgcggactccgagggggtggcagccccgcgccgcctccgccgtgccgccgaccacgatgtgggctctgagctgccccctgagggcgtgctgggggcgctgctgcgtgtgaaacgcctagagaccccggcgccccaggtgcctgcacgccgcctcttgccaccctgagcactgcccggatcccgtgcaccctgggaccanangtgcccgcatccggaccaggaatgtcacggcaagagtcagagaattacccggacagcaagctataaacgagaactaacctgtgccaaaaaagtacgaagcaaaaaaagc

SEQ ID NO: 416749 - DNA, 686 bp, Homo sapiens
ggcgtgcgcagccgcagagcgccgcagcctcgccagctcgccccggcactgcgcacttgccagccagtccgcccgtccggagcccggctcgctggggcagcatggcggggtcgccgctgctctgggggccgcgggccgggggcgtcggccttttggtgctgctgctgctcggcctgtttcggccgccccccgcgctctgcgcgcggccggtaaagccgccgcggcgctccgaccccggcccccggtctacgacgacggccccgcgggcccggatgctgaggaggcaggcgacgagacacccgacgtggaccccgagctgttgaggtacttgctgggacggattcttgcgggaagcgcggactccgagggggtggcagccccgcgccgcctccgccgtgccgccgaccacgatgtgggctctgagctgccccctgagggcgtgctgggggcgctgctgcgtgtgaaacgcctagagaccccggcgccccaggtgcctgcacgccgcctcttgccaccctgagcactgcccggatcccgtgcaccctgggacccagaagtgcccccgccatcccgccaccaggactgctccccgccagcacgtccagagcaacttaccccggccagccagccctctcacccgaggatccctaccccctggccccacaataaacatgatctgaagcagc

SEQ ID NO: 416750 - DNA, 933 bp, Homo sapiens
ggcgtgcgcagccgcagagcgccgcagcctcgccagctcgccccggcactgcgcacttgccagccagtccgcccgtccggagcccggctcgctggggcagcatggcggggtcgccgctgctctgggggccgcgggccgggggcgtcggccttttggtgctgctgctgctcggcctgtttcggccgccccccgcgctctgcgcgcggccggtaaaggagccccgcggcctaagcgcagcgtctccgcccttggctgagactggcgctcctcgccgcttccggcggtcagtgccccgaggtgaggcggcgggggcggtgcaggagctggcgcgggcgctggcgcatctgctggaggccgaacgtcaggagcgggcgcgggccgaggcgcaggaggctgaggatcagcaggcgcgcgtcctggcgcagctgctgcgcgtctggggcgccccccgcaactctgatccggctctgggcctggacgacgaccccgacgcgcctgcagcgcagctcgctcgcgctctgctccgcgcccgccttgaccctgccgccctcgcagcccagcttgtccccgcgcccgtccccgccgcggcgctccgaccccggcccccggtctacgacgacggccccgcgggcccggatgctgaggaggcaggcgacgagacacccgacgtggaccccgagctgttgaggtacttgctgggacggattcttgcgggaagcgcggactccgagggggtggcagccccgcgccgcctcttgccaccctgagcactgcccggatcccgtgcaccctgggacccagaagtgcccccgccatcccgccaccaggactgctccccgccagcacgtccagagcaacttaccccggccagccagccctctcacccgaggatccctaccccctggccccacaataaacatgatctgaagcagc

SEQ ID NO: 416751 - DNA, 942 bp, Homo sapiens
ggcgtgcgcagccgcagagcgccgcagcctcgccagctcgccccggcactgcgcacttgccagccagtccgcccgtccggagcccggctcgctggggcagcatggcggggtcgccgctgctctgggggccgcgggccgggggcgtcggccttttggtgctgctgctgctcggcctgtttcggccgccccccgcgctctgcgcgcggccggtaaaggagccccgcggcctaagcgcagcgtctccgcccttggctgagactggcgctcctcgccgcttccggcggtcagtgccccgaggtgaggcggcgggggcggtgcaggagctggcgcgggcgctggcgcatctgctggaggccgaacgtcaggagcgggcgcgggccgaggcgcaggaggctgaggatcagcaggcgcgcgtcctggcgcagctgctgcgcgtctggggcgccccccgcaactctgatccggctctgggcctggacgacgaccccgacgcgcctgcagcgcagctcgctcgcgctctgctccgcgcccgccttgaccctgccgccctcgcagcccagcttgtccccgcgcccgtccccgccgcggcgctccgaccccggcccccggtctacgacgacggccccgcgggcccggatgctgaggaggcaggcgacgagacacccgacgtggaccccgagctgttgagtgagggcgtgctgggggcgctgctgcgtgtgaaacgcctagagaccccggcgccccaggtgcctgcacgccgcctcttgccaccctgagcactgcccggatcccgtgcaccctgggacccagaagtgcccccgccatcccgccaccaggactgctccccgccagcacgtccagagcaacttaccccggccagccagccctctcacccgaggatccctaccccctggccccacaataaacatgatctgaagcagc

SEQ ID NO: 416752 - DNA, 799 bp, Homo sapiens
ggcgtgcgcagccgcagagcgccgcagcctcgccagctcgccccggcactgcgcacttgccagccagtccgcccgtccggagcccggctcgctggggcagcatggcggggtcgccgctgctctgggggccgcgggccgggggcgtcggccttttggtgctgctgctgctcggcctgtttcggccgccccccgcgctctgcgcgcggccggtaaaggagccccgcggcctaagcgcagcgtctccgcccttggctgagactggcgctcctcgccgcttccggcggtcagtgccccgaggtgaggcggcgggggcggtgcaggagctggcgcgggcgctggcgcatctgctggaggccgaacgtcaggagcgggcgcgggccgaggcgcaggaggctgaggatcagcaggcgcgcgtcctggcgcagctgctgcgcgtctggggcgccccccgcaactctgatccggctctgggcctggacgacgaccccgacgcgcctgcagcgcagctcgctcgcgctctgctccgcgcccgccttgaccctgccgccctcgcagcccagcttgtccccgcgcccgtccccgccgcggcgctccgaccccggcccccggtctacgacgacggccccgcgggcccggatgctgaggaggcaggcgacgagacacccagaagtgcccccgccatcccgccaccaggactgctccccgccagcacgtccagagcaacttaccccggccagccagccctctcacccgaggatccctaccccctggccccacaataaacatgatctgaagcagc

SEQ ID NO: 416753 - DNA, 742 bp, Homo sapiens
ggcgtgcgcagccgcagagcgccgcagcctcgccagctcgccccggcactgcgcacttgccagccagtccgcccgtccggagcccggctcgctggggcagcatggcggggtcgccgctgctctgggggccgcgggccgggggcgtcggccttttggtgctgctgctgctcggcctgtttcggccgccccccgcgctctgcgcgcggccggtaaaggagccccgcggcctaagcgcagcgtctccgcccttggctgagactggcgctcctcgccgcttccggcggtcagtgccccgaggtgaggcggcgggggcggtgcaggagctggcgcgggcgctggcgcatctgctggaggccgaacgtcaggagcgggcgcgggccgaggcgcaggaggctgaggatcagcaggcgcgcgtcctggcgcagctgctgcgcgtctggggcgccccccgcaactctgatccggctctgggcctggacgacgacccctgagggcgtgctgggggcgctgctgcgtgtgaaacgcctagagaccccggcgccccaggtgcctgcacgccgcctcttgccaccctgagcactgcccggatcccgtgcaccctgggacccagaagtgcccccgccatcccgccaccaggactgctccccgccagcacgtccagagcaacttaccccggccagccagccctctcacccgaggatccctaccccctggccccacaataaacatgatctgaagcagc

SEQ ID NO: 416754 - DNA, 556 bp, Homo sapiens
ggcgtgcgcagccgcagagcgccgcagcctcgccagctcgccccggcactgcgcacttgccagccagtccgcccgtccggagcccggctcgctggggcagcatggcggggtcgccgctgctctgggggccgcgggccgggggcgtcggccttttggtgctgctgctgctcggcctgtttcggccgccccccgcgctctgcgcgcggccggtaaaggagccccgcggcctaagcgcagcgtctccgcccttggctgagactggcgctcctcgccgaccacgatgtgggctctgagctgccccctgagggcgtgctgggggcgctgctgcgtgtgaaacgcctagagaccccggcgccccaggtgcctgcacgccgcctcttgccaccctgagcactgcccggatcccgtgcaccctgggacccagaagtgcccccgccatcccgccaccaggactgctccccgccagcacgtccagagcaacttaccccggccagccagccctctcacccgaggatccctaccccctggccccacaataaacatgatctgaagcagc

SEQ ID NO: 416755 - DNA, 654 bp, Homo sapiens
tgtctctctctctctctgtgtgtgtgtgtgtgtgtgtgtgtgtgtgtgatttcgtttgtgtttgagagggaatggtcttcgcatctccgtgtgcacattccatagtggttctgttggaccaagtgcctgggatttcgtttgcgtgttcctgagactgtttctctccgtttctttgtggagctgtgtcatcctgaggagaggagccatgatgtctctctgctgcattgtgtctttaaggatggtgcatgtccttgcacctgggtggcttggcgattgtaactgcaggagcagctgcggatgtgaacgtgtgcaggagccccgcggcctaagcgcagcgtctccgcccttggctgagactggcgctcctcgccgaccacgatgtgggctctgagctgccccctgagggcgtgctgggggcgctgctgcgtgtgaaacgcctagagaccccggcgccccaggtgcctgcacgccgcctcttgccaccctgagcactgcccggatcccgtgcaccctgggacccagaagtgcccccgccatcccgccaccaggactgctccccgccagcacgtccagagcaacttaccccggccagccagccctctcacccgaggatccctaccccctggccccacaataaacatgatctgaagcagc

SEQ ID NO: 416756 - DNA, 289 bp, Homo sapiens
aggcatgagccactgtgcccagcctagaagcaacttttgaaaagataatagctgaggactttcaaaactggtgaaaagcattgtcacagattaaaaaacccaagcagaatttaaaatacacaaaaaacccaggcacattcatagtaattgataaccaaagataaaatcttataaaatagctagagaaaaaaagacatcaccatcaaaagagcaaccactagacttactgctggattctccagagaaataatgaaacccagaagacaaatggaatattttcaaagtgctg

SEQ ID NO: 416757 - DNA, 772 bp, Homo sapiens
gaaaagccttttgagtgcaaagaatgtgggaaagcctttagcattcgaaaagacctcattcgacacttcaacatccacactggagagaagccctatgagtgtttacagtgtggaaaggcttttacccgcatgtcagggctcacaaggcaccagtggattcatactggagagaagccgtatgtatgcatccaatgtgggaaagccttttgtcggaccacaaacctgattcgacactttagcatccacactggagagaagccctatgaatgcgtggagtgcgggaaggccttcaaccgcaggtcacccctcacaaggcaccagcggattcacactgcagagaagtcccacgaacccatccagagtgggaacgtttcttgtgagagcacagatctcattcaacactccatcatccacactgagagtagcccagtgagtgcagtgaatatggaaacgccttcaattgccgctcattcctcctcactcgacatcaacggattcatagtggaagaaaccctaccattgtaacagatgtggaaagactttttacgtacacttcagtcaacatccaagaattcctattagcgaaatagttttttaatataaccactgaagaaaatctgtggtgagaggaaacatcttaccatctggtcattcatactgaagagaaactccataagtatcatctctgtgggaaaacctgttttagatcatcatttgtcatctaaacaattatgttagaaattgacacagccaagagtcttattctacatct

SEQ ID NO: 416758 - DNA, 839 bp, Homo sapiens
ggaatagcagagctggtgggaaccaaagaaacagaggcaatcggttgcaagacaacagacagttcagaggcagggacaacagatgggggtggccaagtgacaatcgatccaatcagtggcatggacgatcctggggtaacaactacccgcaacacagacaagaaccttactatccccagcaatatggacattatggttacaaccagcggcctccttacggttactactgatagaaatgttggcagcttttagtaaaagcatttactctgttaccatgagaaaagtttgggtgtcttctgttggtcatagttttacatctgattttacagaatggattattgattttttggaagttgagactttaaaaaaaatagatcttacttgcgaaatgcgatggttgctgggaatacctgaaactgtggattatattgcttgacttctacctcagaatcttctttgtttcatgacttaatagtgctttaagtttggtatattatttgacctctaggaattctttgttttacacagaaataaaaattttaaaatagaaaatgcttttactttgtaaggtaagagagtatccatatgcttagatgtgctcgtttctaaaattctagaggttgatataatcagctcatgaatgcacagctatgctttttgtgatagattgtacataacatcagcagttgaaaggtaaaacaattgctttttttttttttttgcatttgttaagtgactatggtactttgtgattccttaatctatagatgagtcagctccacacttgagtctctttttagagggaaatcagtaataaagctgtaaaataaggaaaaaaa

SEQ ID NO: 416759 - DNA, 274 bp, Homo sapiens
ggaatagcagagctggtgggaaccaaagaaacagaggcaatcggttgcaagacaacagacagttcagaggcagggacaacagatgggggtggccaagtgacaatcgatccaatcagtggcatggacgatcctggggtaacaactacccgcaacacagacaagaaccttactatccccagcaatatggacattatggttacaaccagcggcctccttacggttactactgatagaaatgttggcagcttttagtaaaagcatttactctgttacc

SEQ ID NO: 416760 - DNA, 749 bp, Homo sapiens
ggaatatgagaaatgtcacctcctggctaccacaataatgcaactaggagttctggttctccgctgactacccacaggagtccttagaggaaccacacaggaaacctgggaaacctaacactctgattccaaggctccaagcttgatatagaagactatcatatgaaccagaaagggtaactgaaaccaaggaaatgactccagtatcaagctaaagacatgccttaaaggatgaggaggagcagaaatcttaccagcaaggcaagaaagaagccgtacgtgaacagcctctgctttaggcccagaaggaaaagaagcttacaggagacaatcagtcttacactcttccatggtcacaaacaagaggtccctggatctacaggtcatcttgcccctgaaatggccctggaaagctatggctgaagaatggaggaaaagatgactttctctgtttcttcagaccaggcatcaactgggatgttggaatgttgataaaaggacatctcatcctttgttttctgcctatgctttcaccatacccattcccatgtctggtcatcacagcgtccttcacagcccttagctgaatcatgttgagtacaggatggtgtgaatatcatggtttgaatgcaaccatggtctgtccatgtggcttgttttttgcagcccacttagacttaagccctcttaatttcaaaattatgttcatatgtgccaataaagttgtccctacatgaactgaaaaatgc

SEQ ID NO: 416761 - DNA, 897 bp, Homo sapiens
  misc_feature (1)..(1): n is a, c, g, or t
ngagagggcctcctaggaggcgggtgggcaaacggagacctacgcctcggggtctcccggtgccccggctgggtcccgcccgccggcggaggggcgcgtcctcactcaccggttccggtggcgccgctctcccggggcgcccagcacagcgcgagcagcagccagagcgcccagagcgcggacgtgcccatggtgcccgcctggatggtgccgccgccgccgccgccgccgccgttcgctccgcacgacaagttaccagcccttccgaaaggaggaagaaggctccaagcttgatatagaagactatcatatgaaccagaaagggtaactgaaaccaaggaaatgactccagtatcaagctaaagacatgccttaaaggatgaggaggagcagaaatcttaccagcaaggcaagaaagaagccgtacgtgaacagcctctgctttaggcccagaaggaaaagaagcttacaggagacaatcagtcttacactcttccatggtcacaaacaagaggtccctggatctacaggtcatcttgcccctgaaatggccctggaaagctatggctgaagaatggaggaaaagatgactttctctgtttcttcagaccaggcatcaactgggatgttggaatgttgataaaaggacatctcatcctttgttttctgcctatgctttcaccatacccattcccatgtctggtcatcacagcgtccttcacagcccttagctgaatcatgttgagtacaggatggtgtgaatatcatggtttgaatgcaaccatggtctgtccatgtggcttgttttttgcagcccacttagacttaagccctcttaatttcaaaattatgttcatatgtgccaataaagttgtccctacatgaactgaaaaatgc

SEQ ID NO: 416762 - DNA, 700 bp, Homo sapiens
ggcgtgcacctggggggtacttgcagtttccaggggcaacaagcatctctctaccaccctctcctgcgcccctgagagaggctggctccaagcttgatatagaagactatcatatgaaccagaaagggtaactgaaaccaaggaaatgactccagtatcaagctaaagacatgccttaaaggatgaggaggagcagaaatcttaccagcaaggcaagaaagaagccgtacgtgaacagcctctgctttaggcccagaaggaaaagaagcttacaggagacaatcagtcttacactcttccatggtcacaaacaagaggtccctggatctacaggtcatcttgcccctgaaatggccctggaaagctatggctgaagaatggaggaaaagatgactttctctgtttcttcagaccaggcatcaactgggatgttggaatgttgataaaaggacatctcatcctttgttttctgcctatgctttcaccatacccattcccatgtctggtcatcacagcgtccttcacagcccttagctgaatcatgttgagtacaggatggtgtgaatatcatggtttgaatgcaaccatggtctgtccatgtggcttgttttttgcagcccacttagacttaagccctcttaatttcaaaattatgttcatatgtgccaataaagttgtccctacatgaactgaaaaatgc

SEQ ID NO: 416763 - DNA, 444 bp, Homo sapiens
tggttcaaagtctaggccctcttcagagctggctgattcagcttgccaacagtgacatcagggtgaggcttcctctgtccacagcattagctgcgaatatcctcatggtcacaagatggctgccagtggccgtcagggtgtgtgcttccttgttcacatccagtggaagagtgacagcctgctccccttagctctctgacaccaatgagaaggtgctaagaacttactagcaggcctttcctcatgacccattcaacaggattgggtcacgtgcctattcctgaaccactaattgggaagggatgggattactcttagaccagtggttctcaactgagcatgagtttgtcttccaggtgacagttggccatgtttggagacatttatggttgtcacaactggggtgatgctactggcatctcatgggtagagccagggatgctg

SEQ ID NO: 416764 - DNA, 1090 bp, Homo sapiens
tctctcctccagtcttttcatgagtgtaggaagtcaaactatgtgagagagaattgtagaaagcatggaagcaattccatgcatccgcagatgggcacctggggaatcctgggtcaggtttccggtgagttgaaaatgatcaaaggaaaacttccttcctcaaagcatcgtaggaggacatggaagcagagtgctggggaggaccaggaaaagccagggatgagatgagacagctataagtaagcaagccccagtgagtgtgaaggattggtagaaatgttactgatgatgtgaaagatttagacagagggattaggtatggtgtatgatgagtttggtagttgaggagcccttattacaggtaatatagcttctcccaagctcacttgcaaactggaaggcttttttaaaaatgggcttccacctatgaagggaaagcatctgctcttacatagttggattaggtcattctgctttatttatatatcaaataagaattaaggtactggtgaacagtagagataaagtaagaattttattgtaacaggttataaaaatattttgataatttcccccaaagagaatgtactatgaataaataaaatctacaaattattgggctaatttacccttgtttcttatattttgtatacttaggaggtgacctctaggaaaaaattgctgaagaggtagtagagcagggtgaagataccgtatactgtcatccctaggtatctgtaggggattggttccacagattgcaaaattcttggattctcaagtcctcgatataagacagtgtagtatttgcatatgacctgcacatatatgggaggccgtatattttaaataatctctagattacttctaatacctattacaatgtaagtgctatgtaaatagttgttatattgtttagagactgacgaaaactgcatgcttaataaattacacaattttttaaaaaaattttctattcgatgttggttgaatccacaaatgtgaaaaccccaggtacctggagtcaactgtgtggtttttttttttttctcctagtcagttaataataaatattcctagtttggaagca

SEQ ID NO: 416765 - DNA, 162 bp, Homo sapiens
tttgttgggtatcattgggtttagaacagggataaaagtgaaaagaaaaaaatgtatatgtgcttctttcactacagcatttgttatgaccttagttaaatgtggcacataattaggtattatttgcagagctcctgaatccacttatgtgtgcaaaatgcc

SEQ ID NO: 416766 - DNA, 268 bp, Homo sapiens
gctggaagacagtagaagagccataggacaagtctctaagagaaggaagaaaaggcgcaatgaaagaaaacaagtttaagatagtagaaaagcattcaaagacggcaacctgaggtaaggtgttttcactgaagcttttggggtaaaacagttttgagttggcatgcctgtagacatgggaagcagcagtgatgcagaggtgaacattactgtagataaaaacggatgggaatttgacttgctagggactgaggggttaatcatataa

SEQ ID NO: 416767 - DNA, 797 bp, Homo sapiens
ggctcagctgggaggcgggacgaattattggttgggggaaacccacgaggggacgcggccgaggagggtcgctgtccacccgggggcgtgggagtgaggtaccagattcagcccatttggccccgacgcctctgttctcggaatccgggtgctgcggattgaggtcccggttcctaacggactgcaagatggaggaaggcgggaacctaggaggcctgattaagatggtccatctactggtcttgtcaggtgcctggggcatgcaaatgtgggtgaccttcgtctcaggcttcctgcttttccgaagccttccccgacataccttcggactagtgcagagcaaactcttccccttctacttccacatctccatgggctgtgccttcatcaacctctgcatcttggcttcacagcatgcttgggctcagctcacattctgggaggccagccagctttacctgctgttcctgagccttacgctggccactgtcaacgcccgctggctggaaccccgcaccacagctgccatgtgggccctgcaaaccgtggagaaggagcgaggcctgggtggggaggtaccaggcagccaccagggtcccgatccctaccgccagctgcgagagaaggaccccaagtacagtgctctccgccagaatttcttccgctaccatgggctgtcctctctttgcaatctgggctgcgtcctgagcaatgggctctgtctcgctggccttgccctggaaataaggagcctctagcatgggccctgcatgctaataaatgcttcttcagaaatg

SEQ ID NO: 416768 - DNA, 906 bp, Homo sapiens
ggctcagctgggaggcgggacgaattattggttgggggaaacccacgaggggacgcggccgaggagggtcgctgtccacccgggggcgtgggagtgaggtaccagattcagcccatttggccccgacgcctctgttctcggaatccgggtgctgcggattgaggtcccggttcctaacgaatctctgctggattggccgtaaccctgtccccgagcgggctcacagggtctgaaggccacgcatgaggcaaaggtaaagttctgagccacccggtgcctccttcccaggactgcaagatggaggaaggcgggaacctaggaggcctgattaagatggtccatctactggtcttgtcaggtgcctggggcatgcaaatgtgggtgaccttcgtctcaggcttcctgcttttccgaagccttccccgacataccttcggactagtgcagagcaaactcttccccttctacttccacatctccatgggctgtgccttcatcaacctctgcatcttggcttcacagcatgcttgggctcagctcacattctgggaggccagccagctttacctgctgttcctgagccttacgctggccactgtcaacgcccgctggctggaaccccgcaccacagctgccatgtgggccctgcaaaccgtggagaaggagcgaggcctgggtggggaggtaccaggcagccaccagggtcccgatccctaccgccagctgcgagagaaggaccccaagtacagtgctctccgccagaatttcttccgctaccatgggctgtcctctctttgcaatctgggctgcgtcctgagcaatgggctctgtctcgctggccttgccctggaaataaggagcctctagcatgggccctgcatgctaataaatgcttcttcagaaatg

SEQ ID NO: 416769 - DNA, 916 bp, Homo sapiens
ggctcagctgggaggcgggacgaattattggttgggggaaacccacgaggggacgcggccgaggagggtcgctgtccacccgggggcgtgggagtgaggtaccagattcagcccatttggccccgacgcctctgttctcggaatccgggtgctgcggattgaggtcccggttcctaacggtgggatcggtgtcctcgggatgagatttggcgtttcctcggggctttggtgggatcggtgtcctcaggatgagatttagggtttcctcggggctttcgggatcttcacctaatatccggactgcaagatggaggaaggcgggaacctaggaggcctgattaagatggtccatctactggtcttgtcaggtgcctggggcatgcaaatgtgggtgaccttcgtctcaggcttcctgcttttccgaagccttccccgacataccttcggactagtgcagagcaaactcttccccttctacttccacatctccatgggctgtgccttcatcaacctctgcatcttggcttcacagcatgcttgggctcagctcacattctgggaggccagccagctttacctgctgttcctgagccttacgctggccactgtcaacgcccgctggctggaaccccgcaccacagctgccatgtgggccctgcaaaccgtggagaaggagcgaggcctgggtggggaggtaccaggcagccaccagggtcccgatccctaccgccagctgcgagagaaggaccccaagtacagtgctctccgccagaatttcttccgctaccatgggctgtcctctctttgcaatctgggctgcgtcctgagcaatgggctctgtctcgctggccttgccctggaaataaggagcctctagcatgggccctgcatgctaataaatgcttcttcagaaatg

SEQ ID NO: 416770 - DNA, 1025 bp, Homo sapiens
ggctcagctgggaggcgggacgaattattggttgggggaaacccacgaggggacgcggccgaggagggtcgctgtccacccgggggcgtgggagtgaggtaccagattcagcccatttggccccgacgcctctgttctcggaatccgggtgctgcggattgaggtcccggttcctaacggtgggatcggtgtcctcgggatgagatttggcgtttcctcggggctttggtgggatcggtgtcctcaggatgagatttagggtttcctcggggctttcgggatcttcacctaatatccgaatctctgctggattggccgtaaccctgtccccgagcgggctcacagggtctgaaggccacgcatgaggcaaaggtaaagttctgagccacccggtgcctccttcccaggactgcaagatggaggaaggcgggaacctaggaggcctgattaagatggtccatctactggtcttgtcaggtgcctggggcatgcaaatgtgggtgaccttcgtctcaggcttcctgcttttccgaagccttccccgacataccttcggactagtgcagagcaaactcttccccttctacttccacatctccatgggctgtgccttcatcaacctctgcatcttggcttcacagcatgcttgggctcagctcacattctgggaggccagccagctttacctgctgttcctgagccttacgctggccactgtcaacgcccgctggctggaaccccgcaccacagctgccatgtgggccctgcaaaccgtggagaaggagcgaggcctgggtggggaggtaccaggcagccaccagggtcccgatccctaccgccagctgcgagagaaggaccccaagtacagtgctctccgccagaatttcttccgctaccatgggctgtcctctctttgcaatctgggctgcgtcctgagcaatgggctctgtctcgctggccttgccctggaaataaggagcctctagcatgggccctgcatgctaataaatgcttcttcagaaatg

SEQ ID NO: 416771 - DNA, 934 bp, Homo sapiens
ggctcagctgggaggcgggacgaattattggttgggggaaacccacgaggggacgcggccgaggagggtcgctgtccacccgggggcgtgggagtgaggtaccagattcagcccatttggccccgacgcctctgttctcggaatccgggtgctgcggattgaggtcccggttcctaacggactgcaagatggaggaaggcgggaacctaggaggcctgattaagatggtccatctactggtcttgtcaggtgcctggggcatgcaaatgtgggtgaccttcgtctcaggcttcctgcttttccgaagccttccccgacataccttcggactagtgcagagcaaactcttccccttctacttccacatctccatgggctgtgccttcatcaacctctgcatcttggcttcacagcatgcttgggctcagctcacattctgggaggccagccagctttacctgctgttcctgagccttacgctggccactgtcaacgcccgctggctggaaccccgcaccacagctgccatgtgggccctgcaaaccgtggagaaggagcgaggcctgggtggggaggtaccaggcagccaccagggtcccgatccctaccgccagctgcgagagaaggaccccaagtacagtgctctccgccagaatttcttccgctaccatgggctgtcctctctttgcaatctgggctgcgtcctgagcaatgggctctgtctcgctggccttgccctggaaataaggagcctctagcatgggccctgcatgctaataaatgcttcttcagaaatgaaaaagaaaaaaaaaaatcggggttctttgccggggggggaaaagggtttgaaagggccgtgcctttgttccggcccctttttgtcaaggggaatcggccggcccaaggggggtaaatgaaaccgacgagttgcaac

SEQ ID NO: 416772 - DNA, 815 bp, Homo sapiens
ggctcagctgggaggcgggacgaattattggttgggggaaacccacgaggggacgcggccgaggagggtcgctgtccacccgggggcgtgggagtgaggtaccagattcagcccatttggccccgacgcctctgttctcggaatccgggtgctgcggattgaggtcccggttcctaacgaatctctgctggattggccgtaaccctgtccccgagcgggctcacagggtctgaaggccacgcatgaggcaaaggtaaagttctgagccacccggtgcctccttcccaggactgcaagatggaggaaggcgggaacctaggaggcctgattaagatggtccatctactggtcttgtcaggtgcctggggcatgcaaatgtgggtgaccttcgtctcaggcttcctgcttttccgaagccttccccgacataccttcggactagtgcagagcaaactcttccccttctacttccacatctccatgggctgtgccttcatcaacctctgcatcttggcttcacagcatgcttgggctcagctcacattctgggaggccagccagctttacctgctgttcctgagccttacgctggccactgtcaacgcccgctggctggaaccccgcaccacagctgccatgtgggccctgcaaaccgtggagaaggagcgaggcctgggtggggaggtaccaggcagccaccagggtcccgatccctaccgccagctgcgagagaaggaccccaagtacaggggccccggcatcttccggaacaaggggggcccccttggccggggggcccggccggggccgtcccg

SEQ ID NO: 416773 - DNA, 666 bp, Homo sapiens
ggctcagctgggaggcgggacgaattattggttgggggaaacccacgaggggacgcggccgaggagggtcgctgtccacccgggggcgtgggagtgaggtaccagattcagcccatttggccccgacgcctctgttctcggaatccgggtgctgcggattgaggtcccggttcctaacggactgcaagatggaggaaggcgggaacctaggaggcctgattaagatggtccatctactggtcttgtcaggtgcctggggcatgcaaatgtgggtgaccttcgtctcaggcttcctgcttttccgaagccttccccgacataccttcggactagtgcagagcaaactcttccccttctacttccacatctccatgggctgtgccttcatcaacctctgcatcttggcttcacagcatgcttgggctcagctcacattctgggaggccagccagctttacctgctgttcctgagccttacgctggccactgtcaacgcccgctggctggaaccccgcaccacagctgccatgtgggccctgcaaaccgtggagaaggagcgaggcctgggtggggaggtaccaggccatccccacccaggggggtgcgggaatccccctaccccgccaagttttgtaaaaaaaaaagggaaccccccaatttcccaaa

SEQ ID NO: 416774 - DNA, 371 bp, Homo sapiens
ccctcagtctgggttcaaggaaagagggggaggcaggttttttgatccagtgctgtccccacccccacccctgtgctgttgaggatgcagaaagaccctccctagggcccctctggcctcccaggcatggctcaccttctcctctgctctccctgccagctttacctgctgttcctgagccttacgctggccactgtcaacgcccgttctctctccacaccaccccccaaaaatttttgccgctccaacacttcaacactattttgttttatttgtcttattaatataagaaggcaggaatgtcaggcctctgagcccaggccaggccatcacatcccctgtgacttgcacgtatacatccagatggcctg

SEQ ID NO: 416775 - DNA, 1399 bp, Homo sapiens
ggctcagctgggaggcgggacgaattattggttgggggaaacccacgaggggacgcggccgaggagggtcgctgtccacccgggggcgtgggagtgaggtaccagattcagcccatttggccccgacgcctctgttctcggaatccgggtgctgcggattgaggtcccggttcctaacggtgggatcggtgtcctcgggatgagatttggcgtttcctcggggctttggtgggatcggtgtcctcaggatgagatttagggtttcctcggggctttcgggatcttcacctaatatccggtattattttatgagaggagtggtcttggctgtcagaactggatccctggggtgatatttgggaattagtggagtgatctctgaagacctagggctatgatctggagctgctgtggctgaaatttggggcctctgaagtggcatggagattgaggtccagagagcctgagatcttgagggctgacatttggagagatggggtcgagggttgtctttgggccttgactgctttgggcctttctcactctcattcccgggatgctttgccagaatctctgctggattggccgtaaccctgtccccgagcgggctcacagggtctgaaggccacgcatgaggcaaaggtaaagttctgagccacccggtgcctccttcccaggactgcaagatggaggaaggcgggaacctaggaggcctgattaagatggtccatctactggtcttgtcaggtgcctggggcatgcaaatgtgggtgaccttcgtctcaggtagggaccctcagcttggatgtcatgggtacctggggtggggatggaaataagaggggaaccgggaagtgccctaacacccctgtggtccccataccctgcaggcttcctgcttttccgaagccttccccgacataccttcggactagtgcagagcaaactcttccccttctacttccacatctccatgggctgtgccttcatcaacctctgcatcttggcttcacagcatgcttgggctcagctcacattctgggaggccagccagctttacctgctgttcctgagccttacgctggccactgtcaacgcccgctggctggaaccccgcaccacagctgccatgtgggccctgcaaaccgtggagaaggagcgaggcctgggtggggaggtaccaggcagccaccagggtcccgatccctaccgccagctgcgagagaaggaccccaagtacagtgctctccgccagaatttcttccgctaccatgggctgtcctctctttgcaatctgggctgcgtcctgagcaatgggctctgtctcgctggccttgccctggaaataaggagcctctagcatgggccctgcatgctaataaatgcttcttcagaaatg

SEQ ID NO: 416776 - DNA, 1089 bp, Homo sapiens
  misc_feature (859)..(859): n is a, c, g, or t
  misc_feature (928)..(928): n is a, c, g, or t
ggctcagctgggaggcgggacgaattattggttgggggaaacccacgaggggacgcggccgaggagggtcgctgtccacccgggggcgtgggagtgaggtaccagattcagcccatttggccccgacgcctctgttctcggaatccgggtgctgcggattgaggtcccggttcctaacggactgcaagatggaggaaggcgggaacctaggaggcctgattaagatggtccatctactggtcttgtcaggtgcctggggcatgcaaatgtgggtgaccttcgtctcaggcttcctgcttttccgaagccttccccgacataccttcggactagtgcagagcaaactcttccccttctacttccacatctccatgggctgtgccttcatcaacctctgcatcttggcttcacagcatgcttgggctcagctcacattctgggaggccagccagctttacctgctgttcctgagccttacgctggccactgtcaacgcccgctggctggaaccccgcaccacagctgccatgtgggccctgcaaaccgtggagaaggagcgaggcctgggtggggaggtaccaggcagccaccagggtcccgatccctaccgccagctgcgagagaaggaccccaagtacagtgctctccgccagaatttcttccgctaccatgggctgtcctctctttgcaatctgggctgcgtcctgagcaatgggctctgtctcgctggccttgccctggaaataaggagcctctagcatgggccctgcatgctaataaatgcttcttcagaaatgcgagcaatactgtaagaacaaagcatgatcttggtactgggatattttaaatatccacagtnctcactttttccaaatgatcctagtaattgcctagaaatatctttctcttacctgttatttatcaattnttcccagtatttttatacggaaaaaattgtcttgaaaacacttagtatgcagttgataagaggaattcggtataattatggggggtgattattttttatactggatgggccaaagctttactactggggaaagccaactgttttaaaaaagattacattcc

SEQ ID NO: 416777 - DNA, 780 bp, Homo sapiens
ggctcagctgggaggcgggacgaattattggttgggggaaacccacgaggggacgcggccgaggagggtcgctgtccacccgggggcgtgggagtgaggtaccagattcagcccatttggccccgacgcctctgttctcggaatccgggtgctgcggattgaggtcccggttcctaacggactgcaagatggaggaaggcgggaacctaggaggcctgattaagatggtccatctactggtcttgtcaggtgcctggggcatgcaaatgtgggtgaccttcgtctcaggcttcctgcttttccgaagccttccccgacataccttcggactagtgcagagcaaactcttccccttctacttccacatctccatgggctgtgccttcatcaacctctgcatcttggcttcacagcatgcttgggctcagctcacattctgggaggccagccagctttacctgctgttcctgagccttacgctggccactgtcaacgcccgctggctggaaccccgcaccacagctgccatgtgggccctgcaaaccgtggagaaggagcgaggcctgggtggggaggtaccaggcagccaccagggtcccgatccctaccgccagctgcgagagaaggaccccaagtacagtcttccgctaccatgggctgtcctctctttgcaatctgggctgcgtcctgagcaatgggctctgtctcgctggccttgccctggaaataaggagcctctagcatgggccctgcatgctaataaatgcttcttcagaaatg

SEQ ID NO: 416778 - DNA, 842 bp, Homo sapiens
ggctcagctgggaggcgggacgaattattggttgggggaaacccacgaggggacgcggccgaggagggtcgctgtccacccgggggcgtgggagtgaggtaccagattcagcccatttggccccgacgcctctgttctcggaatccgggtgctgcggattgaggtcccggttcctaacgaatctctgctggattggccgtaaccctgtccccgagcgggctcacagggtctgaaggccacgcatgaggcaaaggtaaagttctgagccacccggtgcctccttcccaggactgcaagatggaggaaggcgggaacctaggaggcctgattaagatggtccatctactggtcttgtcaggtgcctggggcatgcaaatgtgggtgaccttcgtctcaggcttcctgcttttccgaagccttccccgacataccttcggactagtgcagagcaaactcttccccttctacttccacatctccatgggctgtgccttcatcaacctctgcatcttggcttcacagcatgcttgggctcagctcacattctgggaggccagccagctttacctgctgttcctgagccttacgctggccactgtcaacgcccgctgggtggggaggtaccaggcagccaccagggtcccgatccctaccgccagctgcgagagaaggaccccaagtacagtgctctccgccagaatttcttccgctaccatgggctgtcctctctttgcaatctgggctgcgtcctgagcaatgggctctgtctcgctggccttgccctggaaataaggagcctctagcatgggccctgcatgctaataaatgcttcttcagaaatg

SEQ ID NO: 416779 - DNA, 410 bp, Homo sapiens
cactcgcgatagcgccctgctcccattttctctctcgaactgtctctttctcattcctttgactccgctggacttgccgcccccgtgacctggtgttgggtctcatcatcccaacagattcccattctaaagatgagggaaccaagaggtggaagttcatgccgtggaggaagtggtgaaggaggtggtgggacatgccaaggagactggagagaaagccattgctgaagccataaagaaagcccaggagtcaggggacaaaaagatgaaggaaatcaccgagacagtgaccaacacagtcacaaatgccatcacccatgcagcaaaaagtctggacaaacttggacagtgagtgcacctgctaccacggcccttccccagtctcaataaaaagccatgacatgtgtaaa

SEQ ID NO: 416780 - DNA, 1865 bp, Homo sapiens
  misc_feature (8)..(8): n is a, c, g, or t
ggcagagncgggggcgagggggcggcaggcaggtgtagcgctgccctgggagggcttgcacccccacacccaagtgagcggcctgctcactcctcagctgcaggagccagacgtgtggagtcccagcagaggccaacctgtgtctcttcatctccgtgagaaaggtgcccccgaagtgaaagagatggcctggtggaaagcctggattgaacaggagggtgtcacagtgaagagcagctcccacttcaacccagaccctgatgcagagaccctctacaaagccatgaaggggatcggtgtcgggtcccaactgctcagccaccaagcagctgccttcgccttcccctcctccgccctcaccagtgtgtcaccctgggggcagcagggtcacttgtgctgtaaccctgcagggaccaacgagcaggctatcatcgatgtgctcaccaagagaagcaacacgcagcggcagcagatcgccaagtccttcaaggctcagttcggcaaggacctcactgagaccttgaagtctgagctcagtggcaagtttgagaggctcattgtggcccttatgtatccgccatacagatacgaagccaaggagctgcatgacgccatgaagggcagcagggatgatgtgagcagctttgtggacccggcactggccctccaagacgcacaggatctgtatgcggcaggcgagaagattcgtgggactgatgagatgaaattcatcaccatcctgtgcacgcgcagtgccactcacctgctgagagtgaaatgcacccaaaacctccacagctactttgcagagagactctactatgccatgaagggagcagggacgcgtgatgggaccctgataagaaacatcgtttcaaggagcgagattgacttaaatcttatcaaatgtcacttcaagaagatgtacggcaagaccctcagcagcatgatcatggaagacaccagcggcgactacaagaacgccctgctgagcctggtgggcagcgacccctgaggcacagaagaacaagagcaaagaccatgaagccagagtctccaggactcctcactcaacctcggccatggacgcaggttgggtgtgaggggggtcccagcctttcggtcttctatttccctatttccagtgctttccagccgggtttctgacccagaggtggaaccggcctggactcctcttcccaacttcctccaggtcatttcccagtgtgagcacaatgccaaccttagtgtttctccagccagacagatgcctcagcatgaagggcttggggacttgtggatcattccttcctccctgcaggagcttcccaagctggtcacagagtctcctgggcacaggttatacagaccccagccccattcccatctactgaaacagggtctccacaagaggggccagggaatatgggtttttaacaagcgtcttacaaaacacttctctatcatgcagccggagagctggctgggagcccttttgttttagaacacacatccttcagcagctgagaaatgaacacgaatccatcccaaccgagatgccattaacattcatctaaaaatgttaggctctaaatggacgaaaaattctctcgccatcttaataacaaaataaactacaaattcctgacccaaggacactgtgttataagaggcgtgggctcccctggtggctgaccaggtcagctgccctggccttgcacccctctgcatgcagcacagaagggtgtgaccatgccctcagcaccactcttgtccccactgaacggcaactgagactgggtacctggagattctgaagtgcctttgctgtggttttcaaaataataaagatttgtattcaactc

SEQ ID NO: 416781 - DNA, 1159 bp, Homo sapiens
cactcgcgatagcgccctgctcccattttctctctcgaactgtctctttctcattcctttgactccgctggacttgccgcccccgtgacctggtgttgggtctcatcatcccaacagattcccattctaaagatgagggaaccaagaggtggaagttcatgccgtggaggaagtggtgaaggaggtggtgggacatgccaaggagactggagagaaagctgcaggagccagacgtgtggagtcccagcagaggccaacctgtgtctcttcatctccgtgagaaaggtgcccccgaagtgaaagagatggcctggtggaaagcctgggccactgcatctctgtccctgtagcgaagagaagttactgattcctaagctcctactctgagaacacaaatatctgcaatacctcggtttcaaagccacttcaactgcactgggccctgtgggtcactgctgcaccgccctggaccatgtgggtccctgaggagcgacctgccggggccacctggctggacgaaaaagacacagctaggacttaagccgtgagaaaaaaagttcatcagtaagaaacaagtcaatagacaagtaaaagactaggagaaaatatgcataaaacataaaaaagtgacttgattcctgattctggagtattcaagaaattcctataactcaacacaaaagtgcagtccaccaaaatgagcacacaaggcctggggtaaactatgcacaaaggaacgtagacaaatggccagccacacacctgagaaagcggcatacccatccagcaaaactgcccaacaagccccaacctcaaggtactaccaagtgagtaacgcgacacagcacggcaaaccactcgcggacaactcgccaggctcgcacacacggaacacgcacacgactaccgccaatgacaccacccagcggaaggccaaccccgtgacggaataaacactccacagggcataacccgaaggcgtaccaccccccaacacctagccccaccctcgaacgcccgtcaacaccgcaggacaaccacacaagccccacaccccacaacaagagacaacaccggccactccccccacaaacaacaccaccaccgcagaacgtgaccccagcacaaccgcgcccacccacccaacagagaggcgacc

SEQ ID NO: 416782 - DNA, 619 bp, Homo sapiens
cactcgcgatagcgccctgctcccattttctctctcgaactgtctctttctcattcctttgactccgctggacttgccgcccccgtgacctggtgttgggtctcatcatcccaacagattcccattctaaagatgagggaaccaagaggtggaagttcatgccgtggaggaagtggtgaaggaggtggtgggacatgccaaggagactggagagaaagctgcaggagccagacgtgtggagtcccagcagaggccaacctgtgtctcttcatctccgtgagaaaggtgcccccgaagtgaaagagatggcctggtggaaagcctgggactcaggaattctcccactccggaatgccttgctgctggggtgaccaggtcttcacttgtgaaacaggagtcggccacctcagccctgcgcctggcctggtggaacatgggtcaccgccccaacctggggcagccgcccatcccaacgcagtgctgccgctctccatgcctccctgtgcccagctaaccgggggacttgtccctgggaaaaactgggtaccaggctgcctttggtttcagcccctactcctcttccgggctgcctgttctcccggacggcccctttcccggg

SEQ ID NO: 416783 - DNA, 504 bp, Homo sapiens
cactcgcgatagcgccctgctcccattttctctctcgaactgtctctttctcattcctttgactccgctggacttgccgcccccgtgacctggtgttgggtctcatcatcccaacagattcccattctaaagatgagggaaccaagaggtggaagttcatgccgtggaggaagtggtgaaggaggtggtgggacatgccaaggagactggagagaaagctgcaggagccagacgtgtggagtcccagcagaggccaacctgtgtctcttcatctccgtgagaaaggtgcccccgaagtgaaagagatggcctggtggaaagcctgggtaagtgggagctggcaggagatttgggttcctgcatggtgttgggtgctggtcaccagggagtcctggactgggagggcagcggctctgctctgaaccctcaccctggactcgggggcagccggcctgctctgagccctcaccctggacttgtcttctctgttcagttcatgccgtg

SEQ ID NO: 416784 - DNA, 2139 bp, Homo sapiens
cactcgcgatagcgccctgctcccattttctctctcgaactgtctctttctcattcctttgactccgctggacttgccgcccccgtgacctggtgttgggtctcatcatcccaacagattcccattctaaagatgagggaaccaagaggtggaagttcatgccgtggaggaagtggtgaaggaggtggtgggacatgccaaggagactggagagaaagctgcaggagccagacgtgtggagtcccagcagaggccaacctgtgtctcttcatctccgtgagaaaggtgcccccgaagtgaaagagatggcctggtggaaagcctggattgaacaggagggtgtcacagtgaagagcagctcccacttcaacccagaccctgatgcagagaccctctacaaagccatgaaggggatcgggaccaacgagcaggctatcatcgatgtgctcaccaagagaagcaacacgcagcggcagcagatcgccaagtccttcaaggctcagttcggcaaggacctcactgagaccttgaagtctgagctcagtggcaagtttgagaggctcattgtggcccttatgtatccgccatacagatacgaagccaaggagctgcatgacgccatgaagggcttaggaaccaaggagggtgtcatcattgagatcctggcctctcggaccaagaaccagctgcgggagataatgaaggcgtatgaggaagactatgggtccagcctggaggaggacatccaagcagacacaagtggctacctggagaggatcctggtgtgcctcctgcagggcagcagggatgatgtgagcagctttgtggacccggcactggccctccaagacgcacaggatctgtatgcggcaggcgagaagattcgtgggactgatgagatgaaattcatcaccatcctgtgcacgcgcagtgccactcacctgctgagagtgtttgaagagtatgagaaaattgccaacaagagcattgaggacagcatcaagagtgagacccatggctcactggaggaggccatgctcactgtggtgaaatgcacccaaaacctccacagctactttgcagagagactctactatgccatgaagggagcagggacgcgtgatgggaccctgataagaaacatcgtttcaaggagcgagattgacttaaatcttatcaaatgtcacttcaagaagatgtacggcaagaccctcagcagcatgatcatggaagacaccagcggcgactacaagaacgccctgctgagcctggtgggcagcgacccctgaggcacagaagaacaagagcaaagaccatgaagccagagtctccaggactcctcactcaacctcggccatggacgcaggttgggtgtgaggggggtcccagcctttcggtcttctatttccctatttccagtgctttccagccgggtttctgacccagaggtggaaccggcctggactcctcttcccaacttcctccaggtcatttcccagtgtgagcacaatgccaaccttagtgtttctccagccagacagatgcctcagcatgaagggcttggggacttgtggatcattccttcctccctgcaggagcttcccaagctggtcacagagtctcctgggcacaggttatacagaccccagccccattcccatctactgaaacagggtctccacaagaggggccagggaatatgggtttttaacaagcgtcttacaaaacacttctctatcatgcagccggagagctggctgggagcccttttgttttagaacacacatccttcagcagctgagaaatgaacacgaatccatcccaaccgagatgccattaacattcatctaaaaatgttaggctctaaatggacgaaaaattctctcgccatcttaataacaaaataaactacaaattcctgacccaaggacactgtgttataagaggcgtgggctcccctggtggctgaccaggtcagctgccctggccttgcacccctctgcatgcagcacagaagggtgtgaccatgccctcagcaccactcttgtccccactgaacggcaactgagactgggtacctggagattctgaagtgcctttgctgtggttttcaaaataataaagatttgtattcaactc

SEQ ID NO: 416785 - DNA, 990 bp, Homo sapiens
agcagcttagatctgtcttccacagagaaggtggcttttacagagaaattgacatactcatcacttatctgacatgacccagctttgtaaaactggcttctattaaaatagtcttaatagactattcactgaggaggagagaatcttattcactctttacattctcttcacattttcagaatagatgtttaaatcattgctcacactggatccataaatgtctaaaatgttgatgaagaaataggtgattagagagtaaaattaatagagacttacccttccttgcattttaacataatattctttccccttttccttcctctgttacttggctcttaaataccagaagtgagatatgaaaaagggaactggggacaagtattgaaagcaccataggtttatcttatattagcattttccaaactttataatgaaccagcagtgacccacacatctgccaggtaggaattgctcatcagttgtgtcgcgttatcttgttaagcttcagcaatgttccatacagccactaataacagatcaaagtgagcattagggttgaaattagtaagctgtttcttctcagttctttctggtagttgaataaatatagaatgtattaaatagttttctttatttcagaacttctcagagtctgtaatatattgtatggtggtagcttaggaggaagatgcaataggaaacttttcccagataggttcactattttctttttccacgaaaaataagctgttctcaaaatacagtttacaaaattttatccttaactcttcactctttctcctagttagggagaccgctccaccagtagaaaagataaaccctggtaatttgttgtgtaaatgggataaatagcctagtacctagtcatgtggattcaggcagcactgagcctaaattaaagtttgcaaggtatacatgttaatgtatctaagttactatatttagcctgtttcttaagtatgtttcaga

SEQ ID NO: 416786 - DNA, 1045 bp, Homo sapiens
ggtagaaccctgcctaatcatatggttctggatggcattgatcgaatccttattctttcattaggaataacaatagaaaaaatactcctgccctactgatttcaggatatgtctattttaaagtgcccatttgacaaaaccattatcagggccatgttttctttttctgcagaaaaatcaaccactctggtcagtagttaggtcttatgacaagcaccataatttccttaggcagagtagaatataataggatacttctttttgaaacataaatgtctaaaatgttgatgaagaaataggtgattagagagtaaaattaatagagacttacccttccttgcattttaacataatattctttccccttttccttcctctgttacttggctcttaaataccagaagtgagatatgaaaaagggaactggggacaagtattgaaagcaccataggtttatcttatattagcattttccaaactttataatgaaccagcagtgacccacacatctgccaggtaggaattgctcatcagttgtgtcgcgttatcttgttaagcttcagcaatgttccatacagccactaataacagatcaaagtgagcattagggttgaaattagtaagctgtttcttctcagttctttctggtagttgaataaatatagaatgtattaaatagttttctttatttcagaacttctcagagtctgtaatatattgtatggtggtagcttaggaggaagatgcaataggaaacttttcccagataggttcactattttctttttccacgaaaaataagctgttctcaaaatacagtttacaaaattttatccttaactcttcactctttctcctagttagggagaccgctccaccagtagaaaagataaaccctggtaatttgttgtgtaaatgggataaatagcctagtacctagtcatgtggattcaggcagcactgagcctaaattaaagtttgcaaggtatacatgttaatgtatctaagttactatatttagcctgtttcttaagtatgtttcaga

SEQ ID NO: 416787 - DNA, 1458 bp, Homo sapiens
ttccgcctgcaccaggcgcttccgccaccatggcttcacgtggggttgttggcattttcttcctctctgctgtcccccttgtgtgtctggagctccggcgtgggatcccggatataggaatcaaggattttcttttgctttgtggccggattttgctactgcttgctcttcttactttaattatttctgtgactacctcatggcttaactcatttaaatctccccaagtttatctgaaggaagaagaagaaaagaatgagaaaagacaaaaacttgtgagaaaaaaacaacaagaagcacaaggagagaaggccagcagatacatagagaatgttttaaaacctcaccaggaaatgaaattgagaaaactggaggagcgcttttatcaaatgacgggtgaagcctggaaattaagcagtggtcacaaacttgggggtgatgaaggtacaagtcagacatcttttgaaacatcaaacagagaagcagcaaagagccagaacttgcctaaacctttaactgaatttccgtctcctgctgaacagcccacatgcaaggagattcctgatttacctgaagaaccttctcaaacagcagaagaagtagttactgttgctctccgatgtcccagtgggaatgtcctgaggagaaggtttttgaagtcctacagctcacaggtcttatttgactggatgacgagaattgggtaccacatatctctatacagcctttctacttcctttcccagacggcctctggcagtggagggaggccagtcgctggaggacataggaataactgtggacactgtactcatcctggaggagaaggagcagaccaactaggaaagaagggagagctccctgtttgcatgaagtcagttatgctatgaccttctggcacaataaaggcttcactttcaaatcacaccataccttgattgagctcatggcagtaaactttgaacattgatatccatgggaataggattagaaaaggattgctttctatatataataatctgtggactgtgccattttacagtgtaccaaatgagaatgaggttgaaatgtatgcagtaaggtactcagtaattaattggtattttttcccagctgacatgatttctcagtgttagaaaacaaacccttagaactttcctttctgcctcttcaatccatcttaccacacaatatttcatgattcaaattcttcaaagtcttatacgcaggaatgtttattctgctgtatttctgtgaaattaaaaacttggaagaagcttcaaagctcttggaggctttaaagttctttctgttgggtgtgcattacagtttacttaactgatgtttgcgatttatataattttgccttgtattaaatgttacaaagttccaaatgaatcagtattttaaaaaataaaactatgaaagcattaaaatataggtgaatttttaaaaaaaa

SEQ ID NO: 416788 - DNA, 461 bp, Homo sapiens
caggctattctcccacttcaacctcccaagtagctgggactagaggcgtgcacccacatctagctaatttttctattttttatggcggggggtgtctcaaactcctggcctcaagtggtctgcctgtctcagcctcccaaagtcctgggattacaggcgtgagccaccaccatgccctacctatgtcttttaataattagcaaagcagtatctaagtcctttttagctgcttagctgttttatggaatgaaaggaattgcaaagagcaatggatcggagttcttatgtgaatatttcttccttaggtagttactgttgctctccgatgtcccagtgggaatgtcctgaggagaaggtttttgaagtcctacagctcacaggtaagtgaaggaattcacattttgagaaatatctttgttgaatatggcagtagtttattcacatgccgtgggggaaggtgt

SEQ ID NO: 416789 - DNA, 1641 bp, Homo sapiens
ttccgcctgcaccaggcgcttccgccaccatggcttcacgtggggttgttggcattttcttcctctctgctgtcccccttgtgtgtctggagctccggcgtgggatcccggatataggtaagtgtgactttttcccttcgacagtcacagctgggtaattttcacaggaatgttgcatagaacgaccgcctcttcggctgcgtggcttcggagcagctttgactacaactcccagactgcatcgcccctgcccccccacttccggagctgacttcacttcgaggaaccttttccctccaggaatcaaggattttcttttgctttgtggccggattttgctactgcttgctcttcttactttaattatttctgtgactacctcatggcttaactcatttaaatctccccaagtttatctgaaggaagaagaagaaaagaatgagaaaagacaaaaacttgtgagaaaaaaacaacaagaagcacaaggagagaaggccagcagatacatagagaatgttttaaaacctcaccaggaaatgaaattgagaaaactggaggagcgcttttatcaaatgacgggtgaagcctggaaattaagcagtggtcacaaacttgggggtgatgaaggtacaagtcagacatcttttgaaacatcaaacagagaagcagcaaagagccagaacttgcctaaacctttaactgaatttccgtctcctgctgaacagcccacatgcaaggagattcctgatttacctgaagaaccttctcaaacagcagaagaagtagttactgttgctctccgatgtcccagtgggaatgtcctgaggagaaggtttttgaagtcctacagctcacaggtcttatttgactggatgacgagaattgggtaccacatatctctatacagcctttctacttcctttcccagacggcctctggcagtggagggaggccagtcgctggaggacataggaataactgtggacactgtactcatcctggaggagaaggagcagaccaactaggaaagaagggagagctccctgtttgcatgaagtcagttatgctatgaccttctggcacaataaaggcttcactttcaaatcacaccataccttgattgagctcatggcagtaaactttgaacattgatatccatgggaataggattagaaaaggattgctttctatatataataatctgtggactgtgccattttacagtgtaccaaatgagaatgaggttgaaatgtatgcagtaaggtactcagtaattaattggtattttttcccagctgacatgatttctcagtgttagaaaacaaacccttagaactttcctttctgcctcttcaatccatcttaccacacaatatttcatgattcaaattcttcaaagtcttatacgcaggaatgtttattctgctgtatttctgtgaaattaaaaacttggaagaagcttcaaagctcttggaggctttaaagttctttctgttgggtgtgcattacagtttacttaactgatgtttgcgatttatataattttgccttgtattaaatgttacaaagttccaaatgaatcagtattttaaaaaataaaactatgaaagcattaaaatataggtgaatttttaaaaaaaa

SEQ ID NO: 416790 - DNA, 1518 bp, Homo sapiens
ttccgcctgcaccaggcgcttccgccaccatggcttcacgtggggttgttggcattttcttcctctctgctgtcccccttgtgtgtctggagctccggcgtgggatcccggatataggtaagtgtgactttttcccttcgacagtcacagctgggtaattttcacaggaatgttgcatagaacgaccgcctcttcggctgcgtggcttcggagcagctttgactacaactcccagactgcatcgcccctgcccccccacttccggagctgacttcacttcgaggaaccttttccctccaggaatcaaggattttcttttgctttgtggccggattttgctactgcttgctcttcttactttaattatttctgtgactacctcatggcttaactcatttaaatctccccaagtttatctgaaggaagaagaagaaaagaatgagaaaagacaaaaacttgtgagaaaaaaacaacaagaagcacaaggagagaagggtgatgaaggtacaagtcagacatcttttgaaacatcaaacagagaagcagcaaagagccagaacttgcctaaacctttaactgaatttccgtctcctgctgaacagcccacatgcaaggagattcctgatttacctgaagaaccttctcaaacagcagaagaagtagttactgttgctctccgatgtcccagtgggaatgtcctgaggagaaggtttttgaagtcctacagctcacaggtcttatttgactggatgacgagaattgggtaccacatatctctatacagcctttctacttcctttcccagacggcctctggcagtggagggaggccagtcgctggaggacataggaataactgtggacactgtactcatcctggaggagaaggagcagaccaactaggaaagaagggagagctccctgtttgcatgaagtcagttatgctatgaccttctggcacaataaaggcttcactttcaaatcacaccataccttgattgagctcatggcagtaaactttgaacattgatatccatgggaataggattagaaaaggattgctttctatatataataatctgtggactgtgccattttacagtgtaccaaatgagaatgaggttgaaatgtatgcagtaaggtactcagtaattaattggtattttttcccagctgacatgatttctcagtgttagaaaacaaacccttagaactttcctttctgcctcttcaatccatcttaccacacaatatttcatgattcaaattcttcaaagtcttatacgcaggaatgtttattctgctgtatttctgtgaaattaaaaacttggaagaagcttcaaagctcttggaggctttaaagttctttctgttgggtgtgcattacagtttacttaactgatgtttgcgatttatataattttgccttgtattaaatgttacaaagttccaaatgaatcagtattttaaaaaataaaactatgaaagcattaaaatataggtgaatttttaaaaaaaa

SEQ ID NO: 416791 - DNA, 1335 bp, Homo sapiens
ttccgcctgcaccaggcgcttccgccaccatggcttcacgtggggttgttggcattttcttcctctctgctgtcccccttgtgtgtctggagctccggcgtgggatcccggatataggaatcaaggattttcttttgctttgtggccggattttgctactgcttgctcttcttactttaattatttctgtgactacctcatggcttaactcatttaaatctccccaagtttatctgaaggaagaagaagaaaagaatgagaaaagacaaaaacttgtgagaaaaaaacaacaagaagcacaaggagagaagggtgatgaaggtacaagtcagacatcttttgaaacatcaaacagagaagcagcaaagagccagaacttgcctaaacctttaactgaatttccgtctcctgctgaacagcccacatgcaaggagattcctgatttacctgaagaaccttctcaaacagcagaagaagtagttactgttgctctccgatgtcccagtgggaatgtcctgaggagaaggtttttgaagtcctacagctcacaggtcttatttgactggatgacgagaattgggtaccacatatctctatacagcctttctacttcctttcccagacggcctctggcagtggagggaggccagtcgctggaggacataggaataactgtggacactgtactcatcctggaggagaaggagcagaccaactaggaaagaagggagagctccctgtttgcatgaagtcagttatgctatgaccttctggcacaataaaggcttcactttcaaatcacaccataccttgattgagctcatggcagtaaactttgaacattgatatccatgggaataggattagaaaaggattgctttctatatataataatctgtggactgtgccattttacagtgtaccaaatgagaatgaggttgaaatgtatgcagtaaggtactcagtaattaattggtattttttcccagctgacatgatttctcagtgttagaaaacaaacccttagaactttcctttctgcctcttcaatccatcttaccacacaatatttcatgattcaaattcttcaaagtcttatacgcaggaatgtttattctgctgtatttctgtgaaattaaaaacttggaagaagcttcaaagctcttggaggctttaaagttctttctgttgggtgtgcattacagtttacttaactgatgtttgcgatttatataattttgccttgtattaaatgttacaaagttccaaatgaatcagtattttaaaaaataaaactatgaaagcattaaaatataggtgaatttttaaaaaaaa

SEQ ID NO: 416792 - DNA, 1335 bp, Homo sapiens
ttccgcctgcaccaggcgcttccgccaccatggcttcacgtggggttgttggcattttcttcctctctgctgtcccccttgtgtgtctggagctccggcgtgggatcccggatatagaagaagaagaaaagaatgagaaaagacaaaaacttgtgagaaaaaaacaacaagaagcacaaggagagaaggccagcagatacatagagaatgttttaaaacctcaccaggaaatgaaattgagaaaactggaggagcgcttttatcaaatgacgggtgaagcctggaaattaagcagtggtcacaaacttgggggtgatgaaggtacaagtcagacatcttttgaaacatcaaacagagaagcagcaaagagccagaacttgcctaaacctttaactgaatttccgtctcctgctgaacagcccacatgcaaggagattcctgatttacctgaagaaccttctcaaacagcagaagaagtagttactgttgctctccgatgtcccagtgggaatgtcctgaggagaaggtttttgaagtcctacagctcacaggtcttatttgactggatgacgagaattgggtaccacatatctctatacagcctttctacttcctttcccagacggcctctggcagtggagggaggccagtcgctggaggacataggaataactgtggacactgtactcatcctggaggagaaggagcagaccaactaggaaagaagggagagctccctgtttgcatgaagtcagttatgctatgaccttctggcacaataaaggcttcactttcaaatcacaccataccttgattgagctcatggcagtaaactttgaacattgatatccatgggaataggattagaaaaggattgctttctatatataataatctgtggactgtgccattttacagtgtaccaaatgagaatgaggttgaaatgtatgcagtaaggtactcagtaattaattggtattttttcccagctgacatgatttctcagtgttagaaaacaaacccttagaactttcctttctgcctcttcaatccatcttaccacacaatatttcatgattcaaattcttcaaagtcttatacgcaggaatgtttattctgctgtatttctgtgaaattaaaaacttggaagaagcttcaaagctcttggaggctttaaagttctttctgttgggtgtgcattacagtttacttaactgatgtttgcgatttatataattttgccttgtattaaatgttacaaagttccaaatgaatcagtattttaaaaaataaaactatgaaagcattaaaatataggtgaatttttaaaaaaaa

SEQ ID NO: 416793 - DNA, 1164 bp, Homo sapiens
caggctattctcccacttcaacctcccaagtagctgggactagaggcgtgcacccacatctagctaatttttctattttttatggcggggggtgtctcaaactcctggcctcaagtggtctgcctgtctcagcctcccaaagtcctgggattacaggcgtgagccaccaccatgccctacctatgtcttttaataattagcaaagcagtatctaagtcctttttagctgcttagctgttttatggaatgaaaggaattgcaaagagcaatggatcggagttcttatgtgaatatttcttccttaggtagttactgttgctctccgatgtcccagtgggaatgtcctgaggagaaggtttttgaagtcctacagctcacaggtcttatttgactggatgacgagaattgggtaccacatatctctatacagcctttctacttcctttcccagacggcctctggcagtggagggaggccagtcgctggaggacataggaataactgtggacactgtactcatcctggaggagaaggagcagaccaactaggaaagaagggagagctccctgtttgcatgaagtcagttatgctatgaccttctggcacaataaaggcttcactttcaaatcacaccataccttgattgagctcatggcagtaaactttgaacattgatatccatgggaataggattagaaaaggattgctttctatatataataatctgtggactgtgccattttacagtgtaccaaatgagaatgaggttgaaatgtatgcagtaaggtactcagtaattaattggtattttttcccagctgacatgatttctcagtgttagaaaacaaacccttagaactttcctttctgcctcttcaatccatcttaccacacaatatttcatgattcaaattcttcaaagtcttatacgcaggaatgtttattctgctgtatttctgtgaaattaaaaacttggaagaagcttcaaagctcttggaggctttaaagttctttctgttgggtgtgcattacagtttacttaactgatgtttgcgatttatataattttgccttgtattaaatgttacaaagttccaaatgaatcagtattttaaaaaataaaactatgaaagcattaaaatataggtgaatttttaaaaaaaa

SEQ ID NO: 416794 - DNA, 1667 bp, Homo sapiens
ttccgcctgcaccaggcgcttccgccaccatggcttcacgtggggttgttggcattttcttcctctctgctgtcccccttgtgtgtctggagctccggcgtgggatcccggatataggtaagtgtgactttttcccttcgacagtcacagctgggtaattttcacaggaatgttgcatagaacgaccgcctcttcggctgcgtggcttcggagcagctttgactacaactcccagactgcatcgcccctgcccccccacttccggagctgacttcacttcgaggaaccttttccctccaggaatcaaggattttcttttgctttgtggccggattttgctactgcttgctcttcttactttaattatttctgtgactacctcatggcttaactcatttaaatctccccaagtttatctgaaggaagaagaagaaaagaatgagaaaagacaaaaacttgtgagaaaaaaacaacaagaagcacaaggagagaaggccagcagatacatagagaatgttttaaaacctcaccaggaaatgaaattgagaaaactggaggagcgcttttatcaaatgacgggtgaagcctggaaattaagcagtggtcacaaacttgggggtgatgaaggtacaagtcagacatcttttgaaacatcaaacagagaagcagcaaagagccagaacttgcctaaacctttaactgaatttccgtctcctgctgaacagcccacatgcaaggagattcctgatttacctgaagaaccttctcaaacagcagaagaagtagttactgttgctctccgatgtcccagtgggaatgtcctgaggagaaggtttttgaagtcctacagctcacaggtcttatttgactggatgacgagaattgggtaccacatatctctatacagcctttctacttcctttcccagacggcctctggcagtggagggaggccagtcgctggaggacataggaataactgtggacactgtactcatcctggaggagaaggagcagaccaactaggaaagaagggagagctccctgtttgcatgaagtcagttatgctatgaccttctggcacaataaaggcttcactttcaaatcacaccataccttgattgagctcatggcagtaaactttgaacattgatatccatgggaataggattagaaaaggattgctttctatatataataatctgtggactgtgccattttacagtgtaccaaatgagaatgaggttgaaatgtatgcagtaaggtactcagtaattaattggtattttttcccagctgacatgatttctcagtgttagaaaacaaacccttagaactttcctttctgcctcttcaatccatcttaccacacaatatttcatgattcaaattcttcaaagtcttatacgcaggaatgtttattctgctgtatttctgtgaaattaaaaacttggaagaagcttcaaagctcttggaggctttaaagttctttctgttgggtgtgcattacagtttacttaactgatgtttgcgatttatataattttgccttgtattaaatgttacaaagttccaaatgaatcagtattttaaaaaataaaactacgcaacgaaaaagttctcttctcgtctccgttaatgattacaaaaatgaacactaacccaaca

SEQ ID NO: 416795 - DNA, 1655 bp, Homo sapiens
ttccgcctgcaccaggcgcttccgccaccatggcttcacgtggggttgttggcattttcttcctctctgctgtcccccttgtgtgtctggagctccggcgtgggatcccggatataggtaagtgtgactttttcccttcgacagtcacagctgggtaattttcacaggaatgttgcatagaacgaccgcctcttcggctgcgtggcttcggagcagctttgactacaactcccagactgcatcgcccctgcccccccacttccggagctgacttcacttcgaggaaccttttccctccaggaatcaaggattttcttttgctttgtggccggattttgctactgcttgctcttcttactttaattatttctgtgactacctcatggcttaactcatttaaatctccccaagtttatctgaaggaagaagaagaaaagaatgagaaaagacaaaaacttgtgagaaaaaaacaacaagaagcacaaggagagaaggccagcagatacatagagaatgttttaaaacctcaccaggaaatgaaattgagaaaactggaggagcgcttttatcaaatgacgggtgaagcctggaaattaagcagtggtcacaaacttgggggtgatgaaggtacaagtcagacatcttttgaaacatcaaacagagaagcagcaaagagccagaacttgcctaaacctttaactgaatttccgtctcctgctgaacagcccacatgcaaggagattcctgatttacctgaagaaccttctcaaacagcagaagaagtagttactgttgctctccgatgtcccagtgggaatgtcctgaggagaaggtttttgaagtcctacagctcacaggtcttatttgactggatgacgagaattgggtaccacatatctctatacagcctttctacttcctttcccagacggcctctggcagtggagggaggccagtcgctggaggacataggaataactgtggacactgtactcatcctggaggagaaggagcagaccaactaggaaagaagggagagctccctgtttgcatgaagtcagttatgctatgaccttctggcacaataaaggcttcactttcaaatcacaccataccttgattgagctcatggcagtaaactttgaacattgatatccatgggaataggattagaaaaggattgctttctatatataataatctgtggactgtgccattttacagtgtaccaaatgagaatgaggttgaaatgtatgcagtaaggtactcagtaattaattggtattttttcccagctgacatgatttctcagtgttagaaaacaaacccttagaactttcctttctgcctcttcaatccatcttaccacacaatatttcatgattcaaattcttcaaagtcttatacgcaggaatgtttattctgctgtatttctgtgaaattaaaaacttggaagaagcttcaaagctcttggaggctttaaagttctttctgttgggtgtgcattacagtttacttaactgatgtttgcgatttatataattttgccttgtattaaatgttacaaagttccaaatgaatcagtattttaaaaaataaaactatgcggccgacacgacgcacgtacgtgacccacaggaacacatggtgaccgc

SEQ ID NO: 416796 - DNA, 1648 bp, Homo sapiens
ttccgcctgcaccaggcgcttccgccaccatggcttcacgtggggttgttggcattttcttcctctctgctgtcccccttgtgtgtctggagctccggcgtgggatcccggatataggtaagtgtgactttttcccttcgacagtcacagctgggtaattttcacaggaatgttgcatagaacgaccgcctcttcggctgcgtggcttcggagcagctttgactacaactcccagactgcatcgcccctgcccccccacttccggagctgacttcacttcgaggaaccttttccctccaggaatcaaggattttcttttgctttgtggccggattttgctactgcttgctcttcttactttaattatttctgtgactacctcatggcttaactcatttaaatctccccaagtttatctgaaggaagaagaagaaaagaatgagaaaagacaaaaacttgtgagaaaaaaacaacaagaagcacaaggagagaaggccagcagatacatagagaatgttttaaaacctcaccaggaaatgaaattgagaaaactggaggagcgcttttatcaaatgacgggtgaagcctggaaattaagcagtggtcacaaacttgggggtgatgaaggtacaagtcagacatcttttgaaacatcaaacagagaagcagcaaagagccagaacttgcctaaacctttaactgaatttccgtctcctgctgaacagcccacatgcaaggagattcctgatttacctgaagaaccttctcaaacagcagaagaagtagttactgttgctctccgatgtcccagtgggaatgtcctgaggagaaggtttttgaagtcctacagctcacaggtcttatttgactggatgacgagaattgggtaccacatatctctatacagcctttctacttcctttcccagacggcctctggcagtggagggaggccagtcgctggaggacataggaataactgtggacactgtactcatcctggaggagaaggagcagaccaactaggaaagaagggagagctccctgtttgcatgaagtcagttatgctatgaccttctggcacaataaaggcttcactttcaaatcacaccataccttgattgagctcatggcagtaaactttgaacattgatatccatgggaataggattagaaaaggattgctttctatatataataatctgtggactgtgccattttacagtgtaccaaatgagaatgaggttgaaatgtatgcagtaaggtactcagtaattaattggtattttttcccagctgacatgatttctcagtgttagaaaacaaacccttagaactttcctttctgcctcttcaatccatcttaccacacaatatttcatgattcacagcattccacctctcacgcctcccgcatgccccccctctcgtctctctcctcggcgacccccgagccgccccacaccccacacctctctccggacgctttaaagttctttctgttgggtgtgcattacagtttacttaactgatgtttgcgatttatataattttgccttgtattaaatgttacaaagttccaaatgaatcagtattttaaaaaataaaactatgaaagcattaaaatataggtgaatttttaaaaaaaa

SEQ ID NO: 416797 - DNA, 866 bp, Homo sapiens
ttccgcctgcaccaggcgcttccgccaccatggcttcacgtggggttgttggcattttcttcctctctgctgtcccccttgtgtgtctggagctccggcgtgggatcccggatataggtaagtgtgactttttcccttcgacagtcacagctgggtaattttcacaggaatgttgcatagaacgaccgcctcttcggctgcgtggcttcggagcagctttgactacaactcccagactgcatcgcccctgcccccccacttccggagctgacttcacttcgaggaaccttttccctccaggaatcaaggattttcttttgctttgtggccggattttgctactgcttgctcttcttactttaattatttctgtgactacctcatggcttaactcatttaaatctccccaagtttatctgaaggaagaagaagaaaagaatgagaaaagacaaaaacttgtgagaaaaaaacaacaagaagcacaaggagagaaggccagcagatacatagagaatgttttaaaacctcaccaggaaatgaaattgagaaaactggaggagcgcttttatcaaatgacgggtgaagcctggaaattaagcagtggtcacaaacttggggctgagtctcactctgtcgcccaagttggagtgcaatggcaccatctcagctcaatgcaacctctgcctctcaggttcaagcaattcttctgcctcagctaatttttgtttttgagacagagtctctctccatcgcccaggctggagtgcagtggtgcgatctcagcttactgcaacctccgcctcctaggctcaagtgattttcctgcctcagtctcccacgtagctgggattacaggtaactgccac

SEQ ID NO: 416798 - DNA, 351 bp, Homo sapiens
cctaatttgttgttttcaacaggccagcagatacatagagaatgttttaaaacctcaccaggaaatgaaattgagaaaactggaggagcgcttttatcaaatgacgggtgaagcctggaaattaagcagtggtcacaaacttggggttggaaaatattctcattttatattttgaatcctcttactatgtttcctattacatgattgatttttaattgaaaatgatgttagactgcttttaggagtttttattgataatgattatcagtttttgttcagcatacttgtttattacatggttaaggggttggtcgttttttttttttttttgagatggagtcttgctttgtt

SEQ ID NO: 416799 - DNA, 320 bp, Homo sapiens
cctaatatgagtgactgctgcttcctcggcagtcagccttagcctcggtctagtcctccctctttctaaataagactgatgaagacacccagtcagaattacccccacttcctggcagcatccaattctgaacaaagctccagatctgtaaatgctccccaaaccacctatcaccagcccaaagcctataataggttctttttaacacccccttacagagacgcctgaaacttccctatggtatgaaggagtgacaacaatgtttgttcaaccccaggtggactcctggtggcctttttctggaggacattggccaaatg

SEQ ID NO: 416800 - DNA, 105 bp, Homo sapiens
gaaaaccaagttctcttcctcaaagaggtttcctcaagtcagaaccctcaaagttgcatgtgcggaccacattcgcttgtcctaggaagaatcactttccaccag

SEQ ID NO: 416801 - DNA, 342 bp, Homo sapiens
cttgcttgatttttccctgtgtgtcagagaatgtgcacattgaaagagagggagctctccatcaccaagagagcccaaaaatagcccaactgatcatagccattgtaaaaatattcatggatgtaaggaaagatcctttcccagtctgatgctccttgacttgtgatttgctaaatttgagaagccatcacttacacaacctgttttatagacaaatccttccagtttcagaagaaaaaatgtcatctatctcaacctccatctctttttcaaacttcgatagatgagaagaaaatggtgaataaatttttagaatcagttttgcaagattggtttcaagga

SEQ ID NO: 416802 - DNA, 936 bp, Homo sapiens
cctggagctgcacctgcttctgggcggacgcacttggcgcgcggcgcgggctgcagacggctgcgaggcgctgggcacagcacccagaagaatcctgtatttaattggctcatatggaaaattttagaaagagagagacagcagggctgagactatcttctgctcaggaaccaaaacgagctgggaggtgtcctgatggcaaatttcaagggccacgcgcttccagggagtttcttcctgatcattgggctgtgttggtcagtgaagtacccgctgaagtactttagccacacgcggaagaacagcccactacattactatcagcgtctcgagatcgtcgaagccgcaattaggactttgttttccgtcactgggatcctggcagagcagtttgttccggatgggccccacctgcacctctaccatgagaaccactggataaagttaatgaattggcagcacagcaccatgtacctattctttgcagtctcaggaattgttgacatgctcacctatctggtcagccacgttcccttgggggtggacagactggttatggctgtggcagtattcatggaaggtttcctcttctactaccacgtccacaaccggcctccgctggaccagcacatccactcactcctgctgtatgctctgttcggagggtgtgttagtatctccctagaggtgatcttccgggaccacattgtgctggaacttttccgaaccagtctcatcattcttcagggaacctggttctggcagattgggtttgtgctgttcccaccttttggaacacccgaatgggaccagaaggatgatgccaacctcatgttcatcaccatgtgcttctgctggcactacctggctgccctcagcattgtggccgtcaactattctcttgtttactggtatgtctgagacttcagtgaagct

SEQ ID NO: 416803 - DNA, 920 bp, Homo sapiens
cggtgtggacgtatgtgcgcacatacacatgcgggtacacacaatgccccagctggttgaatgccaccatgcaggggatacacccctttggttaagcgaaaccacactctaccttttgcccagggaggtaccgtcttgcctccatcacaagcctcaggagacccactccactgccaggggagcgctgccagtatgactcacactgactggggtatgaaaatacattttgtcatctaacaacctcacttctgtacctcagcaagagtcgaaaaaggttgagggcaaaactgaatttcaagtatacacacacagtctgttacaaatcagcaacatgcttcagccggcccatcctatactgaccccaccatgggttccatagagattttaagatacaatcccttgctgctttatactcctaacatactcatgaaatacacttactcgcatctgtttgctgcctgtaatgttatgtactaactgcctaaatgctgaagaacctagctgagacaggtgtaggaggaaacttcggtgatggtgaaagccaagcgtagccctgacagctgccatctggtttgtggcaggtttcctcttctactaccacgtccacaaccggcctccgctggaccagcacatccactcactcctgctgtatgctctgttcggagggtgtgttagtatctccctagaggtgatcttccgggaccacattgtgctggaacttttccgaaccagtctcatcattcttcagggaacctggttctggcaggtgattttccacacccaggcccctcgctggtctggatggagaagcccccaccgagcgcatcccagagaaatccctgacgagaatatggggtctgaaaatgcagcattaacatgccatgcaaaggggtttagatgacccttttccccccatgccc

SEQ ID NO: 416804 - DNA, 2253 bp, Homo sapiens
cctggagctgcacctgcttctgggcggacgcacttggcgcgcggcgcgggctgcagacggctgcgaggcgctgggcacaggtgtcctgatggcaaatttcaagggccacgcgcttccagggagtttcttcctgatcattgggctgtgttggtcagtgaagtacccgctgaagtactttagccacacgcggaagaacagcccactacattactatcagcgtctcgagatcgtcgaagccgcaattaggactttgttttccgtcactgggatcctggcagagcagtttgttccggatgggccccacctgcacctctaccatgagaaccactggataaagttaatgaattggcagcacagcaccatgtacctattctttgcagtctcaggaattgttgacatgctcacctatctggtcagccacgttcccttgggggtggacagactggttatggctgtggcagtattcatggaaggtttcctcttctactaccacgtccacaaccggcctccgctggaccagcacatccactcactcctgctgtatgctctgttcggagggtgtgttagtatctccctagaggtgatcttccgggaccacattgtgctggaacttttccgaaccagtctcatcattcttcagggaacctggttctggcagattgggtttgtgctgttcccaccttttggaacacccgaatgggaccagaaggatgatgccaacctcatgttcatcaccatgtgcttctgctggcactacctggctgccctcagcattgtggccgtcaactattctcttgtttactgccttttgactcggatgaagagacacggaaggggagaaatcattggaattcagaagctgaattcagatgacacttaccagaccgccctcttgagtggctcagatgaggaatgagccgagatgcggagggcgcagatgtcccactgcacagctggaatgaatggagttcatcccctccacctgaatgcctgctgtggtctgatcttaagggtctatatatttgcacctcctcattcaacacagggctggaggttctacaacaggaaatcaggcctacagcatcctgtgtatcttgcagttgggatttttaaacatactataaagtctgtgttggtatagtacccttcataaggaaaaatgaagtaatgcctataagtagcaggcctttgtgcctcagtgtgaagagaaatcaagagatgctaaaagctttacaatggaagtggcctcatggatgaatccggggtatgagcccaggagaacgtgctgcttttggtaacttatccctttttctcttaagaaagcaggtactttcttattagaaatatgttagaatgtgtaagcaaacgacagtgcctttagaattacaattctaacttacatattttttgaaagtaaaataattcacaagctttggtattttaaaattattgttaaacatatcataactaatcataccagggtactgcaataccactgtttataagtgacaaaattaggccaaaggtgatttttttttaaatcaggaagctggttactggctctactgagagttggagccctgatgttctgattcttcaaagtcaccctaaaagaagatctgacaggaaagctgtataatgagatagaaaaacatcaggtatggaaggctttcagttttaatatggctgaaagcaaaggataacgaattcagaattagtaatgtaaaatcttgataccctaatcttgcttctggatctgttctttttttaaaaaaacttccttcaccgcgcctataatcctagcactttgggaggccgaggcaggcagatcacggggtcaggagatcaagaccatcctggctaacatggtgaaaccccgtctctactgaaaatacaaaaaattagccgggtgtggtggcgggcgcctgtagttccagctactcgggaggctgaggcaagagaatggcatgaacccggtaggggagcttgcagtgagcccagatcatgccactgtactccagcctaggtgacagagcaagactctgtctcaaaaacaagcaaacagacttccttcaacaaatatttattaaatatccactttgcaacagcactgaaatggctgtaaggactcctgagatatgtgtccagcaaggagtttacagtcaaacaggagagacatgcctgtagttacatccagtgtgatgggtgctgagaggcaagtacaaaccacgatgagaaaaaggagaggagggg

SEQ ID NO: 416805 - DNA, 2431 bp, Homo sapiens
cctggagctgcacctgcttctgggcggacgcacttggcgcgcggcgcgggctgcagacggctgcgaggcgctgggcacaggtgtcctgatggcaaatttcaagggccacgcgcttccagggagtttcttcctgatcattgggctgtgttggtcagtgaagtacccgctgaagtactttagccacacgcggaagaacagcccactacattactatcagcgtctcgagatcgtcgaagccgcaattaggactttgttttccgtcactgggatcctggcagagcagtttgttccggatgggccccacctgcacctctaccatgagaaccactggataaagttaatgaattggcagcacagcaccatgtacctattctttgcagtctcaggaattgttgacatgctcacctatctggtcagccacgttcccttgggggtggacagactggttatggctgtggcagtattcatggaaggtttcctcttctactaccacgtccacaaccggcctccgctggaccagcacatccactcactcctgctgtatgctctgttcggagggtgtgttagtatctccctagaggtgatcttccgggaccacattgtgctggaacttttccgaaccagtctcatcattcttcagggaacctggttctggcagattgggtttgtgctgttcccaccttttggaacacccgaatgggaccagaaggatgatgccaacctcatgttcatcaccatgtgcttctgctggcactacctggctgccctcagcattgtggccgtcaactattctcttgtttactgccttttgactcggatgaagagacacggaaggggagaaatcattggaattcagaagctgaattcagatgacacttaccagaccgccctcttgagtggctcagatgaggaatgagccgagatgcggagggcgcagatgtcccactgcacagctggaatgaatggagttcatcccctccacctgaatgcctgctgtggtctgatcttaagggtctatatatttgcacctcctcattcaacacagggctggaggttctacaacaggaaatcaggcctacagcatcctgtgtatcttgcagttgggatttttaaacatactataaagtctgtgttggtatagtacccttcataaggaaaaatgaagtaatgcctataagtagcaggcctttgtgcctcagtgtgaagagaaatcaagagatgctaaaagctttacaatggaagtggcctcatggatgaatccggggtatgagcccaggagaacgtgctgcttttggtaacttatccctttttctcttaagaaagcaggtactttcttattagaaatatgttagaatgtgtaagcaaacgacagtgcctttagaattacaattctaacttacatattttttgaaagtaaaataattcacaagctttggtattttaaaattattgttaaacatatcataactaatcataccagggtactgcaataccactgtttataagtgacaaaattaggccaaaggtgatttttttttaaatcaggaagctggttactggctctactgagagttggagccctgatgttctgattcttcaaagtcaccctaaaagaagatctgacaggaaagctgtataatgagatagaaaaacatcaggtatggaaggctttcagttttaatatggctgaaagcaaaggataacgaattcagaattagtaatgtaaaatcttgataccctaatcttgcttctggatctgttctttttttaaaaaaacttccttcaccgcgcctataatcctagcactttgggaggccgaggcaggcagatcacggggtcaggagatcaagaccatcctggctaacatggtgaaaccccgtctctactgaaaatacaaaaaattagccgggtgtggtggcgggcgcctgtagttccagctactcgggaggctgaggcaagagaatggcatgaacccggtaggggagcttgcagtgagcccagatcatgccactgtactccagcctaggtgacagagcaagactctgtctcaaaaacaagcaaacagacttccttcaacaaatatttattaaatatccactttgcaacagcactgaaatggctgtaaggactcctgagatatgtgtccagcaaggagtttacagtcaaacaggagagacatgcctgtagttacatccagtgtgatgggtggatcatgaggtcaagagatcgagaccatcctggccaacatggtgaaaccctgtctctactaaaaatataaaaattagcttggtgtggtggtgagcacctgtagtcccagctacttgggaggctgaggcaggagaatcacttgaacccagtaggcggaggttgcacagtgagccgagattatgccactgcactccaatctggcaacagagtgagactccatctc

SEQ ID NO: 416806 - DNA, 2585 bp, Homo sapiens
ttgcttttgtcacccaggctggagtgcaatggcgcgatctcggctcactgcaacctccctctcccgggttcaagcgattctcctgcctcagtctcccgagtagctgggactacaggctcctgccaccgcgcccggctaatttttttatgtttagtagagacagggtttcaccatgtttgtcaggcttatctcgaactcctgacctcaggtgatctgcctgcctcgccctcccaaagtgctgggattacaggcgtgagccaccgcacctggcctctcatgtttttctataagcagttaagagaagccacacagcatcctgaacactttgctttctatctcttctgccaaatatcctaggtcatcattcttaagttctgccctccatgaagtcctaggaaacgacataattcaggtgtcctgatggcaaatttcaagggccacgcgcttccagggagtttcttcctgatcattgggctgtgttggtcagtgaagtacccgctgaagtactttagccacacgcggaagaacagcccactacattactatcagcgtctcgagatcgtcgaagccgcaattaggactttgttttccgtcactgggatcctggcagagcagtttgttccggatgggccccacctgcacctctaccatgagaaccactggataaagttaatgaattggcagcacagcaccatgtacctattctttgcagtctcaggaattgttgacatgctcacctatctggtcagccacgttcccttgggggtggacagactggttatggctgtggcagtattcatggaaggtttcctcttctactaccacgtccacaaccggcctccgctggaccagcacatccactcactcctgctgtatgctctgttcggagggtgtgttagtatctccctagaggtgatcttccgggaccacattgtgctggaacttttccgaaccagtctcatcattcttcagggaacctggttctggcagattgggtttgtgctgttcccaccttttggaacacccgaatgggaccagaaggatgatgccaacctcatgttcatcaccatgtgcttctgctggcactacctggctgccctcagcattgtggccgtcaactattctcttgtttactgccttttgactcggatgaagagacacggaaggggagaaatcattggaattcagaagctgaattcagatgacacttaccagaccgccctcttgagtggctcagatgaggaatgagccgagatgcggagggcgcagatgtcccactgcacagctggaatgaatggagttcatcccctccacctgaatgcctgctgtggtctgatcttaagggtctatatatttgcacctcctcattcaacacagggctggaggttctacaacaggaaatcaggcctacagcatcctgtgtatcttgcagttgggatttttaaacatactataaagtctgtgttggtatagtacccttcataaggaaaaatgaagtaatgcctataagtagcaggcctttgtgcctcagtgtgaagagaaatcaagagatgctaaaagctttacaatggaagtggcctcatggatgaatccggggtatgagcccaggagaacgtgctgcttttggtaacttatccctttttctcttaagaaagcaggtactttcttattagaaatatgttagaatgtgtaagcaaacgacagtgcctttagaattacaattctaacttacatattttttgaaagtaaaataattcacaagctttggtattttaaaattattgttaaacatatcataactaatcataccagggtactgcaataccactgtttataagtgacaaaattaggccaaaggtgatttttttttaaatcaggaagctggttactggctctactgagagttggagccctgatgttctgattcttcaaagtcaccctaaaagaagatctgacaggaaagctgtataatgagatagaaaaacatcaggtatggaaggctttcagttttaatatggctgaaagcaaaggataacgaattcagaattagtaatgtaaaatcttgataccctaatcttgcttctggatctgttctttttttaaaaaaacttccttcaccgcgcctataatcctagcactttgggaggccgaggcaggcagatcacggggtcaggagatcaagaccatcctggctaacatggtgaaaccccgtctctactgaaaatacaaaaaattagccgggtgtggtggcgggcgcctgtagttccagctactcgggaggctgaggcaagagaatggcatgaacccggtaggggagcttgcagtgagcccagatcatgccactgtactccagcctaggtgacagagcaagactctgtctcaaaaacaagcaaacagacttccttcaacaaatatttattaaatatccactttgcaacagcactgaaatggctgtaaggactcctgagatatgtgtccagcaaggagtttacagtcaaacaggagagacatgcctgtagttacatccagtgtgatgggtgctgagaggcaagtacaaaccacgatgagaaaaaggagaggagggg

SEQ ID NO: 416807 - DNA, 1732 bp, Homo sapiens
cctggagctgcacctgcttctgggcggacgcacttggcgcgcggcgcgggctgcagacggctgcgaggcgctgggcacaggtgtcctgatggcaaatttcaagggccacgcgcttccagggagtttcttcctgatcattgggctgtgttggtcagtgaagtacccgctgaagtactttagccacacgcggaagaacagcccactacattactatcagcgtctcgagatcgtcgaagccgcaattaggactttgttttccgtcactgggatcctggcagagcagtttgttccggatgggccccacctgcacctctaccatgagaaccactggataaagttaatgaattggcagcacagcaccatgtacctattctttgcagtctcaggaattgttgacatgctcacctatctggtcagccacgttcccttgggggtggacagactggttatggctgtggcagtattcatggaaggtttcctcttctactaccacgtccacaaccggcctccgctggaccagcacatccactcactcctgctgtatgctctgttcggagggtgtgttagtatctccctagaggtgatcttccgggaccacattgtgctggaacttttccgaaccagtctcatcattcttcagggaacctggttctggcagattgggtttgtgctgttcccaccttttggaacacccgaatgggaccagaaggatgatgccaacctcatgttcatcaccatgtgcttctgctggcactacctggctgccctcagcattgtggccgtcaactattctcttgtttactgccttttgactcggatgaagagacacggaaggggagaaatcattggaattcagaagctgaattcagatgacacttaccagaccgccctcttgagtggctcagatgaggaatgagccgagatgcggagggcgcagatgtcccactgcacagctggaatgaatggagttcatcccctccacctgaatgcctgctgtggtctgatcttaagggtctatatatttgcacctcctcattcaacacagggctggaggttctacaacaggaaatcaggcctacagcatcctgtgtatcttgcagttgggatttttaaacatactataaagtctgtgttggtatagtacccttcataaggaaaaatgaagtaatgcctataagtagcaggcctttgtgcctcagtgtgaagagaaatcaagagatgctaaaagctttacaatggaagtggcctcatggatgaatccggggtatgagcccaggagaacgtgctgcttttggtaacttatccctttttctcttaagaaagcaggtactttcttattagaaatatgttagaatgtgtaagcaaacgacagtgcctttagaattacaattctaacttacatattttttgaaagtaaaataattcacaagctttggtattttaaaattattgttaaacatatcataactaatcataccagggtactgcaataccactgtttataagtgacaaaattaggccaaaggtgatttttttttaaatcaggaagctggttactggctctactgagagttggagccctgatgttctgattcttcaaagtcaccctaaaagaagatctgacaggaaagcctggttttattgaggataagaaaaaaacattcttcgtttttggaaaagggcttttcaacctttttaattaatgggcttgggaaagcccaaaagggattat

SEQ ID NO: 416808 - DNA, 2361 bp, Homo sapiens
cggtgtggacgtatgtgcgcacatacacatgcgggtacacacaatgccccagctggttgaatgccaccatgcaggggatacacccctttggttaagcgaaaccacactctaccttttgcccagggaggtaccgtcttgcctccatcacaagcctcaggagacccactccactgccaggggagcgctgccagtatgactcacactgactggggtatgaaaatacattttgtcatctaacaacctcacttctgtacctcagcaagagtcgaaaaaggttgagggcaaaactgaatttcaagtatacacacacagtctgttacaaatcagcaacatgcttcagccggcccatcctatactgaccccaccatgggttccatagagattttaagatacaatcccttgctgctttatactcctaacatactcatgaaatacacttactcgcatctgtttgctgcctgtaatgttatgtactaactgcctaaatgctgaagaacctagctgagacaggtgtaggaggaaacttcggtgatggtgaaagccaagcgtagccctgacagctgccatctggtttgtggcaggtttcctcttctactaccacgtccacaaccggcctccgctggaccagcacatccactcactcctgctgtatgctctgttcggagggtgtgttagtatctccctagaggtgatcttccgggaccacattgtgctggaacttttccgaaccagtctcatcattcttcagggaacctggttctggcagattgggtttgtgctgttcccaccttttggaacacccgaatgggaccagaaggatgatgccaacctcatgttcatcaccatgtgcttctgctggcactacctggctgccctcagcattgtggccgtcaactattctcttgtttactgccttttgactcggatgaagagacacggaaggggagaaatcattggaattcagaagctgaattcagatgacacttaccagaccgccctcttgagtggctcagatgaggaatgagccgagatgcggagggcgcagatgtcccactgcacagctggaatgaatggagttcatcccctccacctgaatgcctgctgtggtctgatcttaagggtctatatatttgcacctcctcattcaacacagggctggaggttctacaacaggaaatcaggcctacagcatcctgtgtatcttgcagttgggatttttaaacatactataaagtctgtgttggtatagtacccttcataaggaaaaatgaagtaatgcctataagtagcaggcctttgtgcctcagtgtgaagagaaatcaagagatgctaaaagctttacaatggaagtggcctcatggatgaatccggggtatgagcccaggagaacgtgctgcttttggtaacttatccctttttctcttaagaaagcaggtactttcttattagaaatatgttagaatgtgtaagcaaacgacagtgcctttagaattacaattctaacttacatattttttgaaagtaaaataattcacaagctttggtattttaaaattattgttaaacatatcataactaatcataccagggtactgcaataccactgtttataagtgacaaaattaggccaaaggtgatttttttttaaatcaggaagctggttactggctctactgagagttggagccctgatgttctgattcttcaaagtcaccctaaaagaagatctgacaggaaagctgtataatgagatagaaaaacatcaggtatggaaggctttcagttttaatatggctgaaagcaaaggataacgaattcagaattagtaatgtaaaatcttgataccctaatcttgcttctggatctgttctttttttaaaaaaacttccttcaccgcgcctataatcctagcactttgggaggccgaggcaggcagatcacggggtcaggagatcaagaccatcctggctaacatggtgaaaccccgtctctactgaaaatacaaaaaattagccgggtgtggtggcgggcgcctgtagttccagctactcgggaggctgaggcaagagaatggcatgaacccggtaggggagcttgcagtgagcccagatcatgccactgtactccagcctaggtgacagagcaagactctgtctcaaaaacaagcaaacagacttccttcaacaaatatttattaaatatccactttgcaacagcactgaaatggctgtaaggactcctgagatatgtgtccagcaaggagtttacagtcaaacaggagagacatgcctgtagttacatccagtgtgatgggtgctgagaggcaagtacaaaccacgatgagaaaaaggagaggagggg

SEQ ID NO: 416809 - DNA, 2228 bp, Homo sapiens
tcttatttccagacctgccctccctgcttcccagaaatgatgtgacagtcaaaaaataaaccagagcagaatgttaagacaaactgcactccacccctcactgaaggctccttagaggtatatagataacagctatggactcctatgcacttgctgcgccccaggcccagtggaaagcagctacactctattatcccatttaatcttcactgctttatgaagtatgcactgttattttttacaggtggagaaaacaaggcttcaaaaagctgagtaacttgaccaaggtcaccccactaataaatggcagagcctctcagtgcaagggtgaattttagcaaatggtattaccagttctatttgctgttcggctgcctctaccttttcttctaggtcatttctctagatcccaagcagaatattaggttggtgcaaaagtaacggtgatttttgccattatttcatccagaaagagttccacacggaccaaagagaagggagctcaagtcagtttcttttagttctcctgcccagccactgaaacagtaaaccaagataggcaagaccttggcctcaattatgacattcagtagtttccaccatcgcccctttatctactgatgaatatttcctaagaagtctagtttatagacatgtaatcacagtatttgatagaaatataaagaaaatagtttaagaatcagtagatgccttcacatccttggtaatggattaagggaatctctggctaattggctcttactctttctctattaaagccttttgactcggatgaagagacacggaaggggagaaatcattggaattcagaagctgaattcagatgacacttaccagaccgccctcttgagtggctcagatgaggaatgagccgagatgcggagggcgcagatgtcccactgcacagctggaatgaatggagttcatcccctccacctgaatgcctgctgtggtctgatcttaagggtctatatatttgcacctcctcattcaacacagggctggaggttctacaacaggaaatcaggcctacagcatcctgtgtatcttgcagttgggatttttaaacatactataaagtctgtgttggtatagtacccttcataaggaaaaatgaagtaatgcctataagtagcaggcctttgtgcctcagtgtgaagagaaatcaagagatgctaaaagctttacaatggaagtggcctcatggatgaatccggggtatgagcccaggagaacgtgctgcttttggtaacttatccctttttctcttaagaaagcaggtactttcttattagaaatatgttagaatgtgtaagcaaacgacagtgcctttagaattacaattctaacttacatattttttgaaagtaaaataattcacaagctttggtattttaaaattattgttaaacatatcataactaatcataccagggtactgcaataccactgtttataagtgacaaaattaggccaaaggtgatttttttttaaatcaggaagctggttactggctctactgagagttggagccctgatgttctgattcttcaaagtcaccctaaaagaagatctgacaggaaagctgtataatgagatagaaaaacatcaggtatggaaggctttcagttttaatatggctgaaagcaaaggataacgaattcagaattagtaatgtaaaatcttgataccctaatcttgcttctggatctgttctttttttaaaaaaacttccttcaccgcgcctataatcctagcactttgggaggccgaggcaggcagatcacggggtcaggagatcaagaccatcctggctaacatggtgaaaccccgtctctactgaaaatacaaaaaattagccgggtgtggtggcgggcgcctgtagttccagctactcgggaggctgaggcaagagaatggcatgaacccggtaggggagcttgcagtgagcccagatcatgccactgtactccagcctaggtgacagagcaagactctgtctcaaaaacaagcaaacagacttccttcaacaaatatttattaaatatccactttgcaacagcactgaaatggctgtaaggactcctgagatatgtgtccagcaaggagtttacagtcaaacaggagagacatgcctgtagttacatccagtgtgatgggtgctgagaggcaagtacaaaccacgatgagaaaaaggagaggagggg

SEQ ID NO: 416810 - DNA, 1225 bp, Homo sapiens
ttgcttttgtcacccaggctggagtgcaatggcgcgatctcggctcactgcaacctccctctcccgggttcaagcgattctcctgcctcagtctcccgagtagctgggactacaggctcctgccaccgcgcccggctaatttttttatgtttagtagagacagggtttcaccatgtttgtcaggcttatctcgaactcctgacctcaggtgatctgcctgcctcgccctcccaaagtgctgggattacaggcgtgagccaccgcacctggcctctcatgtttttctataagcagttaagagaagccacacagcatcctgaacactttgctttctatctcttctgccaaatatcctaggtcatcattcttaagttctgccctccatgaagtcctaggaaacgacataattcaggtgtcctgatggcaaatttcaagggccacgcgcttccagggagtttcttcctgatcattgggctgtgttggtcagtgaagtacccgctgaagtactttagccacacgcggaagaacagcccactacattactatcagcgtctcgagatcgtcgaagccgcaattaggactttgttttccgtcactgggatcctggcagagcagtttgttccggatgggccccacctgcacctctaccatgagaaccactggataaagttaatgaattggcagcacagcaccatgtacctattctttgcagtctcaggaattgttgacatgctcacctatctggtcagccacgttcccttgggggtggacagactggttatggctgtggcagtattcatggaaggtttcctcttctactaccacgtccacaaccggcctccgctggaccagcacatccactcactcctgctgtatgctctgttcggagggtgtgttagtatctccctagaggtgatcttccgggaccacattgtgctggaacttttccgaaccagtctcatcattcttcagggaacctggttctggcagattgggtttgtgctgttcccaccttttggaacacccgaatgggaccagaaggatgatgccaacctcatgttcatcaccatgtgcttctgctggcactacctggctgccctcagcattgtggccgtcaactattctcttgtttactgctttttgacttcggatgaagagacacggaaggtgggacactcctctttattccacttgagctggtttgagtttcgaggttgttgagggt

SEQ ID NO: 416811 - DNA, 356 bp, Homo sapiens
ttcctcccaccccagtcccacctctggattggcaagtagctggggctttgaggtcagatcaaattgatcaccagcttcatcacttcccagctgtgtggccctgccaagtttctaccttctctaagctactcattaaaaatgctagtaacaatgggacccagctcctaaagttattgtgaagattaaatgagatcatgatattaatcactttgtacaaaacctggcatgtagtacatatttagcaaatactggctaatgttcatatttatgttaatatcaataattatagttgatattattattgtattttggctaaggcaatgtttatctatttgttatctgaaaaggaaagtatc

SEQ ID NO: 416812 - DNA, 199 bp, Homo sapiens
acccttacacagcagcactccctcgggaaccctggggacagagcacagccctggggacacggcagcagccgggtgttcttaaggggtcttcctattagcctgctctccccactgcctggcggtgcctgtagctcttgcctgttagaggggagcctggaagggctgctgggggctttgaagccgttcccaagcactctga

SEQ ID NO: 416813 - DNA, 2158 bp, Homo sapiens
agcgggagagcgcagcgtcgaccctttgtggacgccgagtggcggtcgctcgccccgccccgcgccgtcgggcgctccttcctcagcggcgggaagctggcggcagcggcggtggcggtggctgagcagaggacccggcgggcggcctcgcgggtcaggacacaatgtttgcacgaggactgaagaggaaatgtgttggccacgaggaagacgtggagggagccctggccggcttgaagacagtgtcctcatacagcctgcagcggcagtcgctcctggacatgtctctggtgaagttgcagctttgccacatgcttgtggagcccaatctgtgccgctcagtcctcattgccaacacggtccggcagatccaagaggagatgacgcaggatgggacgtggcgcacagtggcaccccaggctgcagagcgggcgccgctcgaccgcttggtctccacggagatcctgtgccgtgcagcgtgggggcaagagggggcacatcctgctcctggcttgggggacggccacacacagggtccagtttctgacctttgcccagtcacctcagcacaggcaccaaggcacctgcagagcagcgcctgggagatggatggccctcgagaaaacagaggaagctttcacaagtcacttgatcagatatttgaaacgctggagactaaaaaccccagctgcatggaagagctgttctcagacgtggacagcccctactacgacctggacacagtactgacaggcatgatggggggtgccaggccgggcccctgcgaagggctcgagggcttggctccggccaccccaggccctagctccagctgcaagtccgacctgggcgagctggaccacgtggtggagatcctggtggagacctgagcaggagccctgagtgctcacagccgcctctgacgcattgacacgtgagcactggctcccacggagggtgcgcctgccgccagcggcccagccttgctgccctgtctgctgattctgagaaatcccagaacagcccattaccagtggggctgcagccctaggcccgtcccactcacctcccccctgtggagggccaggcagaggctgttctggaaggcttcttgtcttctgacgtccccacagccctgggcccctcgtgtctctttgtgtcccccactgtagaggacggtgagccgcagctgcatcaacctccttttacctttagataggtgaatttttacaattcagttttacatgttttgggcagtattttgtcttaagatatattttttaaactttttataccttatctctttagattttttcagctattttcttaaaagtatattttttctataaacatcctttgctgctacattagaacttttatagcctaaacaattgcagttggtgtgtttcatttttttaaggtttaaataagggttttttgttttgttttgttttttgcagtgagcatcactacagtctcagtcaacagtgtgaatgtatcatgttttactttaaatgtgtgtgtgatacttcttcattatgtcctgcgctgcagtgagacctgggtgaaaatcaggaaccgcacacagccacatcttcctagacctaagagtaaattatggaggattttatttatgtctatttatatgtaaatgtcattgaagacaaaggtcaaatatttgtctgtttgtagatcacaggcaccagttggtcttcagggacctcatagcccctcggtggtgccttctcaaggcagtgttcctggaggctcccgtcagggtcagcccatgcacctgccctgggtgaggaagtagcattgctgctggatgagaaacgcctgcgctgctctgttagactggtgctgaaacaaaaggttaaggctaggttgaagtctagaatgaaagaaatctgaatccatgtcattcataaccccttgatctgtagtgtcatgggtgctgccgcaggcagggagtgagctgggggtgcctgcagccttccactcctgccccgcctcaccccacatgctccctgtttctcatgctttctctaacttcctcaccccttaaccaaaaaggtgtgttttcttttgtgcatatagccattcttaaatatcagtgatgtaaacctcactttattaaaaaattatccagcaaacaaaa

SEQ ID NO: 416814 - DNA, 2520 bp, Homo sapiens
agcgggagagcgcagcgtcgaccctttgtggacgccgagtggcggtcgctcgccccgccccgcgccgtcgggcgctccttcctcagcggcgggaagctggcggcagcggcggtggcggtggctgagcagaggacccggcgggcggcctcgcgggtcaggacacaatgtttgcacgaggactgaagaggaaatgtgttggccacgaggaagacgtggagggagccctggccggcttgaagacagtgtcctcatacagcctgcagcggcagtcgctcctggacatgtctctggtgaagttgcagctttgccacatgcttgtggagcccaatctgtgccgctcagtcctcattgccaacacggtccggcagatccaagaggagatgacgcaggatgggacgtggcgcacagtggcaccccaggctgcagagcgggcgccgctcgaccgcttggtctccacggagatcctgtgccgtgcagcgtgggggcaagagggggcacatcctgctcctggcttgggggacggccacacacagggtccagtttctgacctttgcccagtcacctcagcacaggcaccaaggcacctgcagagcagcgcctgggagatggatggccctcgagaaaacagaggaagctttcacaagtcacttgatcagatatttgaaacgctggagactaaaaaccccagctgcatggaagagctgttctcagacgtggacagcccctactacgacctggacacagtactgacaggcatgatggggggtgccaggccgggcccctgcgaagggctcgagggcttggctccggccaccccaggccctagctccagctgcaagtccgacctgggcgagctggaccacgtggtggagatcctggtggagacctgagcaggagccctgagtgctcacagccgcctctgacgcattgacacgtgagcactggctcccacggagggtgcgcctgccgccagcggcccagccttgctgccctgtctgctgattctgagaaatcccagaacagcccattaccagtggggctgcagccctaggcccgtcccactcacctcccccctgtggagggccaggcagaggctgttctggaaggcttcttgtcttctgacgtccccacagccctgggcccctcgtgtctctttgtgtcccccactgtagaggacggtgagccgcagctgcatcaacctccttttacctttagataggtgaatttttacaattcagttttacatgttttgggcagtattttgtcttaagatatattttttaaactttttataccttatctctttagattttttcagctattttcttaaaagtatattttttctataaacatcctttgctgctacattagaacttttatagcctaaacaattgcagttggtgtgtttcatttttttaaggtttaaataagggttttttgttttgttttgttttttgcagtgagcatcactacagtctcagtcaacagtgtgaatgtatcatgttttactttaaatgtgtgtgtgatacttcttcattatgtcctgcgctgcagtgagacctgggtgaaaatcaggaaccgcacacagccacatcttcctagacctaagagtaaattatggaggattttatttatgtctatttatatgtaaatgtcattgaagacaaaggtcaaatatttgtctgtttgtagatcacaggcaccagttggtcttcagggacctcatagcccctcggtggtgccttctcaaggcagtgttcctggaggctcccgtcagggtcagcccatgcacctgccctgggtgaggaagtagcattgctgctggatgagaaacgcctgcgctgctctgttagactggtgctgaaacaaaaggttaaggctaggttgaagtctagaatgaaagaaatctgaatccatgtcattcataaccccttgatctgtagtgtcatgggtgctgccgcaggcagggagtgagctgggggtgcctgcagccttccactcctgccccgcctcaccccacatgctccctgtttctcatgctttctctaacttcctcaccccttaaccaaaaaggtgtgttttcttttgtgcatatagccattcttaaatatcagtgatgtaaacctcactttattaaaaaattatccagcaaacaaaatgggaatgtggtgttagttacgaccacggcctgaccctccagcaacctttctgcaggatcagttctgctgtattatctggtggtgctttctaaggtggggaaaggaattgcacttggctgcattaaatggacgctgggttacttttatttccccccccacagggttgcagagcaaattctttttacattgttcagcgcccggctggggttgggggtgtccacgacctctgacagcccccgatgtcgaaagttaatcctcatggaccctagtttaaagggtatgtgttttataggaataaatctaaagcactattttgtttctgtatagcatttttatcttttagaaacatcatttgttcagc

SEQ ID NO: 416815 - DNA, 1632 bp, Homo sapiens
agcgggagagcgcagcgtcgaccctttgtggacgccgagtggcggtcgctcgccccgccccgcgccgtcgggcgctccttcctcagcggcgggaagctggcggcagcggcggtggcggtggctgagcagaggacccggcgggcggcctcgcgggtcaggacacaatgtttgcacgaggactgaagaggaaatgtgttggccacgaggaagacgtggagggagccctggccggcttgaagacagtgtcctcatacagcctgcagcggcagtcgctcctggacatgtctctggtgaagttgcagctttgccacatgcttgtggagcccaatctgtgccgctcagtcctcattgccaacacggtccggcagatccaagaggagatgacgcaggatgggacgtggcgcacagtggcaccccaggctgcagagcgggcgccgctcgaccgcttggtctccacggagatcctgtgccgtgcagcgtgggggcaagagggggcacatcctgctcctggcttgggggacggccacacacagggtccagtttctgacctttgcccagtcacctcagcacaggcaccaaggcacctgcagagcagcgcctgggagatggatggccctcgagaaaacagaggaagctttcacaagtcacttgatcagatatttgaaacgctggagactaaaaaccccagctgcatggaagagctgttctcagacgtggacagcccctactacgacctggacacagtactgacaggcatgatggggggtgccaggccgggcccctgcgaagggctcgagggcttggctccggccaccccaggccctagctccagctgcaagtccgacctgggcgagctggaccacgtggtggagatcctggtggagacctgagcaggagccctgagtgctcacagccgcctctgacgcattgacactgagcatcactacagtctcagtcaacagtgtgaatgtatcatgttttactttaaatgtgtgtgtgatacttcttcattatgtcctgcgctgcagtgagacctgggtgaaaatcaggaaccgcacacagccacatcttcctagacctaagagtaaattatggaggattttatttatgtctatttatatgtaaatgtcattgaagacaaaggtcaaatatttgtctgtttgtagatcacaggcaccagttggtcttcagggacctcatagcccctcggtggtgccttctcaaggcagtgttcctggaggctcccgtcagggtcagcccatgcacctgccctgggtgaggaagtagcattgctgctggatgagaaacgcctgcgctgctctgttagactggtgctgaaacaaaaggttaaggctaggttgaagtctagaatgaaagaaatctgaatccatgtcattcataaccccttgatctgtagtgtcatgggtgctgccgcaggcagggagtgagctgggggtgcctgcagccttccactcctgccccgcctcaccccacatgctccctgtttctcatgctttctctaacttcctcaccccttaaccaaaaaggtgtgttttcttttgtgcatatagccattcttaaatatcagtgatgtaaacctcactttattaaaaaattatccagcaaacaaaa

SEQ ID NO: 416816 - DNA, 2214 bp, Homo sapiens
  misc_feature (2159)..(2159): n is a, c, g, or t
  misc_feature (2162)..(2162): n is a, c, g, or t
agcgggagagcgcagcgtcgaccctttgtggacgccgagtggcggtcgctcgccccgccccgcgccgtcgggcgctccttcctcagcggcgggaagctggcggcagcggcggtggcggtggctgagcagaggacccggcgggcggcctcgcgggtcaggacacaatgtttgcacgaggactgaagaggaaatgtgttggccacgaggaagacgtggagggagccctggccggcttgaagacagtgtcctcatacagcctgcagcggcagtcgctcctggacatgtctctggtgaagttgcagctttgccacatgcttgtggagcccaatctgtgccgctcagtcctcattgccaacacggtccggcagatccaagaggagatgacgcaggatgggacgtggcgcacagtggcaccccaggctgcagagcgggcgccgctcgaccgcttggtctccacggagatcctgtgccgtgcagcgtgggggcaagagggggcacatcctgctcctggcttgggggacggccacacacagggtccagtttctgacctttgcccagtcacctcagcacaggcaccaaggcacctgcagagcagcgcctgggagatggatggccctcgagaaaacagaggaagctttcacaagtcacttgatcagatatttgaaacgctggagactaaaaaccccagctgcatggaagagctgttctcagacgtggacagcccctactacgacctggacacagtactgacaggcatgatggggggtgccaggccgggcccctgcgaagggctcgagggcttggctccggccaccccaggccctagctccagctgcaagtccgacctgggcgagctggaccacgtggtggagatcctggtggagacctgagcaggagccctgagtgctcacagccgcctctgacgcattgacacgtgagcactggctcccacggagggtgcgcctgccgccagcggcccagccttgctgccctgtctgctgattctgagaaatcccagaacagcccattaccagtggggctgcagccctaggcccgtcccactcacctcccccctgtggagggccaggcagaggctgttctggaaggcttcttgtcttctgacgtccccacagccctgggcccctcgtgtctctttgtgtcccccactgtagaggacggtgagccgcagctgcatcaacctccttttacctttagataggtgaatttttacaattcagttttacatgttttgggcagtattttgtcttaagatatattttttaaactttttataccttatctctttagattttttcagctattttcttaaaagtatattttttctataaacatcctttgctgctacattagaacttttatagcctaaacaattgcagttggtgtgtttcatttttttaaggtttaaataagggttttttgttttgttttgttttttgcagtgagcatcactacagtctcagtcaacagtgtgaatgtatcatgttttactttaaatgtgtgtgtgatacttcttcattatgtcctgcgctgcagtgagacctgggtgaaaatcaggaaccgcacacagccacatcttcctagacctaagagtaaattatggaggattttatttatgtctatttatatgtaaatgtcattgaagacaaaggtcaaatatttgtctgtttgtagatcacaggcaccagttggtcttcagggacctcatagcccctcggtggtgccttctcaaggcagtgttcctggaggctcccgtcagggtcagcccatgcacctgccctgggtgaggaagtagcattgctgctggatgagaaacgcctgcgctgctctgttagactggtgctgaaacaaaaggttaaggctaggttgaagtctagaatgaaagaaatctgaatccatgtcattcataaccccttgatctgtagtgtcatgggtgctgccgcaggcagggagtgagctgggggtgcctgcagccttccactcctgccccgcctcaccccacatgctccctgtttctcatgctttctctaacttcctcaccccttaaccaaaaaggtgtgttttcttttgtgcatatagccattcttaaatatcagtgatgtaaacctcactttattaaaaaattatccagcaaacaaaanaanaaaaacaaaaccaaaatgccccatgaaaacaagaagcccacaacaaaagaaa

SEQ ID NO: 416817 - DNA, 2051 bp, Homo sapiens
gctaggactgcagggaggggtgcgaggctagccacgcaggcggggccctgggacacaatgtttgcacgaggactgaagaggaaatgtgttggccacgaggaagacgtggagggagccctggccggcttgaagacagtgtcctcatacagcctgcagcggcagtcgctcctggacatgtctctggtgaagttgcagctttgccacatgcttgtggagcccaatctgtgccgctcagtcctcattgccaacacggtccggcagatccaagaggagatgacgcaggatgggacgtggcgcacagtggcaccccaggctgcagagcgggcgccgctcgaccgcttggtctccacggagatcctgtgccgtgcagcgtgggggcaagagggggcacatcctgctcctggcttgggggacggccacacacagggtccagtttctgacctttgcccagtcacctcagcacaggcaccaaggcacctgcagagcagcgcctgggagatggatggccctcgagaaaacagaggaagctttcacaagtcacttgatcagatatttgaaacgctggagactaaaaaccccagctgcatggaagagctgttctcagacgtggacagcccctactacgacctggacacagtactgacaggcatgatggggggtgccaggccgggcccctgcgaagggctcgagggcttggctccggccaccccaggccctagctccagctgcaagtccgacctgggcgagctggaccacgtggtggagatcctggtggagacctgagcaggagccctgagtgctcacagccgcctctgacgcattgacacgtgagcactggctcccacggagggtgcgcctgccgccagcggcccagccttgctgccctgtctgctgattctgagaaatcccagaacagcccattaccagtggggctgcagccctaggcccgtcccactcacctcccccctgtggagggccaggcagaggctgttctggaaggcttcttgtcttctgacgtccccacagccctgggcccctcgtgtctctttgtgtcccccactgtagaggacggtgagccgcagctgcatcaacctccttttacctttagataggtgaatttttacaattcagttttacatgttttgggcagtattttgtcttaagatatattttttaaactttttataccttatctctttagattttttcagctattttcttaaaagtatattttttctataaacatcctttgctgctacattagaacttttatagcctaaacaattgcagttggtgtgtttcatttttttaaggtttaaataagggttttttgttttgttttgttttttgcagtgagcatcactacagtctcagtcaacagtgtgaatgtatcatgttttactttaaatgtgtgtgtgatacttcttcattatgtcctgcgctgcagtgagacctgggtgaaaatcaggaaccgcacacagccacatcttcctagacctaagagtaaattatggaggattttatttatgtctatttatatgtaaatgtcattgaagacaaaggtcaaatatttgtctgtttgtagatcacaggcaccagttggtcttcagggacctcatagcccctcggtggtgccttctcaaggcagtgttcctggaggctcccgtcagggtcagcccatgcacctgccctgggtgaggaagtagcattgctgctggatgagaaacgcctgcgctgctctgttagactggtgctgaaacaaaaggttaaggctaggttgaagtctagaatgaaagaaatctgaatccatgtcattcataaccccttgatctgtagtgtcatgggtgctgccgcaggcagggagtgagctgggggtgcctgcagccttccactcctgccccgcctcaccccacatgctccctgtttctcatgctttctctaacttcctcaccccttaaccaaaaaggtgtgttttcttttgtgcatatagccattcttaaatatcagtgatgtaaacctcactttattaaaaaattatccagcaaacaaaa

SEQ ID NO: 416818 - DNA, 2034 bp, Homo sapiens
caacctcaggctacagtacaggcccggtggtaacgacacaatgtttgcacgaggactgaagaggaaatgtgttggccacgaggaagacgtggagggagccctggccggcttgaagacagtgtcctcatacagcctgcagcggcagtcgctcctggacatgtctctggtgaagttgcagctttgccacatgcttgtggagcccaatctgtgccgctcagtcctcattgccaacacggtccggcagatccaagaggagatgacgcaggatgggacgtggcgcacagtggcaccccaggctgcagagcgggcgccgctcgaccgcttggtctccacggagatcctgtgccgtgcagcgtgggggcaagagggggcacatcctgctcctggcttgggggacggccacacacagggtccagtttctgacctttgcccagtcacctcagcacaggcaccaaggcacctgcagagcagcgcctgggagatggatggccctcgagaaaacagaggaagctttcacaagtcacttgatcagatatttgaaacgctggagactaaaaaccccagctgcatggaagagctgttctcagacgtggacagcccctactacgacctggacacagtactgacaggcatgatggggggtgccaggccgggcccctgcgaagggctcgagggcttggctccggccaccccaggccctagctccagctgcaagtccgacctgggcgagctggaccacgtggtggagatcctggtggagacctgagcaggagccctgagtgctcacagccgcctctgacgcattgacacgtgagcactggctcccacggagggtgcgcctgccgccagcggcccagccttgctgccctgtctgctgattctgagaaatcccagaacagcccattaccagtggggctgcagccctaggcccgtcccactcacctcccccctgtggagggccaggcagaggctgttctggaaggcttcttgtcttctgacgtccccacagccctgggcccctcgtgtctctttgtgtcccccactgtagaggacggtgagccgcagctgcatcaacctccttttacctttagataggtgaatttttacaattcagttttacatgttttgggcagtattttgtcttaagatatattttttaaactttttataccttatctctttagattttttcagctattttcttaaaagtatattttttctataaacatcctttgctgctacattagaacttttatagcctaaacaattgcagttggtgtgtttcatttttttaaggtttaaataagggttttttgttttgttttgttttttgcagtgagcatcactacagtctcagtcaacagtgtgaatgtatcatgttttactttaaatgtgtgtgtgatacttcttcattatgtcctgcgctgcagtgagacctgggtgaaaatcaggaaccgcacacagccacatcttcctagacctaagagtaaattatggaggattttatttatgtctatttatatgtaaatgtcattgaagacaaaggtcaaatatttgtctgtttgtagatcacaggcaccagttggtcttcagggacctcatagcccctcggtggtgccttctcaaggcagtgttcctggaggctcccgtcagggtcagcccatgcacctgccctgggtgaggaagtagcattgctgctggatgagaaacgcctgcgctgctctgttagactggtgctgaaacaaaaggttaaggctaggttgaagtctagaatgaaagaaatctgaatccatgtcattcataaccccttgatctgtagtgtcatgggtgctgccgcaggcagggagtgagctgggggtgcctgcagccttccactcctgccccgcctcaccccacatgctccctgtttctcatgctttctctaacttcctcaccccttaaccaaaaaggtgtgttttcttttgtgcatatagccattcttaaatatcagtgatgtaaacctcactttattaaaaaattatccagcaaacaaaa

SEQ ID NO: 416819 - DNA, 1911 bp, Homo sapiens
  misc_feature (21)..(22): n is a, c, g, or t
cacatcctgctcctggcttgnnggacggcgggcggctcgcgggtcaggacacaatgtttgcacgaggactgaagaggaaatgtgttggccacgaggaagacgtggagggagccctggccggcttgaagacagtgtcctcatacagcctgcagcggcagtcgctcctggacatgtctctggtgaagttgcagctttgccacatgcttgtggagcccaatctgtgccgctcagtcctcattgccaacacggtccggcagatcctggcttgggggacggccacacacagggtccagtttctgacctttgcccagtcacctcagcacaggcaccaaggcacctgcagagcagcgcctgggagatggatggccctcgagaaaacagaggaagctttcacaagtcacttgatcagatatttgaaacgctggagactaaaaaccccagctgcatggaagagctgttctcagacgtggacagcccctactacgacctggacacagtactgacaggcatgatggggggtgccaggccgggcccctgcgaagggctcgagggcttggctccggccaccccaggccctagctccagctgcaagtccgacctgggcgagctggaccacgtggtggagatcctggtggagacctgagcaggagccctgagtgctcacagccgcctctgacgcattgacacgtgagcactggctcccacggagggtgcgcctgccgccagcggcccagccttgctgccctgtctgctgattctgagaaatcccagaacagcccattaccagtggggctgcagccctaggcccgtcccactcacctcccccctgtggagggccaggcagaggctgttctggaaggcttcttgtcttctgacgtccccacagccctgggcccctcgtgtctctttgtgtcccccactgtagaggacggtgagccgcagctgcatcaacctccttttacctttagataggtgaatttttacaattcagttttacatgttttgggcagtattttgtcttaagatatattttttaaactttttataccttatctctttagattttttcagctattttcttaaaagtatattttttctataaacatcctttgctgctacattagaacttttatagcctaaacaattgcagttggtgtgtttcatttttttaaggtttaaataagggttttttgttttgttttgttttttgcagtgagcatcactacagtctcagtcaacagtgtgaatgtatcatgttttactttaaatgtgtgtgtgatacttcttcattatgtcctgcgctgcagtgagacctgggtgaaaatcaggaaccgcacacagccacatcttcctagacctaagagtaaattatggaggattttatttatgtctatttatatgtaaatgtcattgaagacaaaggtcaaatatttgtctgtttgtagatcacaggcaccagttggtcttcagggacctcatagcccctcggtggtgccttctcaaggcagtgttcctggaggctcccgtcagggtcagcccatgcacctgccctgggtgaggaagtagcattgctgctggatgagaaacgcctgcgctgctctgttagactggtgctgaaacaaaaggttaaggctaggttgaagtctagaatgaaagaaatctgaatccatgtcattcataaccccttgatctgtagtgtcatgggtgctgccgcaggcagggagtgagctgggggtgcctgcagccttccactcctgccccgcctcaccccacatgctccctgtttctcatgctttctctaacttcctcaccccttaaccaaaaaggtgtgttttcttttgtgcatatagccattcttaaatatcagtgatgtaaacctcactttattaaaaaattatccagcaaacaaaa

SEQ ID NO: 416820 - DNA, 1502 bp, Homo sapiens
catcgcagcccgccttcagatgtccgagcgcagcatcctcagccggctggccagcaagggcacggagcctcaccccacagagagagcgtcgacgctctctctgtggggggtgccaggccgggcccctgcgaagggctcgagggcttggctccggccaccccaggccctagctccagctgcaagtccgacctgggcgagctggaccacgtggtggagatcctggtggagacctgagcaggagccctgagtgctcacagccgcctctgacgcattgacacgtgagcactggctcccacggagggtgcgcctgccgccagcggcccagccttgctgccctgtctgctgattctgagaaatcccagaacagcccattaccagtggggctgcagccctaggcccgtcccactcacctcccccctgtggagggccaggcagaggctgttctggaaggcttcttgtcttctgacgtccccacagccctgggcccctcgtgtctctttgtgtcccccactgtagaggacggtgagccgcagctgcatcaacctccttttacctttagataggtgaatttttacaattcagttttacatgttttgggcagtattttgtcttaagatatattttttaaactttttataccttatctctttagattttttcagctattttcttaaaagtatattttttctataaacatcctttgctgctacattagaacttttatagcctaaacaattgcagttggtgtgtttcatttttttaaggtttaaataagggttttttgttttgttttgttttttgcagtgagcatcactacagtctcagtcaacagtgtgaatgtatcatgttttactttaaatgtgtgtgtgatacttcttcattatgtcctgcgctgcagtgagacctgggtgaaaatcaggaaccgcacacagccacatcttcctagacctaagagtaaattatggaggattttatttatgtctatttatatgtaaatgtcattgaagacaaaggtcaaatatttgtctgtttgtagatcacaggcaccagttggtcttcagggacctcatagcccctcggtggtgccttctcaaggcagtgttcctggaggctcccgtcagggtcagcccatgcacctgccctgggtgaggaagtagcattgctgctggatgagaaacgcctgcgctgctctgttagactggtgctgaaacaaaaggttaaggctaggttgaagtctagaatgaaagaaatctgaatccatgtcattcataaccccttgatctgtagtgtcatgggtgctgccgcaggcagggagtgagctgggggtgcctgcagccttccactcctgccccgcctcaccccacatgctccctgtttctcatgctttctctaacttcctcaccccttaaccaaaaaggtgtgttttcttttgtgcatatagccattcttaaatatcagtgatgtaaacctcactttattaaaaaattatccagcaaacaaaa

SEQ ID NO: 416821 - DNA, 1202 bp, Homo sapiens
ggcccaagcctttgacttggaccctgatcctggctggaattttctgaacgaaaaaatcccagaacagcccattaccagtggggctgcagccctaggcccgtcccactcacctcccccctgtggagggccaggcagaggctgttctggaaggcttcttgtcttctgacgtccccacagccctgggcccctcgtgtctctttgtgtcccccactgtagaggacggtgagccgcagctgcatcaacctccttttacctttagataggtgaatttttacaattcagttttacatgttttgggcagtattttgtcttaagatatattttttaaactttttataccttatctctttagattttttcagctattttcttaaaagtatattttttctataaacatcctttgctgctacattagaacttttatagcctaaacaattgcagttggtgtgtttcatttttttaaggtttaaataagggttttttgttttgttttgttttttgcagtgagcatcactacagtctcagtcaacagtgtgaatgtatcatgttttactttaaatgtgtgtgtgatacttcttcattatgtcctgcgctgcagtgagacctgggtgaaaatcaggaaccgcacacagccacatcttcctagacctaagagtaaattatggaggattttatttatgtctatttatatgtaaatgtcattgaagacaaaggtcaaatatttgtctgtttgtagatcacaggcaccagttggtcttcagggacctcatagcccctcggtggtgccttctcaaggcagtgttcctggaggctcccgtcagggtcagcccatgcacctgccctgggtgaggaagtagcattgctgctggatgagaaacgcctgcgctgctctgttagactggtgctgaaacaaaaggttaaggctaggttgaagtctagaatgaaagaaatctgaatccatgtcattcataaccccttgatctgtagtgtcatgggtgctgccgcaggcagggagtgagctgggggtgcctgcagccttccactcctgccccgcctcaccccacatgctccctgtttctcatgctttctctaacttcctcaccccttaaccaaaaaggtgtgttttcttttgtgcatatagccattcttaaatatcagtgatgtaaacctcactttattaaaaaattatccagcaaacaaaa

SEQ ID NO: 416822 - DNA, 381 bp, Homo sapiens
atcctggtttgtaacaaataatggaatcttagaattttagaaattgaaatgttctcagagaccatgtggtccagatctctcattttacaggtgaggcaagtggtccagtgactcatctgtgctcactgcatgagagccatgcaagctctagagagcacacacagagtgagagagacaagccgagatcctgtccccgtaggcactagtgtatccatggtttggtacaacattgggtgtcatcctggttgtcccaagcctcagcagccggtggatgtcaataaggtcacattattaataaaaataagaatgaataggccgggcgcggtggatcacgcctataatcccagcacattgggaggccgaggcgggtggatcacctga

SEQ ID NO: 416823 - DNA, 324 bp, Homo sapiens
gggaaacaagcatccccacaggctgtatatgaagatgcaaatttgttaaacatctgtccagatttaaaaggcagataccctttgacccagccatttcccttttaggaacttaacagataggaatttgcaaaaataaaaaagcaatgactggataaggatttccattatagcgctgtttataataacatcaaaacaaaataaaacaaaactgggctgggcgtgatggctcatgcctgtaatcccagcactttgggaggccaaggcgggcggatcacgaggtcaggagttcgagaccagcctggccgacatagtgaaattctgtct

SEQ ID NO: 416824 - DNA, 289 bp, Homo sapiens
gacaccttgtctctaaaatgaaaattaaaagggaaaacatgatcctccagaagctgaggtggctgcctggggatcacctgctcctgaaagcacagttctggacgactgaccctgggctgcctgccctgccggggggagcccagggctctgatcctcaccctctgcaaggtgccttcctgggcggagccgcccctgccccgtccctgcggccaccacctaatttattgccgtgcgtcctgctgctgtgactgcttttgtacctttgcaataaagaattttctggtttcag

SEQ ID NO: 416825 - DNA, 2044 bp, Homo sapiens
ggtggtgtctgtgtgtgtgcacgcacgcctgccatcaaagcagcagggctgagggggtgcagcttgctggtgttcactgggggagggcctgtgggcacacatggcagagagagtggctcacacgtcgtgaggtctcccctgtgctctggtgacccgaggaggtcgtgcagcacagcgcagaagcccctgcccacgggatccggccccccagacaccgaccccacaggccgtcccggatctcagcggacacaggcaggagcgccccatcatttgacggtgagcaggactcaggctgtgtgtcctggagctacttctcaccaactgtggtcagtgcagggggaacgaggaggtcttttgggggcctggcgaggggaagggctgctgcagtctagggagagggggtgcagcctgggggatgttggtggacatggatgtggaggtggaaggaggaggacgttgcgtggagtggtgggaggaggcgggagccgtgtgcgagagcaggtggaaagccttgaggggcaggaccaggatgcagctggcttgtagaagagctcaggagtgagcctggcactccagagggcgcggcgggtggggaggcagcaggcaccagtccaggagagcttcgtggacgtggctcctgcgcgcacacccccaggagcacagccacgggctgcaggtgtggctggcctcagcactcagtcctcacccggagcctttgcctgctcctccttccaagagcactgaggcaccagtgggcttggcactccaccttgggcttccttttcctggagagccgccttgagggtccctcctgtgactggggtctctgcagcgagagccgcgggggttgcggagcccctgcctgggggagctggcggaatgcgagccgccggccgggggccgccacataagacctgcaaggtggtgcctggggccctggctccttctcggctgcccctgcccacccagtaacagcccccaccagctacagagcccaggcgggtgccagccacgctgggagggcagaggacagacagccccggggctgcgacttggttctgtgtctactgttagaagttgagtgggaagctgcaggcccgccaggaccactgggtccctacagagcaaaggcctgcgtgttcccaaacagccgttgcccccgtggccgtggtaggtaatccatattggatgtcataaggaccagggggatatttaaagagagaaacagaaaatatatagagatataaaattatattcacagtttatctacagatttttcgtaacaatctttcttttccagtttgatactgtaaatctatcagagcagagccgggggcacgggcacaggtgggagttgggagcaaagcggaggcccgggctgcccgccgtcccccttcatctccccacggactgtaccaggcagctgggccccgcaggacaggccgcagcgggtggccggttctgtcccgtcttggggttcttggtgtccacgtcttgtgggccgtgggcttctacctgcccttggcctgcagtgctttgctggagaagggactccctggtccccagggtggacggagccgctgtcaccgcccagagctgggccggggaagcacggtgtgttctgcttttcttttcagattgttgaaatttcattgtcatgatttaatatatggatttttttatttaagaaaaagacgagggactctttgtcacgtgggtttgttttctgtctccgtgcctccggcttcccaaagagatccaggtctttgcgtttccagggcgtggggaccccggccccctatgccgccacgccgccacaccgcctcaccctggcttctgtgctacttggcagttccatttcattatttattttttgtgctgctttttatcatgatataaattattgaaaacagatcacatgtgggcccgtgtctggccgccgccgccctgccccgtccctgcggccaccacctaatttattgccgtgcgtcctgctgctgtgactgcttttgtacctttgcaataaagaattttctggtttcag

SEQ ID NO: 416826 - DNA, 1914 bp, Homo sapiens
ggtggtgtctgtgtgtgtgcacgcacgcctgccatcaaagcagcagggctgagggggtgcagcttgctggtgttcactgggggagggcctgtgggcacacatggcagagagagtggctcacacgtcgtgaggtctcccctgtgctctggtgacccgaggaggtcgtgcagcacagcgcagaagcccctgcccacgggatccggccccccagacaccgaccccacaggccgtcccggatctcagcggacacaggcaggagcgccccatcatttgacggtgagcaggactcaggctgtgtgtcctggagctacttctcaccaactgtggtcagtgcagggggaacgaggaggtcttttgggggcctggcgaggggaagggctgctgcagtctagggagagggggtgcagcctgggggatgttggtggacatggatgtggaggtggaaggaggaggacgttgcgtggagtggtgggaggaggcgggagccgtgtgcgagagcaggtggaaagccttgaggggcaggaccaggatgcagctggcttgtagaagagctcaggagtgagcctggcactccagagggcgcggcgggtggggaggcagcaggcaccagtccaggagagcttcgtggacgtggctcctgcgcgcacacccccaggagcacagccacgggctgcaggtgtggctggcctcagcactcagtcctcacccggagcctttgcctgctcctccttccaagagcactgaggcaccagtgggcttggcactccaccttgggcttccttttcctggagagccgccttgagggtccctcctgtgactggggtctctgcagcgagagccgcgggggttgcggagcccctgcctgggggagctggcggaatgcgagccgccggccgggggccgccacataagacctgcaaggtggtgcctggggccctggctccttctcggctgcccctgcccacccagtaacagcccccaccagctacagagcccaggcgggtgccagccacgctgggagggcagaggacagacagccccggggctgcgacttggttctgtgtctactgttagaagttgagtgggaagctgcaggcccgccaggaccactgggtccctacagagcaaaggcctgcgtgttcccaaacagccgttgcccccgtggccgtgtttgatactgtaaatctatcagagcagagccgggggcacgggcacaggtgggagttgggagcaaagcggaggcccgggctgcccgccgtcccccttcatctccccacggactgtaccaggcagctgggccccgcaggacaggccgcagcgggtggccggttctgtcccgtcttggggttcttggtgtccacgtcttgtgggccgtgggcttctacctgcccttggcctgcagtgctttgctggagaagggactccctggtccccagggtggacggagccgctgtcaccgcccagagctgggccggggaagcacggtgtgttctgcttttcttttcagattgttgaaatttcattgtcatgatttaatatatggatttttttatttaagaaaaagacgagggactctttgtcacgtgggtttgttttctgtctccgtgcctccggcttcccaaagagatccaggtctttgcgtttccagggcgtggggaccccggccccctatgccgccacgccgccacaccgcctcaccctggcttctgtgctacttggcagttccatttcattatttattttttgtgctgctttttatcatgatataaattattgaaaacagatcacatgtgggcccgtgtctggccgccgccgccctgccccgtccctgcggccaccacctaatttattgccgtgcgtcctgctgctgtgactgcttttgtacctttgcaataaagaattttctggtttcag

SEQ ID NO: 416827 - DNA, 1020 bp, Homo sapiens
ggtggtgtctgtgtgtgtgcacgcacgcctgccatcaaagcagcagggctgagggggtgcagcttgctggtgttcactgggggagggcctgtgggcacacatggcagagagagtggctcacacgtcgtgaggtctcccctgtgctctggtgacccgaggaggtcgtgcagcacagcgcagaagcccctgcccacgggatccggccccccagacaccgaccccacaggccgtcccggatctcagcggacacaggcaggagcgccccatcatttgacgtttgatactgtaaatctatcagagcagagccgggggcacgggcacaggtgggagttgggagcaaagcggaggcccgggctgcccgccgtcccccttcatctccccacggactgtaccaggcagctgggccccgcaggacaggccgcagcgggtggccggttctgtcccgtcttggggttcttggtgtccacgtcttgtgggccgtgggcttctacctgcccttggcctgcagtgctttgctggagaagggactccctggtccccagggtggacggagccgctgtcaccgcccagagctgggccggggaagcacggtgtgttctgcttttcttttcagattgttgaaatttcattgtcatgatttaatatatggatttttttatttaagaaaaagacgagggactctttgtcacgtgggtttgttttctgtctccgtgcctccggcttcccaaagagatccaggtctttgcgtttccagggcgtggggaccccggccccctatgccgccacgccgccacaccgcctcaccctggcttctgtgctacttggcagttccatttcattatttattttttgtgctgctttttatcatgatataaattattgaaaacagatcacatgtgggcccgtgtctggccgccgccgccctgccccgtccctgcggccaccacctaatttattgccgtgcgtcctgctgctgtgactgcttttgtacctttgcaataaagaattttctggtttcag

SEQ ID NO: 416828 - DNA, 1834 bp, Homo sapiens
ggtggtgtctgtgtgtgtgcacgcacgcctgccatcaaagcagcagggctgagggggtgcagcttgctggtgttcactgggggagggcctgtgggcacacatggcagagagagtggctcacacgtcgtgaggtctcccctgtgctctggtgacccgaggaggtcgtgcagcacagcgcagaagcccctgcccacgggatccggccccccagacaccgaccccacaggccgtcccggatctcagcggacacaggcaggagcgccccatcatttgacggtgagcaggactcaggctgtgtgtcctggagctacttctcaccaactgtggtcagtgcagggggaacgaggaggtcttttgggggcctggcgaggggaagggctgctgcagtctagggagagggggtgcagcctgggggatgttggtggacatggatgtggaggtggaaggaggaggacgttgcgtggagtggtgggaggaggcgggagccgtgtgcgagagcaggtggaaagccttgaggggcaggaccaggatgcagctggcttgtagaagagctcaggagtgagcctggcactccagagggcgcggcgggtggggaggcagcaggcaccagtccaggagagcttcgtggacgtggctcctgcgcgcacacccccaggagcacagccacgggctgcaggtgtggctggcctcagcactcagtcctcacccggagcctttgcctgctcctccttccaagagcactgaggcaccagtgggcttggcactccaccttgggcttccttttcctggagagccgccttgagggtccctcctgtgactggggtctctgcagcgagagccgcgggggttgcggagcccctgcctgggggagctggcggaatgcgagccgccggccgggggccgccacataagacctgcaaggtggtgcctggggccctggctccttctcggctgcccctgcccacccagtaacagcccccaccagctacagagcccaggcgggtgccagccacgctgggagggcagaggacagacagccccggggctgcgacttggttctgtgtctactgttagaagttgagtgggaagctgcaggcccgccaggaccactgggtccctacagagcaaaggcctgcgtgttcccaaacagccgttgcccccgtggccgtggtaggtaatccatattggatgtcataaggaccagggggatatttaaagagagaaacagaaaatatatagagatataaaattatattcacagtttatctacagatttttcgtaacaatctttcttttccagtttgatactgtaaatctatcagagcagagccgggggcacgggcacaggtgggagttgggagcaaagcggaggcccgggctgcccgccgtcccccttcatctccccacggactgtaccaggcagctgggccccgcaggacaggccgcagcgggtggccggttctgtcccgtcttggggttcttggtgtccacgtcttgtgggccgtgggcttctacctgcccttggcctgcagtgctttgctggagaagggactccctggtccccagggtggacggagccgctgtcaccgcccagagctgggccggggaagcacggtgtgttctgcttttcttttcagattgttgaaatttcattatttattttttgtgctgctttttatcatgatataaattattgaaaacagatcacatgtgggcccgtgtctggccgccgccgccctgccccgtccctgcggccaccacctaatttattgccgtgcgtcctgctgctgtgactgcttttgtacctttgcaataaagaattttctggtttcag

SEQ ID NO: 416829 - DNA, 1623 bp, Homo sapiens
ggtggtgtctgtgtgtgtgcacgcacgcctgccatcaaagcagcagggctgagggggtgcagcttgctggtgttcactgggggagggcctgtgggcacacatggcagagagagtggctcacacgtcgtgaggtctcccctgtgctctggtgacccgaggaggtcgtgcagcacagcgcagaagcccctgcccacgggatccggccccccagacaccgaccccacaggccgtcccggatctcagcggacacaggcaggagcgccccatcatttgacggtgagcaggactcaggctgtgtgtcctggagctacttctcaccaactgtggtcagtgcagggggaacgaggaggtcttttgggggcctggcgaggggaagggctgctgcagtctagggagagggggtgcagcctgggggatgttggtggacatggatgtggaggtggaaggaggaggacgttgcgtggagtggtgggaggaggcgggagccgtgtgcgagagcaggtggaaagccttgaggggcaggaccaggatgcagctggcttgtagaagagctcaggagtgagcctggcactccagagggcgcggcgggtggggaggcagcaggcaccagtccaggagagcttcgtggacgtggctcctgcgcgcacacccccaggagcacagccacgggctgcaggtgtggctggcctcagcactcagtcctcacccggagcctttgcctgctcctccttccaagagcactgaggcaccagtgggcttggcactccaccttgggcttccttttcctggagagccgccttgagggtccctcctgtgactggggtctctgcagcgagagccgcgggggttgcggagcccctgcctgggggagctggcggaatgcgagccgccggccgggggccgccacataagacctgcaaggtggtgcctggggccctggctccttctcggctgcccctgcccacccagtaacagcccccaccagctacagagcccaggcgggtgccagccacgctgggagggcagaggacagacagccccggggctgcgacttggttctgtgtctactgttagaagttgagtgggaagctgcaggcccgccaggaccactgggtccctacagagcaaaggcctgcgtgttcccaaacagccgttgcccccgtggccgtggtaggtaatccatattggatgtcataaggaccagggggatatttaaagagagaaacagaaaatatatagagatataaaattatattcacagtttatctacagatttttcgtaacaatctttcttttccagtttgatactgtaaatctatccggcttcccaaagagatccaggtctttgcgtttccagggcgtggggaccccggccccctatgccgccacgccgccacaccgcctcaccctggcttctgtgctacttggcagttccatttcattatttattttttgtgctgctttttatcatgatataaattattgaaaacagatcacatgtgggcccgtgtctggccgccgccgccctgccccgtccctgcggccaccacctaatttattgccgtgcgtcctgctgctgtgactgcttttgtacctttgcaataaagaattttctggtttcag

SEQ ID NO: 416830 - DNA, 2318 bp, Homo sapiens
aacagagttcagaccttgccgtcgcgcgcgcgttaagtaccaggagaactacatagcccagcatgcaacagtctcaactttttcacggacactacatttcccagaaggcagttcgcaccgcagtgttttctgggatgggaaccacgccgcttcccagtctctgtgcgaggcgtgaagcgcggacctttcaacaagggctttattaattctcacgctgcggccctggaaagcgatggaggtggcggctaattgctccctacgggtgaagagacctctgttggatccccgcttcgagggttacaagctctctcttgagccgctgccttgttaccagctggagcttgacgcagctgtggcagaggtaaaacttcgagatgatcaatatacactggaacacatgcatgcttttggaatgtataattacctgcactgtgattcatggtatcaagacagtgtctactatattgatacccttggaagaattatgaatttaacagtaatgctggacactgccttaggaaaaccacgagaggtgtttcgacttcctacagatttgacagcatgtgacaaccgtctttgtgcatctatccatttctcatcttctacctgggttaccttgtcagatggaactggaagattgtatgtcattggaacaggtgaacgtggaaatagcgcttctgaaaaatgggagattatgtttaatgaagaacttggggatccttttattataattcacagtatctcactgctaaatgctgaagaacattctatagctaccctacttcttcgaatagagaaagaggaattggatatgaaaggaagtggtttctatgtttctctggagtgggtcactatcagtaagaaaaatcaagataataaaaaatatgaaattattaagcgtgatattctccgtggaaagtcagtgccacattatgctgctattgagcctgatggaaatggtctaatgattgtatcctacaagtctttcacatttgttcaggctggtcaagatcttgaagaaaatatggatgaagacgtatcagagaaaatcaaagaacctctgtattactggcaacagactgaagatgatttgacagtaaccatacggcttccagaagacagtactaaggaggacattcaaatacagtttttgcctgatcacatcaacattgtactgaaggatcaccagtttttagaaggaaaactctattcatctattgatcatgaaagcagtacatggataattaaagagagtaatagcttggagatttccttgattaagaagaatgaaggactgacctggccagagctagtaattggagataaacaaggggaacttataagagattcagcccagtgtgctgcaatagctgaacgtttgatgcatttgacctctgaagaactgaatccaaatccagataaagaaaaaccaccttgcaatgctcaagagttagaagaatgtgatattttctttgaagagagctccagtttatgcagatttgatggcaatacattaaaaactactcatgtggtgaatcttggaagcaaccagtaccttttctctgtcatagtggatcctaaagaaatgccctgcttctgtttgcgccatgatgttgatgccctactctggcaaccacactccagcaaacaagatgatatgtgggagcacatcgcaactttcaatgctttaggctatgtccaagcatcaaagagagacaaaaaattttttgcctgtgctccaaattactcgtatgcagccctttgtgagtgccttcgtcgagtattcatctatcgtcagcctgctcccatgtccactgtactttacaacagaaaggaaggcaggcaagtaggacaggttgctaagcagcaagtagcaagcctagaaaccaatgatcctattttaggatttcaggcaacaaatgagagattatttgttcttactaccaaaaacctctttttaataaaagtaaatacagagaattaattattctaacatattggcctctttgtactggaaaagtattcagtggtacctggaggtctggacagttatactgtaacctcttaagttttaatgtgctaaatatatcttgtatgattttttattttttaataacattggaaatatattcaagagattatgattctgtaaagctgtggaatgaagctgcagatttagagaacattggcttctgaaaaaaaaaaagagtgaagatagtactagcaagtatacttattttttaaaacaggctagaatctcatgttttatatgaaagatgtacaattcagtgtttaaaaataaaaatatttattgtgta

SEQ ID NO: 416831 - DNA, 4088 bp, Homo sapiens
aacagagttcagaccttgccgtcgcgcgcgcgttaagtaccaggagaactacatagcccagcatgcaacagtctcaactttttcacggacactacatttcccagaaggcagttcgcaccgcagtgttttctgggatgggaaccacgccgcttcccagtctctgtgcgaggcgtgaagcgcggacctttcaacaagggctttattaattctcacgctgcggccctggaaagcgatggaggtggcggctaattgctccctacgggtgaagagacctctgttggatccccgcttcgagggttacaagctctctcttgagccgctgccttgttaccagctggagcttgacgcagctgtggcagaggtaaaacttcgagatgatcaatatacactggaacacatgcatgcttttggaatgtataattacctgcactgtgattcatggtatcaagacagtgtctactatattgatacccttggaagaattatgaatttaacagtaatgctggacactgccttaggaaaaccacgagaggtgtttcgacttcctacagatttgacagcatgtgacaaccgtctttgtgcatctatccatttctcatcttctacctgggttaccttgtcagatggaactggaagattgtatgtcattggaacaggtgaacgtggaaatagcgcttctgaaaaatgggagattatgtttaatgaagaacttggggatccttttattataattcacagtatctcactgctaaatgctgaagaacattctatagctaccctacttcttcgaatagagaaagaggaattggatatgaaaggaagtggtttctatgtttctctggagtgggtcactatcagtaagaaaaatcaagataataaaaaatatgaaattattaagcgtgatattctccgtggaaagtcagtgccacattatgctgctattgagcctgatggaaatggtctaatgattgtatcctacaagtctttcacatttgttcaggctggtcaagatcttgaagaaaatatggatgaagacgtatcagagaaaatcaaagaacctctgtattactggcaacagactgaagatgatttgacagtaaccatacggcttccagaagacagtactaaggaggacattcaaatacagtttttgcctgatcacatcaacattgtactgaaggatcaccagtttttagaaggaaaactctattcatctattgatcatgaaagcagtacatggataattaaagagagtaatagcttggagatttccttgattaagaagaatgaaggactgacctggccagagctagtaattggagataaacaaggggaacttataagagattcagcccagtgtgctgcaatagctgaacgtttgatgcatttgacctctgaagaactgaatccaaatccagataaagaaaaaccaccttgcaatgctcaagagttagaagaatgtgatattttctttgaagagagctccagtttatgcagatttgatggcaatacattaaaaactactcatgtggtgaatcttggaagcaaccagtaccttttctctgtcatagtggatcctaaagaaatgccctgcttctgtttgcgccatgatgttgatgccctactctggcaaccacactccagcaaacaagatgatatgtgggagcacatcgcaactttcaatgctttaggctatgtccaagcatcaaagagagacaaaaaattttttgcctgtgctccaaattactcgtatgcagccctttgtgagtgccttcgtcgagtattcatctatcgtcagcctgctcccatgtccactgtactttacaacagaaaggaaggcaggcaagtaggacaggttgctaagcagcaagtagcaagcctagaaaccaatgatcctattttaggatttcaggcaacaaatgagagattatttgttcttactaccaaaaacctctttttaataaaagtaaatacagagaattaattattctaacatattggcctctttgtactggaaaagtattcagtggtacctggaggtctggacagttatactgtaacctcttaagttttaatgtgctaaatatatcttgtatgattttttattttttaataacattggaaatatattcaagagattatgattctgtaaagctgtggaatgaagctgcagatttagagaacattggcttctgaaaaaaaaaaagagtgaagatagtactagcaagtatacttattttttaaaacaggctagaatctcatgttttatatgaaagatgtacaattcagtgtttaaaaataaaaatatttattgtgtactctgttcgttgattagttgctacaggctgtacctataagatgtacaggataatagttaaatgttgagtattgtacatatgtatttaagtggattgaataactgagtctacatggaggaggaaatgctagagaacagcaggtctaatattttttaagtttactgagagacctttattattattttcaaattaagtatagctttatgtaacttttagccagttgctctgccacagacatagacaaagagagataagatttcacattatccatcactgcataacaaaccacaccaaaactcagtggtttaaaacaaggacttttattatttttcacgattcagtgagttggctgtctctgctgtacagggcctctcagcctccagtagactagacgaatcttctttccatagtagagaaaacatcttaagagagcaagctccaatatgcaagagcttatcgatcctgtacatctatcatatttactaatgttccattggacaaagcaaatcacatggccaagtctagagtcagaatgaggggactacacaagctgacagcggatggtatgactcattgggggccattgatggaacaatcttaccacacaaggacaaattataatttatccttgtggctctctttatttttctaacaacttcaacaaaataatcctgtttatatgttatagtttcttgccacaaattttgttttttcaaacttacctttccaggtttgttttagtatgtatgtacctggaaatttttattactttttataccatttcaagatatgtatcttatataaacctcaagttggattttatattttaataaggaagttaagaccttcatttaagaggcagaagattaagataagaaatataagatagaaaagctttgttcctaacatatcttttgcctgtctgggcaagtatttgactcaactaaattttaatgaacgaatgaatgacagacagagaggaggaaaaaagatgaggattgcatacatgttctaaaccctttgtcagattgcagtttcctagagagtattgaggtgctaggtagaaagttaggaaaggtcctgaggactggtattgacaattggagtcctaatagtactctattcgtattaggaaagagagactagataccaaacatcacgagatcatagagatggaaaactgtatagtaaccaaaaaccaaaacagtgatatttccagaactttttagtattgttgtaaaacttcatgaaacaaaagaccatttaaatagtgaattattaaaaatctttatgatgggaaagtagatctaaattttctctaaaattttccccaaagataatatcctcttagggaacataagaaaaatgtataataaaaatgtggtgcttaattaaccatgactatgtatatattgccaattttagtaatcaatattctttgtgcatgtgatttttttgcatgattaatgttgaattgaaagctctcaggataattaatcctaaatattgtcgcatgttgacctacgttaaaagatgaataggtctagagccgtgatttcaagctattttcctgaaatgcttcagggattccataaacatttaaacaatgttctaaggtacatatacttagaacattgagatatatactacaagtgctaagaatatagtaccttgtatttttgttgatttttatcatgttttaaataggaatttataaaatatttatgatagtaataaagtagtattttatgtgttttgcaaaataagagt

SEQ ID NO: 416832 - DNA, 3712 bp, Homo sapiens
aacagagttcagaccttgccgtcgcgcgcgcgttaagtaccaggagaactacatagcccagcatgcaacagtctcaactttttcacggacactacatttcccagaaggcagttcgcaccgcagtgttttctgggatgggaaccacgccgcttcccagtctctgtgcgaggcgtgaagcgcggacctttcaacaagggctttattaattctcacgctgcggccctggaaagcgatggaggtggcggctaattgctccctacgggtgaagagacctctgttggatccccgcttcgagggttacaagctctctcttgagccgctgccttgttaccagctggagcttgacgcagctgtggcagaggtaaaacttcgagatgatcaatatacactggaacacatgcatgcttttggaatgtataattacctgcactgtgattcatggtatcaagacagtgtctactatattgatacccttggaagaattatgaatttaacagtaatgctggacactgccttaggaaaaccacgagaggtgtttcgacttcctacagatttgacagcatgtgacaaccgtctttgtgcatctatccatttctcatcttctacctgggttaccttgtcagatggaactggaagattgtatgtcattggaacaggtgaacgtggaaatagcgcttctgaaaaatgggagattatgtttaatgaagaacttggggatccttttattataattcacagtatctcactgctaaatgctgaagaacattctatagctaccctacttcttcgaatagagaaagaggaattggatatgaaaggaagtggtttctatgtttctctggagtgggtcactatcagtaagaaaaatcaagataataaaaaatatgaaattattaagcgtgatattctccgtggaaagtcagtgccacattatgctgctattgagcctgatggaaatggtctaatgattgtatcctacaagtctttcacatttgttcaggctggtcaagatcttgaagaaaatatggatgaagacgtatcagagaaaatcaaagaacctctgtattactggcaacagactgaagatgatttgacagtaaccatacggcttccagaagacagtactaaggaggacattcaaatacagtttttgcctgatcacatcaacattgtactgaaggatcaccagtttttagaaggaaaactctattcatctattgatcatgaaagcagtacatggataattaaagagagtaatagcttggagatttccttgattaagaagaatgaaggactgacctggccagagctagtaattggagataaacaaggggaacttataagagattcagcccagtgtgctgcaatagctgaacgtttgatgcatttgacctctgaagaactgaatccaaatccagataaagaaaaaccaccttgcaatgctcaagagttagaagaatgtgatattttctttgaagagagctccagtttatgcagatttgatggcaatacattaaaaactactcatgtggtgaatcttggaagcaaccagtaccttttctctgtcatagtggatcctaaagaaatgccctgcttctgtttgcgccatgatgttgatgccctactctggcaaccacactccagcaaacaagatgatatgtgggagcacatcgcaactttcaatgctttaggctatgtccaagcatcaaagagagacaaaaaattttttgcctgtgctccaaattactcgtatgcagccctttgtgagtgccttcgtcgagtattcatctatcgtcagcctgctcccatgtccactgtactttacaacagaaaggaaggcaggcaagtaggacaggttgctaagcagcaagtagcaagcctagaaaccaatgatcctattttaggatttcaggcaacaaatgagagattatttgttcttactaccaaaaacctctttttaataaaagtaaatacagagaattaattattctaacatattggcctctttgtactggaaaagtattcagtggtacctggaggtctggacagttatactgtaacctcttaagttttaatgtgctaaatatatcttgtatgattttttattttttaataacattggaaatatattcaagagattatgattctgtaaagctgtggaatgaagctgcagatttagagaacattggcttctgaaaaaaaaaaagagtgaagatagtactagcaagtatacttattttttaaaacaggctagaatctcatgttttatatgaaagatgtacaattcagtgtttaaaaataaaaatatttattgtgtactctgttcgttgattagttgctacaggctgtacctataagatgtacaggataatagttaaatgttgagtattgtacatatgtatttaagtggattgaataactgagtctacatggaggaggaaatgctagagaacagcaggtctaatattttttaagtttactgagagacctttattattattttcaaattaagtatagctttatgtaacttttagccagttgctctgccacagacatagacaaagagagataagatttcacattatccatcactgcataacaaaccacaccaaaactcagtggtttaaaacaaggacttttattatttttcacgattcagtgagttggctgtctctgctgtacagggcctctcagcctccagtagactagacgaatcttctttccatagtagagaaaacatcttaagagagcaagctccaatatgcaagagcttatcgatcctgtacatctatcatatttactaatgttccattggacaaagcaaatcacatggccaagtctagagtcagaatgaggggactacacaagctgacagcggatggtatgactcattgggggccattgatggaacaatcttaccacacaaggacaaattataatttatccttgtggctctctttatttttctaacaacttcaacaaaataatcctgtttatatgttatagtttcttgccacaaattttgttttttcaaacttacctttccaggtttgttttagtatgtatgtacctggaaatttttattactttttataccatttcaagatatgtatcttatataaacctcaagttggattttatattttaataaggaagttaagaccttcatttaagaggcagaagattaagataagaaatataagatagaaaagctttgttcctaacatatcttttgcctgtctgggcaagtatttgactcaactaaattttaatgaacgaatgaatgacagacagagaggaggaaaaaagatgaggattgcatacatgttctaaaccctttgtcagattgcagtttcctagagagtattgaggtgctaggtagaaagttaggaaaggtcctgaggactggtattgacaattggagtcctaatagtactctattcgtattaggaaagagagactagataccaaacatcacgagatcatagagatggaaaactgtatagtaaccaaaaaccaaaacagtgatatttccagaactttttagtattgttgtaaaacttcatgaaacaaaagaccatttaaatagtgaattattaaaaatctttatgatgggaaagtagatctaaattttctctaaaattttccccaaagataatatcctcttagggaacataagaaaaatgtataataaaaatgtggtgcttaatta

SEQ ID NO: 416833 - DNA, 2410 bp, Homo sapiens
aacagagttcagaccttgccgtcgcgcgcgcgttaagtaccaggagaactacatagcccagcatgcaacagtctcaactttttcacggacactacatttcccagaaggcagttcgcaccgcagtgttttctgggatgggaaccacgccgcttcccagtctctgtgcgaggcgtgaagcgcggacctttcaacaagggctttattaattctcacgctgcggccctggaaagcgatggaggtggcggctaattgctccctacgggtgaagagacctctgttggatccccgcttcgagggttacaagctctctcttgagccgctgccttgttaccagctggagcttgacgcagctgtggcagaggtaaaacttcgagatgatcaatatacactggaacacatgcatgcttttggaatgtataattacctgcactgtgattcatggtatcaagacagtgtctactatattgatacccttggaagaattatgaatttaacagtaatgctgatactcaagtatcttaatcattctattggatattgtacccatttatctgattgataattagacttctagcaacctccgtcatgtataaccaggacactgccttaggaaaaccacgagaggtgtttcgacttcctacagatttgacagcatgtgacaaccgtctttgtgcatctatccatttctcatcttctacctgggttaccttgtcagatggaactggaagattgtatgtcattggaacaggtgaacgtggaaatagcgcttctgaaaaatgggagattatgtttaatgaagaacttggggatccttttattataattcacagtatctcactgctaaatgctgaagaacattctatagctaccctacttcttcgaatagagaaagaggaattggatatgaaaggaagtggtttctatgtttctctggagtgggtcactatcagtaagaaaaatcaagataataaaaaatatgaaattattaagcgtgatattctccgtggaaagtcagtgccacattatgctgctattgagcctgatggaaatggtctaatgattgtatcctacaagtctttcacatttgttcaggctggtcaagatcttgaagaaaatatggatgaagacgtatcagagaaaatcaaagaacctctgtattactggcaacagactgaagatgatttgacagtaaccatacggcttccagaagacagtactaaggaggacattcaaatacagtttttgcctgatcacatcaacattgtactgaaggatcaccagtttttagaaggaaaactctattcatctattgatcatgaaagcagtacatggataattaaagagagtaatagcttggagatttccttgattaagaagaatgaaggactgacctggccagagctagtaattggagataaacaaggggaacttataagagattcagcccagtgtgctgcaatagctgaacgtttgatgcatttgacctctgaagaactgaatccaaatccagataaagaaaaaccaccttgcaatgctcaagagttagaagaatgtgatattttctttgaagagagctccagtttatgcagatttgatggcaatacattaaaaactactcatgtggtgaatcttggaagcaaccagtaccttttctctgtcatagtggatcctaaagaaatgccctgcttctgtttgcgccatgatgttgatgccctactctggcaaccacactccagcaaacaagatgatatgtgggagcacatcgcaactttcaatgctttaggctatgtccaagcatcaaagagagacaaaaaattttttgcctgtgctccaaattactcgtatgcagccctttgtgagtgccttcgtcgagtattcatctatcgtcagcctgctcccatgtccactgtactttacaacagaaaggaaggcaggcaagtaggacaggttgctaagcagcaagtagcaagcctagaaaccaatgatcctattttaggatttcaggcaacaaatgagagattatttgttcttactaccaaaaacctctttttaataaaagtaaatacagagaattaattattctaacatattggcctctttgtactggaaaagtattcagtggtacctggaggtctggacagttatactgtaacctcttaagttttaatgtgctaaatatatcttgtatgattttttattttttaataacattggaaatatattcaagagattatgattctgtaaagctgtggaatgaagctgcagatttagagaacattggcttctgaaaaaaaaaaagagtgaagatagtactagcaagtatacttattttttaaaacaggctagaatctcatgttttatatgaaagatgtacaattcagtgtttaaaaataaaaatatttattgtgta

SEQ ID NO: 416834 - DNA, 2700 bp, Homo sapiens
aacagagttcagaccttgccgtcgcgcgcgcgttaagtaccaggagaactacatagcccagcatgcaacagtctcaactttttcacggacactacatttcccagaaggcagttcgcaccgcagtgttttctgggatgggaaccacgccgcttcccagtctctgtgcgaggcgtgaagcgcggacctttcaacaagggctttattaattctcacgctgcggccctggaaagcgatggaggtggcggctaattgctccctacgggtgaagagacctctgttggatccccgcttcgagggttacaagctctctcttgagccgctgccttgttaccagctggagcttgacgcagctgtggcagaggtaaaacttcgagatgatcaatatacactggaacacatgcatgcttttggaatgtataattacctgcactgtgattcatggtatcaagacagtgtctactatattgatacccttggaagaattatgaatttaacagtaatgctggacactgccttaggaaaaccacgagaggtgtttcgacttcctacagatttgacagcatgtgacaaccgtctttgtgcatctatccatttctcatcttctacctgggttaccttgtcagatggaactggaagattgtatgtcattggaacaggtgaacgtggaaatagcgcttctgaaaaatgggagattatgtttaatgaagaacttggggatccttttattataattcacagtatctcactgctaaatgctgaagaacattctatagctaccctacttcttcgaatagagaaagaggaattggatatgaaaggaagtggtttctatgtttctctggagtgggtcactatcagtaagaaaaatcaagataataaaaaatatgaaattattaagcgtgatattctccgtggaaagtcagtgccacattatgctgctattgagcctgatggaaatggtctaatgattgtatcctacaagtctttcacatttgttcaggctggtcaagatcttgaagaaaatatggatgaagacgtatcagagaaaatcaaagaacctctgtattactggcaacagactgaagatgatttgacagtaaccatacggcttccagaagacagtactaaggaggacattcaaatacagtttttgcctgatcacatcaacattgtactgaaggatcaccagtttttagaaggaaaactctattcatctattgatcatgaaagcagtacatggataattaaagagagtaatagcttggagatttccttgattaagaagaatgaaggactgacctggccagagctagtaattggagataaacaaggggaacttataagagattcagcccagtgtgctgcaatagctgaacgtttgatgcatttgacctctgaagaactgaatccaaatccagataaagaaaaaccaccttgcaatgctcaagagttagaagaatgtgatattttctttgaagagagctccagtttatgcagatttgatggcaatacattaaaaactactcatgtggtgaatcttggaagcaaccagtaccttttctctgtcatagtggatcctaaagaaatgccctgcttctgtttgcgccatgatgttgatgccctactctggcaaccacactccagcaaacaagatgatatgtgggagcacatcgcaactttcaatgctttaggctatgtccaagcatcaaagagagacaaaaaattttttgcctgtgctccaaattactcgtatgcagccctttgtgagtgccttcgtcgagtattcatctatcgtcagcctgctcccatgtccactgtactttacaacagaaaggaaggcaggcaagtaggacaggttgctaagcagcaagtagcaagcctagaaaccaatgatcctattttaggatttcaggcaacaaatgagagattatttgttcttactaccaaaaacctctttttaataaaagtaaatacagagaattaattattctaacatattggcctctttgtactggaaaagtattcagtggtacctggaggtctggacagttatactgtaacctcttaagttttaatgtgctaaatatatcttgtatgattttttattttttaataacattggaaatatattcaagagattatgattctgtaaagctgtggaatgaagctgcagatttagagaacattggcttctgaaaaaaaaaaagagtgaagatagtactagcaagtatacttattttttaaaacaggctagaatctcatgttttatatgaaagatgtacaattcagtgtttaaaaataaaaatatttattgtgtaaaaaaaaaaaaaaaaaaaaaaaaaaaaaaaaaaaaaaaaaaaaaaaaaaaacttaaataaatttagtcgccaaattcgtcacagagccaaattcaactctaccttactcccagcaaacttttcccaaacaatttacccaaaaatagtctacctgttagaaattgaaaattgtctccaaaaatttgggccctctagggattgccgaaagatttttcccaggcgtatatatccaagggcttaaccccaataccttttcgataatggaattacttcaaaaaagttctctcagggtacgccaaatcttaaaacccccaaatctagccgcttctacctaacagtttattagaccactccgttgtttctcaccccttttggtgcggtg

SEQ ID NO: 416835 - DNA, 1049 bp, Homo sapiens
gattatgattttattggtcataggtttgcaattcatttttaattactgctgtaaccttaaaatttttaaagatgaagaaacccattcccttgtttatttgttttacttatttacttattttattttctggactaagaatccaaatccagataaagaaaaaccaccttgcaatgctcaagagttagaagaatgtgatattttctttgaagagagctccagtttatgcagatttgatggcaatacattaaaaactactcatgtggtgaatcttggaagcaaccagtaccttttctctgtcatagtggatcctaaagaaatgccctgcttctgtttgcgccatgatgttgatgccctactctggcaaccacactccagcaaacaagatgatatgtgggagcacatcgcaactttcaatgctttaggctatgtccaagcatcaaagagagacaaaaaattttttgcctgtgctccaaattactcgtatgcagccctttgtgagtgccttcgtcgagtattcatctatcgtcagcctgctcccatgtccactgtactttacaacagaaaggaaggcaggcaagtaggacaggttgctaagcagcaagtagcaagcctagaaaccaatgatcctattttaggatttcaggcaacaaatgagagattatttgttcttactaccaaaaacctctttttaataaaagtaaatacagagaattaattattctaacatattggcctctttgtactggaaaagtattcagtggtacctggaggtctggacagttatactgtaacctcttaagttttaatgtgctaaatatatcttgtatgattttttattttttaataacattggaaatatattcaagagattatgattctgtaaagctgtggaatgaagctgcagatttagagaacattggcttctgaaaaaaaaaaagagtgaagatagtactagcaagtatacttattttttaaaacaggctagaatctcatgttttatatgaaagatgtacaattcagtgtttaaaaataaaaatatttattgtgta

SEQ ID NO: 416836 - DNA, 1684 bp, Homo sapiens
  misc_feature (1634)..(1634): n is a, c, g, or t
aacagagttcagaccttgccgtcgcgcgcgcgttaagtaccaggagaactacatagcccagcatgcaacagtctcaactttttcacggacactacatttcccagaaggcagttcgcaccgcagtgttttctgggatgggaaccacgccgcttcccagtctctgtgcgaggcgtgaagcgcggacctttcaacaagggctttattaattctcacgctgcggccctggaaagcgatggaggtggcggctaattgctccctacgggtgaagagacctctgttggatccccgcttcgagggttacaagctctctcttgagccgctgccttgttaccagctggagcttgacgcagctgtggcagaggtaaaacttcgagatgatcaatatacactggaacacatgcatgcttttggaatgtataattacctgcactgtgattcatggtatcaagacagtgtctactatattgatacccttggaagaattatgaatttaacagtaatgctggacactgccttaggaaaaccacgagaggtgtttcgacttcctacagatttgacagcatgtgacaaccgtctttgtgcatctatccatttctcatcttctacctgggttaccttgtcagatggaactggaagattgtatgtcattggaacaggtgaacgtggaaatagcgcttctgaaaaatgggagattatgtttaatgaagaacttggggatccttttattataattcacagtatctcactgctaaatgctgaagaacattctatagctaccctacttcttcgaatagagaaagaggaattggatatgaaaggaagtggtttctatgtttctctggagtgggtcactatcagtaagaaaaatcaagataataaaaaatatgaaattattaagcgtgatattctccgtggaaagtcagtgccacattatgctgctattgagcctgatggaaatggtctaatgattgtatcctacaagtctttcacatttgttcaggctggtcaagatcttgaagaaaatatggatgaagacgtatcagagaaaatcaaagaacctctgtattactggcaacagactgaagatgatttgacagtaaccatacggcttccagaagacagtactaaggaggacattcaaatacagtttttgcctgatcacatcaacattgtactgaaggatcaccagtttttagaaggaaaactctattcatctattgatcatgaaagcagtacatggataattaaagagagtaatagcttggagatttccttgattaagaagaatgaaggactgacctggccagagctagtaattggagataaacaaggggaacttataagagattcagcccagtgtgctgcaatagctgaacgtttgatgcatttgacctctgaagaactgaatccaaatccagataaagaaaaaccaccttgcaatgctcaagagttagaagaatgtgatattttctttgaagagagctccagtttatgcagatttgatggcaatacattaaaaactactcatgtggtgaatcttggaagcaaccagtactttttcatcctgttcatgatatcctcttgtttttctttagcttcctcatatttgtcagctaaacgctcagccatctcgncaggagggttctagtaatgacgtcgtaaaacgagatcttgtgctaggctc

SEQ ID NO: 416837 - DNA, 724 bp, Homo sapiens
aacagagttcagaccttgccgtcgcgcgcgcgttaagtaccaggagaactacatagcccagcatgcaacagtctcaactttttcacggacactacatttcccagaaggcagttcgcaccgcagtgttttctgggatgggaaccacgccgcttcccagtctctgtgcgaggcgtgaagcgcggacctttcaacaagggctttattaattctcacgctgcggccctggaaagcgatggaggtggcggctaattgctccctacgggtgaagagacctctgttggatccccgcttcgagggttacaagctctctcttgagccgctgccttgttaccagctggagcttgacgcagctgtggcagaggtaaaacttcgagatgatcaatatacactggaacacatgcatgcttttggaatgtataattacctgcactgtgattcatggtatcaagacagtgtctactatattgatacccttggaagaattatgaatttaacagtaatgctggacactgccttaggaaaaccacgagaggtgtttcgacttcctacagatttgacagcatgtgaaacaaaccggtctttttggtggccatttccttaatttttccccccccaaaaaatttttttttattcccccctttttccccaaaaatttttttttccccccctttttttttttttcccccctttaaacccttggggttaccttgtcagatggaactgg

SEQ ID NO: 416838 - DNA, 4966 bp, Homo sapiens
aggtgcgagtccccactgctggggaggcggcgggccccggctcccctcggccgcctagcccgcctcgcccgcccggggttggcggggagggaacagctgggcggccccagagcccctcggaggacaatgcgcccggcgctcggccaccctcgctcggtctcctccgcgtccggttccttcccgccgcccccggcagccgcccggctgcagcccctcttcctccgcgggggctccttccgcggccggagaggctccggcgacagcagcaccagcaccagcaccagccgcgggggaggcggcggcagacgcggcgggggcggcggctccccgagcagcagcacgggcgccgagcgcgaggacgacgacgagagcctcagcgtcagcaagccgctggtgcccaacgccgcgctcctggggccgccggctcaggtgggcgcccccgccggccccgcgcctgtcgccttctcctcctcagcggccacctcctcctccacctccacgcccacctcctcctgcagcatgacagccgcggacttcggcgggggcgccgcggccggggccgtcgggggccccgggagccgctcggcggggggcgcgggcggcaccgggaccggcagcggcgcctcctgctgcccgtgttgctgctgctgcggctgcccagaccgccccggccgcagaggtcggcgccgcggctgcgcccccagtcccaggtgccgctggggctaccaggcgctgtccgtggtgctgctgctggcgcagggcggcctgctggacctgtacctcatcgccgtcaccgacctgtactggtgctcctggatcgccactgacctggtggtggtggtgggctgggccatcttcttcgccaagaacagccggggccgtcggggcggcgcagccagcggcgcgcacaaccaccacctgcaccaccaccacgccgcgccgcccctgcatctgcccgccccctcggccgctaccgctggggccaaggcacgcggagcccgcgggggcgccggcggcgcggggggcggcctgggggcggccgcggcagcgggcgagttcgccttcgcctacctggcctggcttatctactccatcgccttcactcccaaggtggtgctgatcctgggcacgtccatcctagacctcatcgagctacgcgcgcccttcggcaccacgggcttccgtctcaccatggcgctgtcggtgcccctgctctacagcttggtgcgggccatcagcgaggcgggcgcgcccccgggatcggcaggacccctgctgctgcagccccagcggcaccgcgcggccggatgcttcctgggcacgtgcttggacctgctcgacagcttcacgctggtggagctgatgctggagggccgcgtgccgctgcccgcgcacctgcgctacctgcttatcgccgtctacttcctcaccctcgcctcgccggtgctctggctctacgagctcaacgccgcggccgcagcggctgcatcctggggccaggcctccgggcctggcagctgcagccgccttctgcgcctgctgggcggctgcctggtggacgtgcccttgctggcgctgcgctgcctcctggtggtcagctaccagcagcccctctccatcttcatgctcaagaacctcttcttcctcggctgccggggcctggaggccctggagggctgctgggaccggggcaatcgggcctccccgagtcgggccagagggggctacggtgctccgccctccgcccctccaccacctccgccaccacctcagggaggctcccagctgggccactgcatctcggagaacgaggggggtgctcatggctatgtcaacaccctggctgtggcctctcagaattgagggtgaagggcacgggtccttgtttttgggttgagagtccccaacccccttgtcttctaccttctgtcacctagatttgatcagggtctatttggaagaggtaacccttttcagggctaagggccagggtgtccttctgcaccctggggtgaggacggcttggagggagaccagcagttaacggtgagggaggtaggtgcacttaccctctcctctcttctcctatcctaccccaatcctgacctccaaggggctggtacctctgcttcttgctttgcccacctccactctaattcccatccattaggaggagaggggtgctgggccttggaccttctcccttgcttagaagtgccagcctcttttaggctgtggttagtggccattgtcccatgccttgaaattgacccagaacccactttccactgatgtgtctcttggatttcttccaggtgatagatacaaagtgtatgtctctgtgtgtgtagtgttgttttctcgtgtccaccctgtggccctttgcaatgggtaggagatctggggaggccctgccccctacaccatacttatcaccaccctcctcttttctgcctggatttgtgaccatgaattcccaggaagagctgggcccctgggagctgcccaggtactccccttgaagggagaatctcacccaggatcttcctcaatactgctcctctcttctcagctcagggagaggaggggatccattctctaaggaccaaactgcaccctttcttgggtgagtgagcatttctacctccgtgctttcaacttttgttgcatcatgcactgatgctgcttgcaaaaaatgaagacaaaatactcagaagttgcatttgccatggccactggctccagctggggtttggtgccagtgttattacagggtctgcggagtatcagccattggcttggcctctctctgttcctccctctgcacctagaactcttatccttcctgtggtttggtgccgactgggtcggatctgggcttagagtaatagctttggtgggtttcctggatggatgtgaagttgggcctcccatgggcccaagggagtaggaagccccattccccacctgtccttcctctaggaagtgtagatcagaaagtgaggtggtgacctcccacctctggtctggttaagagtctcactagggccaaggcaggctgcagaactttccctcttcctctcattgagggtgatgacaagagacatccggggactgtgcacttacagtcggtgtggaatgtcactcttgcagtctttgaggcaggataagtatttttacatattttaagggtgcaggaggacagcagctaacaaggccaggaaatactcacttccctccaccctcaacaggatgtggtgggggtgaaacttgaagaatttttgtttccccttctcccttcttacgtttgggaagttttatgtagtgtaacaaactctagacgagttaccagaagatgtggattctagttctgattctgtcactcattggctttgagtgacatatttttatttcctgggcctgttttctcacattaaaaaagtagaagttagatgagtgatctctaaggttgaaggtaatttcagctctcacattcttttgagtttgtggctcttgaaagccctggtcctgatgctccctgtaaaggtggctgggagagaagccagccaggctgcacttgcagaacattccctgctctgtactgggtgtgtgaagccccagcagagaaggccggagggagggcttgggtgcctgggctgggtgtggggcagggcctggcacagctgcagagtgcacagggagggtcagaagtgccaagtcactggccgttaactcagcacccaggccaagcccccgcctcccacttgaagccccctcttacaactgttttgggggcttggagcagaagacacccttgtagacagacataagaggggcagaaggcttgaccagagttctcttgagcctcctcatgctctcagagcagggaacagcgggggaaaatgtttacactccatgcacaatctgtgcttccagtccctcaccctatgtggcccaatagctggctggatttcacacttaattggtatttttttctgccttcttcccctgcccccactgactcctctcctctccctttgattgtactcaaggttctggggcctgggccctgggtgggtaccaacagctgctcgctgttcccatgtcctctctccagctttgctgtgtttctctgctacctaatctcagtgactgtgaaaggacattgtgtctgagccatgcccagccgctggctggccccctgatctgccccccttctattgtttggatggccatctcctgctgggcctccctgactgtaaaatctctgtactgtttgttaggtttttggtgggaggctgtgataagttccaatgagctgccacttccctggatatgtcaagaagctgatggcaacttggccaattctggcagatatcaggcccccagttcagccccagtcaccctcttttacacatgtgggtcaaccactgtgtgctcagagggtcagtcccttcctctgctgtgtttttcttgagtccttgcactcacttcccctgccccagtcacgatgacccctaaagcttcctttgcccttgctttctagggcatccctagtgaaggggcaaacctgagatttctccgtggacctgacagccaaggcagggcactgtctcctgaggccagtgccagcacgtgcatggttcacagaaaaggatcctgggctcagaatctcgagaaccgcctgctcctaacaattcagcaagtcaggggcttcctctctgttagtccccaaatccttacttattttaaaaagactagaccctctctaaagactgttccattttaacatgtcctgattctgcatccgtgggttttgtgaaagagagctagctggcggttagagcctggaagaaggagggaagtggcacctcactagcatttatcacttttttccttctctttttaaaaataaaaccagactctgttctgaaaataaaaaacttgagacttgtaaaaaaaaaac

SEQ ID NO: 416839 - DNA, 311 bp, Homo sapiens
gagaatccgtcttaaaaaaaaaaaaagaaaattatagagggagatgaggtgggacagagtctggcagttcatcagggggactgagaaggtggcatttggaggagaggaggcagtgagctgtgcagtgtccaggcagccacccttcccagcggccaccatgacggtgtcctcattgctttgaccattagtaatcattcattcattcattcatttatccgacgtcagctggaggccctgcccgcggggcatgcgctgagatttgggaggccttccgggatgctgcgctccagcggggaaggccgactggggct

SEQ ID NO: 416840 - DNA, 438 bp, Homo sapiens
atacaaaaaattagctgggcctggtggcaggtgcctgtagtcccagctactcgggaggctgaggcaggagaatggcgtgaacccgggaggcggagttggcagtgagccgagatggtgccactgcactccagcctgggcgacagagcaagactcttgtctcaaaaaaaaaaaaaaaaagaaagacgtcacttcacagattctaaggatttttggagttggataccaggaaaccggaagactaaatgtatacatatttcacaacatcacaattactgtgacagttttttttaaactatgttaaattacattaattgattatgttagtaattgtattagtttgctcagggtgccattgtaactacccaacatattgtccctgcccactgcctagactttatcaagacaggggaattgcaataaagagtttaattcacacag

SEQ ID NO: 416841 - DNA, 356 bp, Homo sapiens
catttgatctccagcaaagctgtgtcgaataaaggattccactctagtttgttgagaaaagtaaattggggctgggcgcagcggttcacgcctgtaatcccagcactttgggaggccgaggctggcggaccacatgaggtcaggagttcgagaccagcctgaccaacatggtgaaaccctgtctctactaaaggtacaaaaattagccaggcgtggtggtgtgagtctgtgatcccagctactcgggaggctgaggcaggataattgcttgaacccggaggcagaggttgcagtgagccaggattgcaccactgcactccagcctgggtaacaagagtgagactctgtctcaaaaa

SEQ ID NO: 416842 - DNA, 560 bp, Homo sapiens
ccattctgttattattgaatgaatgttttgtgtatatctctgctgttgcacatatgagtataggtgaggttgtcattgtttgctctgggattcagggagggagtcactttgcataaacctttttttgcatttaatttcttgaatgttcttataaagaagacattatgttggcattcttcatttttatcctgccaacagagtgcttatgagcatgtctgcattttgatcaaaatttaaacagaagagtgaaaatacatttgaaatgaaccctttcagaggaaccctggcaaagctgtatagactggacagagtgagaaaacttccacagccacctgttcacctttctcctcatcttccactgtgttcaatatgtatgttccaagccatagagataattgggattttctcccaggtagcttctttcttctcctgtcactggactaaaatctctgacatgtcaaaaatgccttaaattttaatgaactctccgaaaatgtagttgatattggagaatttattttatttctaattttagatattaaatatattttgtcagcaca

SEQ ID NO: 416843 - DNA, 347 bp, Homo sapiens
gatgaatatacacacagaaataaacctgcaaagctacaagctaaactctaagtctggttatccctgggaggtgggattgtgaggaggacgtattctttgtagttcatgcatttctctattgatggaatgttttacgtaagcaatgcattatattcataattaggaataaaatgtaaagctatttcccatttttttaaaaaagtaatgataataatgatgcacttaatttgtccattcttcagctaaaacaccaaacaatatggaataaattcaagaaactagcttattttaaaatatatccagaaacatattttatatattaaaacgagattaaatggaatatacct

SEQ ID NO: 416844 - DNA, 366 bp, Homo sapiens
ggcaacagagtgagaccctggctaaaaagaaaaaagaaaaaaagcagattctcattcagttggtctgggaggggattctttgtctgatggtcttggtgatatgacactgaggttgctggagattgagcagtagttaaaaagtcttcctaagggttaaaatggaaatgcactggtttttttttgtttttttgtttttgtttttttttgagatggagtcttgctctgtcacccaggctggagtgcagtggtgtgatctcggctcactgcagcctccgcctctagggtttaagcaatcctcccaagtagctgggattatagccacccaccaccaagcctggctaatttttgtactttttttttattggc

SEQ ID NO: 416845 - DNA, 410 bp, Homo sapiens
tgaacataatttgttttttgagacgaagtcttgcttcgtcgcccagggtggagtgtagtgttgtgatcacagctcgctgtggcctcaacctcctgggttcaagtgatcctcccacctcagcctctcaagtagcttgaattacagttgtatgccaccatgcctagccattttttaatttaaaaattttttggtagcaatggggtctgaatatgtggcctaggctgatctcaaactcctgggctcaagcatccctcctgcctcagcctcccaaagtgcttgggattacgggtatgaggcaccatgcccagcctgaacttgatttttttgttgtttccttttcataacaaacatcaaatgccttcagtgtactagttcttctaggttctggaataaaaatgagcaagaggttt

SEQ ID NO: 416846 - DNA, 293 bp, Homo sapiens
cctctctagccatgacctctctccagctccactgaggattgtgctggaacctcaaactcaaacatgtttaaagcaaaactgatactcttcccaatcaaatatccaatcatgcacttgacttgtctatttgtcatcatcaccaaacatgctcattgtcattattcaaatttgaaatctttatcaccttagcttagctcgtcacccactaggtccacctcccatccatcctgccatccatttaccctacaaatagcttcgcataggattgggccttcacaaccattttcccatct

SEQ ID NO: 416847 - DNA, 377 bp, Homo sapiens
ggaccacggaggtcctgttccctgctgtcacgcagagcctcatgcagcacctggcatgtgggaagtgctcaacgaatatttgttgaattagaaataaacagcctgggagcactttgggaggctgaggtgggtggttcacctgaggtcaagagtttgagaccagcctggccaacatggtgaaaccccatctccactaaaaatatgaaaaaattagccaggcctggtggcgggagcctgtagtcccagctactacagctactagggaggctgaggcaggagaatcgctcgaacccgggaggcagaggttgcagtgagctgagatggtgccactgcattccagcctgggcaacagagtgagactgcgtctcaaaaaatta

SEQ ID NO: 416848 - DNA, 120 bp, Homo sapiens
aatatcacaaataagtagcaagggtcctcactatcacaatctcataacccacctttcatgtagagaccacgagaaaacaagtttgaaaggtgtttagccaaagtcaaaggcatttcgatc

SEQ ID NO: 416849 - DNA, 917 bp, Homo sapiens
ggctgcagtgagccatgatcacgccactgcactccagcctgggcaacagagcaagaccgcctcaaaaaaaaaaaaaaaaaggctgggacagtggctcatgcctgcaatcccagcactggaaggccgaggcaggtggatcacctgaggtcgggagtttgaggccaggctggcaacggtaaaactccatctctactaaaaatacaaaaattagtcacgcatggtggcgcacgctaatcccagctactggggaggctgaggtgggagaattgcttgaacccaggaggtggagggcagtgagctgagattgtgccactgcactacagcctggacaacaagcaagactctgtcaaaaaaaaaaaaaaaaaagagaagagaagagagccctgtgcaaggtgggaaaaaaatgaaaactataactaagaatttaatatctcacctttctttttttcttaacaacaacaaaaagatttttagaagtaattgaatgaatttcaaaggttttggtagacatggccatctgctcctcagttcaggctgcaggtgtaacttcagctatatcccttcctgccgctgaaaatggtgtatgttcaggtgtgggaagatcaggcagctggctttggcagagcaagaggcttcagagcaaaagctagcatatttagatgtatattattatatcatgtcactcatagtgagtttctgtaaatccttgtaataacctaataaccaaatccattttctaagcattatccaaaatgctttctcatactgtcccactgagcctttgcaacagctctgagaggtgggctaataatattaaccattttacaaagaaagctgtggaagtgagttgctttcaggtctcacagcgcaggagagagagctggggctccaagttagagccagcttcctttgaattc

SEQ ID NO: 416850 - DNA, 294 bp, Homo sapiens
atatacttaaagtgatataaccatgagtagtggttcttgcaggtaggctttgtacaagagttcagcaataagagcccaaagtgcagatattcaacattcccagcctgaaaactcttagaattgaattttgaattggctaaaccctgtgctgatttgaaagggaaggtttacatggggaataaataatggtaagactgtcaatacattcagagaattgtggacttcaagacttaaaccgtgtggcttggagaggcttcttgaaggatacaggaattaagctaggccttttacaaa

SEQ ID NO: 416851 - DNA, 3617 bp, Homo sapiens
actgcatcatgatgaaactcaatagatgacgtttcctatgtaagtaggtagcccaaaccttcaagctgtgatatgagtaagttctacagatgtttacacaagtgttgccatctttgaaagcatcttctacaagcagaagtctttttcgttgtgtgtctatctttctcattaatgttctttagcctaaatgttaacaactttctaagagtgacctagaattatgttgttggagagaatgatgtgtgttccatggatacctggataggcacataacatgttggaagatgagcacctgctcaggatttgaaatacgtttaattttcaggtgacttaagacagctatgattgaatcaactagagatgatgatcgacttatttaatatgatttcactggtgaagaccaattggtagctttttaaaaagcactttagtgtcctgttttaccttaaaatgttataatattttccagttgtcatgctgtcaacattaacaaaaaaaatcatgttaaggctttgtatcaaacattttgttacactctgtctgaaatgtaatgtggagtacttcagcagtatgtgtcatgtattgtgtgtgtctgtgtgtgtgcatgtgcacacatgtgttttaatgctgggcacagaaaagtgttacaagttccatatcgtaagtccttaaaggggcagaaatatatgtagccaagtagaatttattacattttagtgttattattttaaaacttactgatactctttaacctctcctgcagtaatagttttgctttatttcttactcatttcaatttattgggtttgcaaaattttgtaaactttttgtgtttttagcctttgtattttttacagcctagaatcttgcaaagtctgaatattttttaaatgttctatcttaactagttcactaatacagtatttttagcagacagcattttcagacagcattttcataccaagtttgacttgtggtctccaatcttactgggaaggccctggtagtgtaattcttttccttattaaaaggtaaccaagtgcctctaagtcatgcttatttgtaaacaacaaagaagagtatatgtacctgctcaaaatttttttgataatcgcttatataattaatttctaatgatgaggacatgtaaaagttgccagtaagaacatagtatgcatttaattaaatcaagatggctaatggaattaactttctcccctgttcttgccaggtggaaatgatttaagcatttctccttgcagttgtattgaagtaaattaccataggcatcaagatggctgcatcacattttcaaatgattttatattcagttgctacttataaagcagcattcaaaaagtcttttacactgtcatgttggacacaagcagactcagcttttatcaaaacttgtttaaataaaaaattgacagtagctgggttattaaattatgcaactgaaactcctgaattatatcttttctgtatcccttaataagattggagaccactgccgtttaggataatacaataataaaacgttttaatcagtactaaaactttaattaagccaataatgatgcatgcctgttgtagctgacagcatgggtcagtacatccttcagcgagtgccttactctaattgaaaccaagcacacgtaaggtacaatatgttagactctgtgattttgttttcaaaatcctctgttatggctatatttaaatttattttaaatattcctgtatgtattcatctaagcatttgggcatttggagtcttaatatacaagaaacacgtacttaaatttttatgcttatcaccgcaatgatggcaaacagtgattttttttttcatagtttaggtgtcattgttgccagcacctttagtgctcagtcttcagtgaaaaatataaagtgccaaaaaaatcttgcaagacagaatccatacttaacactctttccaagacactgtgaccatgtacagtagctatttcctgatgaccaaatctctcaacgaatcatgttattaataaatatttttagcactcatcagtattctccaatgtgaccttctcattggagtacacagaaggaaagcaaagaagagcatctgacttctagctctggcttacagcctctctaccaggccgaagcaagagacccgcggcagcagctccccgccactcagacctgggtggtgataacctcaaagaatggctctgttttctattgacagaaaacccacttgattttgcttctgagttagcagtcagaagaccctctaagtacaatagaagtgctcttaacggactctgcctgtgtgactcccaggccccggagtctccatctctctcgtaagccacctgccacagcacagctggaggctgttctctggtgttctcagcgctccggctccctccctggagttgtgcacccgtcccaaactcctccatgcaagttctgcttcctcttataagtacacaactcagttaagtattcacatacacacagaaaatacgggtgtgaaaagaaagaattttctgtaaaaattaagttgaatactttggtaaaaagtgataaaggctgagttgccaataaaagttgcttttaaattaggtgtggctgggaatattataagatattggggaaaatatacaaatcaagaaaatttctgagcttagattgcttcatagatttatttaagtactcatcccacctttaaaacctctaaactgagaagaagggacccaaatcatgttattggtgtgatttatgtgagaagtagaactgtagtcattggacccttaggcaaaggaaaatccgtgtctttatatcagaagatcggcaaacgaatgtatattacacagtttaggttatgattccctactttaacctacttactttattaaatgaccaactactgatactgatcacaatagttattagagattctaatttagttggaaggttctaatcactttcattacaggcatttgaaaaatagggattcatttcgaatatattagccaggagcatagttagatgttacccaggccatttatcatcctgttaatgatgattttcccgacccttgtgagatcagcgtgacaggagtgtgtgtgtgtgtgtgtgtttctgtgggtgtgtggttttggttgggtgctgccaggtggcaaaggcatatgtaaatacatctgatctgcatctttatttcacagttaactaaaagtaaaaatgtctattctgattccatattgattttgtctaagatgtaaaaatttgagttcatctttggccaaaacctacctgaattaacatacaaaatatttgatttttaaaatttaattcaaatctcaaaatcaattaagtattctcagatcctatatcttggttaatatgctcccagatactttaaacatggcaaccttttggcctaagagaatgtttgttcatggaaaaaagcttttgagatgagagggtgtcttactttcttgtggcaattgattttctgttttaacaccctttgggtaaaatcttgcaaagagcttttataatttgttttactgaattgtatggagattgtataccaagtaaagctcttttaaattacaaaaaat

SEQ ID NO: 416852 - DNA, 1710 bp, Homo sapiens
cctctaaagtgttgcataaggcaaagataacgttaagtctgtggaggcttccgttatcgggaaaagatgctgtagtgatcttttctgagtgtctcctacttgcgacaaggtggacttgggaggaaagccgtctgccaaagcctgaagcctccaagccataaacaaccccaatggcctcccacgaagttgataatgcagagctggggtcagcctctgcccatggtaccccaggcagtgaggcgggaccagaagagctgaatacttctgtctaccagcccatagatggatcaccagattatcagaaagcaaaattacaagttcttggggccatccagatcctgaatgcagcaatgattctggctttgggtgtctttctgggttccttgcaatacccataccacttccaaaagcacttctttttcttcaccttctacacaggctacccgatttggggtgctgtgtttttctgtagttcaggaaccttgtctgttgtagcagggataaaacccacaagaacatggatacagaacagttttggaatgaacattgccagtgctacaattgcactagtggggactgcttttctctcactaaatatagcagttaatatccagtcattaaggagttgtcactcttcatcagagtcaccggacctatgcaattacatgggctccatatcaaatggcatggtgtctctactgctgattctcaccttgctggaattatgcgtaaccatctctaccatagccatgtggtgcaatgcaaactgctgtaattcaagagaggaaatttcctcacctcccaattctgtgtaatcaagaatacctccttaattctgagagcatgaatatttgaccttaaatctccagtgactcagagcttcacccacaaactcaggagaacataagcctgctcgtaaagctcaatccttctatcatggcaccaatcacaagaaccttggacgtttgactgactctatcctttctctcctaactataaatcctatttgtgtgtcgtgggtatggaaggacagatatatttctttaggcattcttggatatctgtaacttctatgatcattactccaaagttgtttccagaaattggttctatttcttcttatccacctactccattgctttatgaggtttaaggaaggaaggcggtataatccctattcaatatattttttctaaaatccaacttctgaccgcccagtaggaagaaaaatgagacattttttccattacagagaaatgcttcttgactttaacatcagcattataaaaagtgtcaaataaaaaattaccatcattatcattaaaataaattttcactgtatttgagatgggagggttaaggctcagggattttatttcagtgaactgctggaactcacacatgccctgatatgtaaatgatgatttatgttggcgagtctgagagcaagcccaaatgtgttcttcaaaggacaatgggaaactgtaaagtagagaactaaagaataaggcctttagaatctgacacatctgggttcaaattctgaaactgtcacttattacctgtatgaacatgggcaaattatctaatctctctgatctatttttcctcatctgtaaaataggtgtaataataacaactactttgtcggttgctctgagggttaaatgaaaataaaaagaaaatgtgaaacagcaccacaggtacttg

SEQ ID NO: 416853 - DNA, 1401 bp, Homo sapiens
cctctaaagtgttgcataaggcaaagataacgttaagtctgtggaggcttccgttatcgggaaaagatgctgtagtgatcttttctgagtgtctcctacttgcgacaaggtggacttgggaggaaagccgtctgccaaagcctgaagcctccaagttctgtagttcaggaaccttgtctgttgtagcagggataaaacccacaagaacatggatacagaacagttttggaatgaacattgccagtgctacaattgcactagtggggactgcttttctctcactaaatatagcagttaatatccagtcattaaggagttgtcactcttcatcagagtcaccggacctatgcaattacatgggctccatatcaaatggcatggtgtctctactgctgattctcaccttgctggaattatgcgtaaccatctctaccatagccatgtggtgcaatgcaaactgctgtaattcaagagaggaaatttcctcacctcccaattctgtgtaatcaagaatacctccttaattctgagagcatgaatatttgaccttaaatctccagtgactcagagcttcacccacaaactcaggagaacataagcctgctcgtaaagctcaatccttctatcatggcaccaatcacaagaaccttggacgtttgactgactctatcctttctctcctaactataaatcctatttgtgtgtcgtgggtatggaaggacagatatatttctttaggcattcttggatatctgtaacttctatgatcattactccaaagttgtttccagaaattggttctatttcttcttatccacctactccattgctttatgaggtttaaggaaggaaggcggtataatccctattcaatatattttttctaaaatccaacttctgaccgcccagtaggaagaaaaatgagacattttttccattacagagaaatgcttcttgactttaacatcagcattataaaaagtgtcaaataaaaaattaccatcattatcattaaaataaattttcactgtatttgagatgggagggttaaggctcagggattttatttcagtgaactgctggaactcacacatgccctgatatgtaaatgatgatttatgttggcgagtctgagagcaagcccaaatgtgttcttcaaaggacaatgggaaactgtaaagtagagaactaaagaataaggcctttagaatctgacacatctgggttcaaattctgaaactgtcacttattacctgtatgaacatgggcaaattatctaatctctctgatctatttttcctcatctgtaaaataggtgtaataataacaactactttgtcggttgctctgagggttaaatgaaaataaaaagaaaatgtgaaacagcaccacaggtacttg

SEQ ID NO: 416854 - DNA, 1572 bp, Homo sapiens
cctctaaagtgttgcataaggcaaagataacgttaagtctgtggaggcttccgttatcgggaaaagatgctgtagtgatcttttctgagtgtctcctacttgcgacaaggtggacttgggaggaaagccgtctgccaaagcctgaagcctccaagccataaacaaccccaatggcctcccacgaagttgataatgcagagctggggtcagcctctgcccatggtaccccaggcagtgaggcgggaccagaagagctgaatacttctgtctaccagcccatagatggatcaccagattatcagaaagcaaaattacaagttcttgggttctgtagttcaggaaccttgtctgttgtagcagggataaaacccacaagaacatggatacagaacagttttggaatgaacattgccagtgctacaattgcactagtggggactgcttttctctcactaaatatagcagttaatatccagtcattaaggagttgtcactcttcatcagagtcaccggacctatgcaattacatgggctccatatcaaatggcatggtgtctctactgctgattctcaccttgctggaattatgcgtaaccatctctaccatagccatgtggtgcaatgcaaactgctgtaattcaagagaggaaatttcctcacctcccaattctgtgtaatcaagaatacctccttaattctgagagcatgaatatttgaccttaaatctccagtgactcagagcttcacccacaaactcaggagaacataagcctgctcgtaaagctcaatccttctatcatggcaccaatcacaagaaccttggacgtttgactgactctatcctttctctcctaactataaatcctatttgtgtgtcgtgggtatggaaggacagatatatttctttaggcattcttggatatctgtaacttctatgatcattactccaaagttgtttccagaaattggttctatttcttcttatccacctactccattgctttatgaggtttaaggaaggaaggcggtataatccctattcaatatattttttctaaaatccaacttctgaccgcccagtaggaagaaaaatgagacattttttccattacagagaaatgcttcttgactttaacatcagcattataaaaagtgtcaaataaaaaattaccatcattatcattaaaataaattttcactgtatttgagatgggagggttaaggctcagggattttatttcagtgaactgctggaactcacacatgccctgatatgtaaatgatgatttatgttggcgagtctgagagcaagcccaaatgtgttcttcaaaggacaatgggaaactgtaaagtagagaactaaagaataaggcctttagaatctgacacatctgggttcaaattctgaaactgtcacttattacctgtatgaacatgggcaaattatctaatctctctgatctatttttcctcatctgtaaaataggtgtaataataacaactactttgtcggttgctctgagggttaaatgaaaataaaaagaaaatgtgaaacagcaccacaggtacttg

SEQ ID NO: 416855 - DNA, 1637 bp, Homo sapiens
cctctaaagtgttgcataaggcaaagataacgttaagtctgtggaggcttccgttatcgggaaaagatgctgtagtgatcttttctgagtgtctcctacttgcgacaaggtggacttgggaggaaagccgtctgccaaagcctgaagcctccaagccataaacaaccccaatggcctcccacgaagttgataatgcagagctggggtcagcctctgcccatggtaccccaggcagtgaggcgggaccagaagagctgaatacttctgtctaccagcccatagatggatcaccagattatcagaaagcaaaattacaagttcttgggtctattcaacgtgaagaggatgaggatgaagacctttatgataatctacttccacttaatgaatattctgtagttcaggaaccttgtctgttgtagcagggataaaacccacaagaacatggatacagaacagttttggaatgaacattgccagtgctacaattgcactagtggggactgcttttctctcactaaatatagcagttaatatccagtcattaaggagttgtcactcttcatcagagtcaccggacctatgcaattacatgggctccatatcaaatggcatggtgtctctactgctgattctcaccttgctggaattatgcgtaaccatctctaccatagccatgtggtgcaatgcaaactgctgtaattcaagagaggaaatttcctcacctcccaattctgtgtaatcaagaatacctccttaattctgagagcatgaatatttgaccttaaatctccagtgactcagagcttcacccacaaactcaggagaacataagcctgctcgtaaagctcaatccttctatcatggcaccaatcacaagaaccttggacgtttgactgactctatcctttctctcctaactataaatcctatttgtgtgtcgtgggtatggaaggacagatatatttctttaggcattcttggatatctgtaacttctatgatcattactccaaagttgtttccagaaattggttctatttcttcttatccacctactccattgctttatgaggtttaaggaaggaaggcggtataatccctattcaatatattttttctaaaatccaacttctgaccgcccagtaggaagaaaaatgagacattttttccattacagagaaatgcttcttgactttaacatcagcattataaaaagtgtcaaataaaaaattaccatcattatcattaaaataaattttcactgtatttgagatgggagggttaaggctcagggattttatttcagtgaactgctggaactcacacatgccctgatatgtaaatgatgatttatgttggcgagtctgagagcaagcccaaatgtgttcttcaaaggacaatgggaaactgtaaagtagagaactaaagaataaggcctttagaatctgacacatctgggttcaaattctgaaactgtcacttattacctgtatgaacatgggcaaattatctaatctctctgatctatttttcctcatctgtaaaataggtgtaataataacaactactttgtcggttgctctgagggttaaatgaaaataaaaagaaaatgtgaaacagcaccacaggtacttg

SEQ ID NO: 416856 - DNA, 1598 bp, Homo sapiens
cctctaaagtgttgcataaggcaaagataacgttaagtctgtggaggcttccgttatcgggaaaagatgctgtagtgatcttttctgagtgtctcctacttgcgacaaggtggacttgggaggaaagccgtctgccaaagcctgaagcctccaagccataaacaaccccaatggcctcccacgaagttgataatgcagagctggggtcagcctctgcccatggtaccccaggcagtgaggcgggaccagaagagctgaatacttctgtctaccagcccatagatggatcaccagattatcagaaagcaaaattacaagttcttggggctacccgatttggggtgctgtgtttttctgtagttcaggaaccttgtctgttgtagcagggataaaacccacaagaacatggatacagaacagttttggaatgaacattgccagtgctacaattgcactagtggggactgcttttctctcactaaatatagcagttaatatccagtcattaaggagttgtcactcttcatcagagtcaccggacctatgcaattacatgggctccatatcaaatggcatggtgtctctactgctgattctcaccttgctggaattatgcgtaaccatctctaccatagccatgtggtgcaatgcaaactgctgtaattcaagagaggaaatttcctcacctcccaattctgtgtaatcaagaatacctccttaattctgagagcatgaatatttgaccttaaatctccagtgactcagagcttcacccacaaactcaggagaacataagcctgctcgtaaagctcaatccttctatcatggcaccaatcacaagaaccttggacgtttgactgactctatcctttctctcctaactataaatcctatttgtgtgtcgtgggtatggaaggacagatatatttctttaggcattcttggatatctgtaacttctatgatcattactccaaagttgtttccagaaattggttctatttcttcttatccacctactccattgctttatgaggtttaaggaaggaaggcggtataatccctattcaatatattttttctaaaatccaacttctgaccgcccagtaggaagaaaaatgagacattttttccattacagagaaatgcttcttgactttaacatcagcattataaaaagtgtcaaataaaaaattaccatcattatcattaaaataaattttcactgtatttgagatgggagggttaaggctcagggattttatttcagtgaactgctggaactcacacatgccctgatatgtaaatgatgatttatgttggcgagtctgagagcaagcccaaatgtgttcttcaaaggacaatgggaaactgtaaagtagagaactaaagaataaggcctttagaatctgacacatctgggttcaaattctgaaactgtcacttattacctgtatgaacatgggcaaattatctaatctctctgatctatttttcctcatctgtaaaataggtgtaataataacaactactttgtcggttgctctgagggttaaatgaaaataaaaagaaaatgtgaaacagcaccacaggtacttg

SEQ ID NO: 416857 - DNA, 1515 bp, Homo sapiens
cctctaaagtgttgcataaggcaaagataacgttaagtctgtggaggcttccgttatcgggaaaagatgctgtagtgatcttttctgagtgtctcctacttgcgacaaggtggacttgggaggaaagccgtctgccaaagcctgaagcctccaagccataaacaaccccaatggcctcccacgaagttgataatgcagagctggggtcagcctctgcccatggtaccccaggcagtgaggcgggaccagaagagctgaatacttctgtctaccagcccatagatggatcaccagattatcagaaagcaaaattacaagttcttgggatacagaacagttttggaatgaacattgccagtgctacaattgcactagtggggactgcttttctctcactaaatatagcagttaatatccagtcattaaggagttgtcactcttcatcagagtcaccggacctatgcaattacatgggctccatatcaaatggcatggtgtctctactgctgattctcaccttgctggaattatgcgtaaccatctctaccatagccatgtggtgcaatgcaaactgctgtaattcaagagaggaaatttcctcacctcccaattctgtgtaatcaagaatacctccttaattctgagagcatgaatatttgaccttaaatctccagtgactcagagcttcacccacaaactcaggagaacataagcctgctcgtaaagctcaatccttctatcatggcaccaatcacaagaaccttggacgtttgactgactctatcctttctctcctaactataaatcctatttgtgtgtcgtgggtatggaaggacagatatatttctttaggcattcttggatatctgtaacttctatgatcattactccaaagttgtttccagaaattggttctatttcttcttatccacctactccattgctttatgaggtttaaggaaggaaggcggtataatccctattcaatatattttttctaaaatccaacttctgaccgcccagtaggaagaaaaatgagacattttttccattacagagaaatgcttcttgactttaacatcagcattataaaaagtgtcaaataaaaaattaccatcattatcattaaaataaattttcactgtatttgagatgggagggttaaggctcagggattttatttcagtgaactgctggaactcacacatgccctgatatgtaaatgatgatttatgttggcgagtctgagagcaagcccaaatgtgttcttcaaaggacaatgggaaactgtaaagtagagaactaaagaataaggcctttagaatctgacacatctgggttcaaattctgaaactgtcacttattacctgtatgaacatgggcaaattatctaatctctctgatctatttttcctcatctgtaaaataggtgtaataataacaactactttgtcggttgctctgagggttaaatgaaaataaaaagaaaatgtgaaacagcaccacaggtacttg

SEQ ID NO: 416858 - DNA, 1603 bp, Homo sapiens
cctctaaagtgttgcataaggcaaagataacgttaagtctgtggaggcttccgttatcgggaaaagatgctgtagtgatcttttctgagtgtctcctacttgcgacaaggtggacttgggaggaaagccgtctgccaaagcctgaagcctccaagccataaacaaccccaatggcctcccacgaagttgataatgcagagctggggtcagcctctgcccatggtaccccaggcagtgaggcgggaccagaagagctgaatacttctgtctaccagcccatagatggatcaccagattatcagaaagcaaaattacaagttcttggggccatccagatcctgaatgcagcaatgattctggctttgggtgtctttctgggttccttgcaatacccataccacttccaaaagcacttctttttcttcaccttctacacaggctacccgatttggggtgctgtgtttttctgtagttcaggaaccttgtctgttgtagcagggataaaacccacaagaacatggatacagaacagttttggaatgaacattgccagtgctacaattgcactagtggggaggcatggtgtctctactgctgattctcaccttgctggaattatgcgtaaccatctctaccatagccatgtggtgcaatgcaaactgctgtaattcaagagaggaaatttcctcacctcccaattctgtgtaatcaagaatacctccttaattctgagagcatgaatatttgaccttaaatctccagtgactcagagcttcacccacaaactcaggagaacataagcctgctcgtaaagctcaatccttctatcatggcaccaatcacaagaaccttggacgtttgactgactctatcctttctctcctaactataaatcctatttgtgtgtcgtgggtatggaaggacagatatatttctttaggcattcttggatatctgtaacttctatgatcattactccaaagttgtttccagaaattggttctatttcttcttatccacctactccattgctttatgaggtttaaggaaggaaggcggtataatccctattcaatatattttttctaaaatccaacttctgaccgcccagtaggaagaaaaatgagacattttttccattacagagaaatgcttcttgactttaacatcagcattataaaaagtgtcaaataaaaaattaccatcattatcattaaaataaattttcactgtatttgagatgggagggttaaggctcagggattttatttcagtgaactgctggaactcacacatgccctgatatgtaaatgatgatttatgttggcgagtctgagagcaagcccaaatgtgttcttcaaaggacaatgggaaactgtaaagtagagaactaaagaataaggcctttagaatctgacacatctgggttcaaattctgaaactgtcacttattacctgtatgaacatgggcaaattatctaatctctctgatctatttttcctcatctgtaaaataggtgtaataataacaactactttgtcggttgctctgagggttaaatgaaaataaaaagaaaatgtgaaacagcaccacaggtacttg

SEQ ID NO: 416859 - DNA, 1072 bp, Homo sapiens
ggatgttgccactgggtttgatataaggcatcatatcccctagggggcatggtgtctctactgctgattctcaccttgctggaattatgcgtaaccatctctaccatagccatgtggtgcaatgcaaactgctgtaattcaagagaggaaatttcctcacctcccaattctgtgtaatcaagaatacctccttaattctgagagcatgaatatttgaccttaaatctccagtgactcagagcttcacccacaaactcaggagaacataagcctgctcgtaaagctcaatccttctatcatggcaccaatcacaagaaccttggacgtttgactgactctatcctttctctcctaactataaatcctatttgtgtgtcgtgggtatggaaggacagatatatttctttaggcattcttggatatctgtaacttctatgatcattactccaaagttgtttccagaaattggttctatttcttcttatccacctactccattgctttatgaggtttaaggaaggaaggcggtataatccctattcaatatattttttctaaaatccaacttctgaccgcccagtaggaagaaaaatgagacattttttccattacagagaaatgcttcttgactttaacatcagcattataaaaagtgtcaaataaaaaattaccatcattatcattaaaataaattttcactgtatttgagatgggagggttaaggctcagggattttatttcagtgaactgctggaactcacacatgccctgatatgtaaatgatgatttatgttggcgagtctgagagcaagcccaaatgtgttcttcaaaggacaatgggaaactgtaaagtagagaactaaagaataaggcctttagaatctgacacatctgggttcaaattctgaaactgtcacttattacctgtatgaacatgggcaaattatctaatctctctgatctatttttcctcatctgtaaaataggtgtaataataacaactactttgtcggttgctctgagggttaaatgaaaataaaaagaaaatgtgaaacagcaccacaggtacttg

SEQ ID NO: 416860 - DNA, 387 bp, Homo sapiens
caccaaggcctactacaatgacccgatgatgtctactactccaaggcaagacagaattgaatattgtacaaactctgttactctgccctggtgtcccatttgtggagagtcattgtaatgtatggacagaattgaacccttctgtaacactcaaaattttagtagctagtggaaaaagggaaagcatgaaggctttggatttcttttctatcacagccataaacaaccccaatggcctcccacgaagttgataatgcagagctggggtcagcctctgcccatggtaccccaggcagtgaggcgggaccagaagagctgaatacttctgtctaccagcccatagatggatcaccagattatcagaaagcaaaattacaagttcttggg

SEQ ID NO: 416861 - DNA, 528 bp, Homo sapiens
cctctaaagtgttgcataaggcaaagataacgttaagtctgtggaggcttccgttatcgggaaaagatgctgtagtgatcttttctgagtgtctcctacttgcgacaaggtggacttgggaggaaagccgtctgccaaagcctgaagcctccaagccataaacaaccccaatggcctcccacgaagttgataatgcagagctggggtcagcctctgcccatggtaccccaggcagtgaggcgggaccagaagagctgaatacttctgtctaccagcccatagatggatcaccagattatcagaaagcaaaattacaagttcttggggccatccagatcctgaatgcagcaatgattctggctttgggtgtctttctgggttccttgcaatacccataccacttccaaaagcacttctttttcttcaccttctacacaggctacccgatttggggtgctgtgtttgtgagtattcgtactcccctggctatatgttatttcttagataccactgctggagatgtgtttg

SEQ ID NO: 416862 - DNA, 1343 bp, Homo sapiens
caaacatcatatgttctcacttataagcgggagctaagctatgaggatgcaaaggcataagaatgacacaatggactttggggactcagggggaaagttctgtagttcaggaaccttgtctgttgtagcagggataaaacccacaagaacatggatacagaacagttttggaatgaacattgccagtgctacaattgcactagtggggactgcttttctctcactaaatatagcagttaatatccagtcattaaggagttgtcactcttcatcagagtcaccggacctatgcaattacatgggctccatatcaaatggcatggtgtctctactgctgattctcaccttgctggaattatgcgtaaccatctctaccatagccatgtggtgcaatgcaaactgctgtaattcaagagaggaaatttcctcacctcccaattctgtgtaatcaagaatacctccttaattctgagagcatgaatatttgaccttaaatctccagtgactcagagcttcacccacaaactcaggagaacataagcctgctcgtaaagctcaatccttctatcatggcaccaatcacaagaaccttggacgtttgactgactctatcctttctctcctaactataaatcctatttgtgtgtcgtgggtatggaaggacagatatatttctttaggcattcttggatatctgtaacttctatgatcattactccaaagttgtttccagaaattggttctatttcttcttatccacctactccattgctttatgaggtttaaggaaggaaggcggtataatccctattcaatatattttttctaaaatccaacttctgaccgcccagtaggaagaaaaatgagacattttttccattacagagaaatgcttcttgactttaacatcagcattataaaaagtgtcaaataaaaaattaccatcattatcattaaaataaattttcactgtatttgagatgggagggttaaggctcagggattttatttcagtgaactgctggaactcacacatgccctgatatgtaaatgatgatttatgttggcgagtctgagagcaagcccaaatgtgttcttcaaaggacaatgggaaactgtaaagtagagaactaaagaataaggcctttagaatctgacacatctgggttcaaattctgaaactgtcacttattacctgtatgaacatgggcaaattatctaatctctctgatctatttttcctcatctgtaaaataggtgtaataataacaactactttgtcggttgctctgagggttaaatgaaaataaaaagaaaatgtgaaacagcaccacaggtacttg

SEQ ID NO: 416863 - DNA, 1539 bp, Homo sapiens
cctctaaagtgttgcataaggcaaagataacgttaagtctgtggaggcttccgttatcgggaaaagatgctgtagtgatcttttctgagtgtctcctacttgcgacaaggtggacttgggaggaaagccgtctgccaaagcctgaagcctccaaggccatccagatcctgaatgcagcaatgattctggctttgggtgtctttctgggttccttgcaatacccataccacttccaaaagcacttctttttcttcaccttctacacaggctacccgatttggggtgctgtgtttttctgtagttcaggaaccttgtctgttgtagcagggataaaacccacaagaacatggatacagaacagttttggaatgaacattgccagtgctacaattgcactagtggggactgcttttctctcactaaatatagcagttaatatccagtcattaaggagttgtcactcttcatcagagtcaccggacctatgcaattacatgggctccatatcaaatggcatggtgtctctactgctgattctcaccttgctggaattatgcgtaaccatctctaccatagccatgtggtgcaatgcaaactgctgtaattcaagagaggaaatttcctcacctcccaattctgtgtaatcaagaatacctccttaattctgagagcatgaatatttgaccttaaatctccagtgactcagagcttcacccacaaactcaggagaacataagcctgctcgtaaagctcaatccttctatcatggcaccaatcacaagaaccttggacgtttgactgactctatcctttctctcctaactataaatcctatttgtgtgtcgtgggtatggaaggacagatatatttctttaggcattcttggatatctgtaacttctatgatcattactccaaagttgtttccagaaattggttctatttcttcttatccacctactccattgctttatgaggtttaaggaaggaaggcggtataatccctattcaatatattttttctaaaatccaacttctgaccgcccagtaggaagaaaaatgagacattttttccattacagagaaatgcttcttgactttaacatcagcattataaaaagtgtcaaataaaaaattaccatcattatcattaaaataaattttcactgtatttgagatgggagggttaaggctcagggattttatttcagtgaactgctggaactcacacatgccctgatatgtaaatgatgatttatgttggcgagtctgagagcaagcccaaatgtgttcttcaaaggacaatgggaaactgtaaagtagagaactaaagaataaggcctttagaatctgacacatctgggttcaaattctgaaactgtcacttattacctgtatgaacatgggcaaattatctaatctctctgatctatttttcctcatctgtaaaataggtgtaataataacaactactttgtcggttgctctgagggttaaatgaaaataaaaagaaaatgtgaaacagcaccacaggtacttg

SEQ ID NO: 416864 - DNA, 1299 bp, Homo sapiens
cctctaaagtgttgcataaggcaaagataacgttaagtctgtggaggcttccgttatcgggaaaagatgctgtagtgatcttttctgagtgtctcctacttgcgacaaggtggacttgggaggaaagccgtctgccaaagcctgaagcctccaagttctgtagttcaggaaccttgtctgttgtagcagggataaaacccacaagaacatggatacagaacagttttggaatgaacattgccagtgctacaattgcactagtggggactgcttttctctcactaaatatagcagttaatatccagtcattaaggagttgtcactcttcatcagagtcaccggacctatgcaattacatgggctccatatcaaatgaaatttcctcacctcccaattctgtgtaatcaagaatacctccttaattctgagagcatgaatatttgaccttaaatctccagtgactcagagcttcacccacaaactcaggagaacataagcctgctcgtaaagctcaatccttctatcatggcaccaatcacaagaaccttggacgtttgactgactctatcctttctctcctaactataaatcctatttgtgtgtcgtgggtatggaaggacagatatatttctttaggcattcttggatatctgtaacttctatgatcattactccaaagttgtttccagaaattggttctatttcttcttatccacctactccattgctttatgaggtttaaggaaggaaggcggtataatccctattcaatatattttttctaaaatccaacttctgaccgcccagtaggaagaaaaatgagacattttttccattacagagaaatgcttcttgactttaacatcagcattataaaaagtgtcaaataaaaaattaccatcattatcattaaaataaattttcactgtatttgagatgggagggttaaggctcagggattttatttcagtgaactgctggaactcacacatgccctgatatgtaaatgatgatttatgttggcgagtctgagagcaagcccaaatgtgttcttcaaaggacaatgggaaactgtaaagtagagaactaaagaataaggcctttagaatctgacacatctgggttcaaattctgaaactgtcacttattacctgtatgaacatgggcaaattatctaatctctctgatctatttttcctcatctgtaaaataggtgtaataataacaactactttgtcggttgctctgagggttaaatgaaaataaaaagaaaatgtgaaacagcaccacaggtacttg

SEQ ID NO: 416865 - DNA, 1079 bp, Homo sapiens
gcaaatcaaatagctatccatggaatattagaacttgacttgctccatcctcttaaactttttgtgtctcacactaaagaaatgagagatgcagaattctaaggctaaatagctaggaagtattcattcaaacttgaatattcttcaaagagagtgtgggggcaactctaatcagaggaagaaactaaaggaagtaaaaccagatgttttccaccaaagccctccttttggctggtctgatttctaccgcactggcagggccatgggctaatatatgtgctggcaagtcttccaatgagatccggacgtgtgaccgccatggctgtggacagtactctgctcaaagaagtcagaggcctcaccagggtgtggacgtcttgtgctctgctggatctactgtgtacgcaccattcactggaatgattgtgggccaggagaaaccttatcaaaacaagaatgctatcaataatggtgttcgaatatctggaagaggtttttgtgtcaaaatgttctacattaagccaattaagtataaaggtcctattaagaagggagaaaaacttggaactctattgcccttgcagaaagtttatcctggcatacaatcgcatgtgcacattgaaaactgtgactcgagtgaccctactgcatacctgtaaatcgaaggccaatggtcagatcttcaaaataaaaagtcatcttaaaaacctggatgcatacccttctcttcaagaaatttgtgttcacaaaggaaaaatgcatgaagggatggataccccattttccatgacatgattattacacattgcatgcctgtatcaaaacatctcacgtacctcataaacatatacacctatgtacccacaaaaattttttaattaaaaaaaggaaatttgagtttaaatagaaacatgataaatgcaagaaagaaaacattttgattttaactcattgtcactctgatgttcatgtgaactggttgcttcgggctctttgatctgtcacctatggaatctgagtggttttattttttagatttctcagtcccaaagatctaagataaataaacaagagaactt

SEQ ID NO: 416866 - DNA, 1001 bp, Homo sapiens
ctgaatcaggaaataaaattctggaaggacgatcttcccataaatacataaagtccagggaaaactacagtgaaaacagaattgtcaggatcaactgtgtgactgataaggcaaatggggataggaaatgtctgaggccaggagctctgctctcacttttctcctttttagcactggcagggccatgggctaatatatgtgctggcaagtcttccaatgagatccggacgtgtgaccgccatggctgtggacagtactctgctcaaagaagtcagaggcctcaccagggtgtggacgtcttgtgctctgctggatctactgtgtacgcaccattcactggaatgattgtgggccaggagaaaccttatcaaaacaagaatgctatcaataatggtgttcgaatatctggaagaggtttttgtgtcaaaatgttctacattaagccaattaagtataaaggtcctattaagaagggagaaaaacttggaactctattgcccttgcagaaagtttatcctggcatacaatcgcatgtgcacattgaaaactgtgactcgagtgaccctactgcatacctgtaaatcgaaggccaatggtcagatcttcaaaataaaaagtcatcttaaaaacctggatgcatacccttctcttcaagaaatttgtgttcacaaaggaaaaatgcatgaagggatggataccccattttccatgacatgattattacacattgcatgcctgtatcaaaacatctcacgtacctcataaacatatacacctatgtacccacaaaaattttttaattaaaaaaaggaaatttgagtttaaatagaaacatgataaatgcaagaaagaaaacattttgattttaactcattgtcactctgatgttcatgtgaactggttgcttcgggctctttgatctgtcacctatggaatctgagtggttttattttttagatttctcagtcccaaagatctaagataaataaacaagagaactt

SEQ ID NO: 416867 - DNA, 831 bp, Homo sapiens
ctgaatcaggaaataaaattctggaaggacgatcttcccataaatacataaagtccagggaaaactacagtgaaaacagaattgtcaggatcaactgtgtgactgataaggcaaatggggataggaaatgtctgaggccaggagctctgctctcacttttctcctttttagcactggcagggccatgggctaatatatgtgctggcaagtcttccaatgagatccggacgtgtgaccgccatggctgtggacagtactctgctcaaagaagtcagaggcctcaccagggtgtggacgtcttgtgctctgctggatctactgtgtacgcaccattcactggaatgattgtgggccaggagaaaccttatcaaaacaagaatgctatcaataatggtgttcgaatatctggaagagctttaaaaaatgtaacccatcatcagatgaaacatgaggacagctactcatctttgggagtcttagagtgtcactattattggccacaagaatcttcaatgaaggatcatccactggtgtatcttcaattttgattgatgataatgattttgagttgataaaaacaaacatccctttagaagataaacaggccagcaaaaatacttgctagaagagtgccatgactcagtttataagagagaggctgctattcctctatcctcctccataggaaaatttccattagccagctttaccaactaccataatttaatgcctatcatatatcaggtactattctgactctgggtttataatggtaaacaaaatagaatctctgccttcaatgagtttatgtttggtataaggagaagagaa

SEQ ID NO: 416868 - DNA, 1025 bp, Homo sapiens
gcaaatcaaatagctatccatggaatattagaacttgacttgctccatcctcttaaactttttgtgtctcacactaaagaaatgagagatgcagaattctaaggctaaatagctaggaagtattcattcaaacttgaatattcttcaaagagagtgtgggggcaactctaatcagaggaagaaactaaaggaagtcactggcagggccatgggctaatatatgtgctggcaagtcttccaatgagatccggacgtgtgaccgccatggctgtggacagtactctgctcaaagaagtcagaggcctcaccagggtgtggacgtcttgtgctctgctggatctactgtgtacgcaccattcactggaatgattgtgggccaggagaaaccttatcaaaacaagaatgctatcaataatggtgttcgaatatctggaagaggtttttgtgtcaaaatgttctacattaagccaattaagtataaaggtcctattaagaagggagaaaaacttggaactctattgcccttgcagaaagtttatcctggcatacaatcgcatgtgcacattgaaaactgtgactcgagtgaccctactgcatacctgtaaatcgaaggccaatggtcagatcttcaaaataaaaagtcatcttaaaaacctggatgcatacccttctcttcaagaaatttgtgttcacaaaggaaaaatgcatgaagggatggataccccattttccatgacatgattattacacattgcatgcctgtatcaaaacatctcacgtacctcataaacatatacacctatgtacccacaaaaattttttaattaaaaaaaggaaatttgagtttaaatagaaacatgataaatgcaagaaagaaaacattttgattttaactcattgtcactctgatgttcatgtgaactggttgcttcgggctctttgatctgtcacctatggaatctgagtggttttattttttagatttctcagtcccaaagatctaagataaataaacaagagaactt

SEQ ID NO: 416869 - DNA, 2390 bp, Homo sapiens
ctaagcagcaagccacgcacctcccgcgctggcgaaatccgagacccgccccttccggaagttttgacactttgtgcgccccgggcaatgcgattgagagggtaatcatccggtccgttatctaaacccgtcactccgggaaacagcgacccgatctttccggatccgcgctctcccagcatcctttgccttccggtatgtggccccgtctggctagtcccgcctagcgcgcccatttcgagcccaagtttccagctcgggtttccaggctcagaattttccaggagtaggttcttgggcagtggctgtgggagctggaatggcgcagctggaaggttactatttctcggccgccttgagctgtacctttttagtatcctgcctcctcttctccgccttcagccgggcgttgcgagagccctacatggacgagatcttccacctgcctcaggcgcagcgctactgtgagggccatttctccctttcccagtgggatcccatgattactacattacctggcttgtacctggtgtcaattggagtgatcaaacctgccatttggatctttggatggtctgaacatgttgtctgctccattgggatgctcagatttgttaatcttctcttcagtgttggcaacttctatttactatatttgcttttctgcaaggtacaacccagaaacaaggctgcctcaagtatccagagagtcttgtcaacattaacactagcagtatttccaacactttatttttttaacttcctttattatacagaagcaggatctatgttttttactctttttgcgtatttgatgtgtctttatggaaatcataaaacttcagccttccttggattttgtggcttcatgtttcggcaaacaaatatcatctgggctgtcttctgtgcaggaaatgtcattgcacaaaagttaacggaggcttggaaaactgagctacaaaagaaggaagacagacttccacctattaaaggaccatttgcagaattcagaaaaattcttcagtttcttttggcttattccatgtcctttaaaaacttgagtatgcttttgcttctgacttggccctacatccttctgggatttctgttttgtgcttttgtagtagttaatggtggaattgttattggcgatcggagtagtcatgaagcctgtcttcattttcctcaactattctactttttttcatttactctctttttttcctttcctcatctcctgtctcctagcaaaattaagacttttctttccttagtttggaaacgtagaattctgttttttgtggttaccttagtctctgtgtttttagtttggaaattcacttatgctcataaatacttgctagcagacaatagacattatactttctatgtgtggaaaagagtttttcaaagatatgaaactgtaaaatatttgttagttccagcctatatatttgctggttggagtatagctgactcattgaaatcaaagtcaattttttggaatttaatgtttttcatatgcttgttcactgttatagttcctcagaaactgctggaatttcgttacttcattttaccttatgtcatttataggcttaacatacctctgcctcccacatccagactcatttgtgaactgagctgctatgcagttgttaatttcataacttttttcatctttctgaacaagacttttcagtggccaaatagtcaggacattcaaaggtttatgtggtaatatcagtgatatttcgaactgtgaaaatggacttaataattagaccatttctacaaagaacaactgaataggtggaaaacatggaatttcttttaggtgcagtggtggtcttcaaattacattagttttttttatatatattttaaacatatgtaagaaattaagtggcaaagaactgagaaagcttaagacctgcttcaaaagcctgaaaaatggaaaaataaaattgttttcagatatctcatatcactctcataatgttggccccttaaaaagcttgggaatgttttgtatgtacaagtttattaaaactgggtatgcttcatattactggaatgaatttattctcttcagagagaaatattaggttggtgcaaaagtaattgtggtttttgccattgaaagtaatggcaaaaccacaattacttttttaccaacctaataacaatgtattagcaaatatttacaaatggtcaggtgatattcttgattgaaaagttgcttaacatttcagtaatataattttaattctaagtcaaaatacaaatgcatagatagtaaatgataaagtagagactcatatatgcctgtctagacatcaaatatgggatggttacaataaagatgaagtttcttatctaatgtagtt

SEQ ID NO: 416870 - DNA, 3127 bp, Homo sapiens
ctaagcagcaagccacgcacctcccgcgctggcgaaatccgagacccgccccttccggaagttttgacactttgtgcgccccgggcaatgcgattgagagggtaatcatccggtccgttatctaaacccgtcactccgggaaacagcgacccgatctttccggatccgcgctctcccagcatcctttgccttccggtatgtggccccgtctggctagtcccgcctagcgcgcccatttcgagcccaagtttccagctcgggtttccaggctcagaattttccaggagtaggttcttgggcagtggctgtgggagctggaatggcgcagctggaaggttactatttctcggccgccttgagctgtacctttttagtatcctgcctcctcttctccgccttcagccgggcgttgcgagagccctacatggacgagatcttccacctgcctcaggcgcagcgctactgtgagggccatttctccctttcccagtgggatcccatgattactacattacctggcttgtacctggtgtcaattggagtgatcaaacctgccatttggatctttggatggtctgaacatgttgtctgctccattgggatgctcagatttgttaatcttctcttcagtgttggcaacttctatttactatatttgcttttctgcaaggtacaacccagaaacaaggctgcctcaagtatccagagagtcttgtcaacattaacactagcagtatttccaacactttatttttttaacttcctttattatacagaagcaggatctatgttttttactctttttgcgtatttgatgtgtctttatggaaatcataaaacttcagccttccttggattttgtggcttcatgtttcggcaaacaaatatcatctgggctgtcttctgtgcaggaaatgtcattgcacaaaagttaacggaggcttggaaaactgagctacaaaagaaggaagacagacttccacctattaaaggaccatttgcagaattcagaaaaattcttcagtttcttttggcttattccatgtcctttaaaaacttgagtatgcttttgcttctgacttggccctacatccttctgggatttctgttttgtgcttttgtagtagttaatggtggaattgttattggcgatcggagtagtcatgaagcctgtcttcattttcctcaactattctactttttttcatttactctctttttttcctttcctcatctcctgtctcctagcaaaattaagacttttctttccttagtttggaaacgtagaattctgttttttgtggttaccttagtctctgtgtttttagtttggaaattcacttatgctcataaatacttgctagcagacaatagacattatactttctatgtgtggaaaagagtttttcaaagatatgaaactgtaaaatatttgttagttccagcctatatatttgctggttggagtatagctgactcattgaaatcaaagtcaattttttggaatttaatgtttttcatatgcttgttcactgttatagttcctcagaaactgctggaatttcgttacttcattttaccttatgtcatttataggcttaacatacctctgcctcccacatccagactcatttgtgaactgagctgctatgcagttgttaatttcataacttttttcatctttctgaacaagacttttcagtggccaaatagtcaggacattcaaaggtttatgtggtaatatcagtgatatttcgaactgtgaaaatggacttaataattagaccatttctacaaagaacaactgaataggtggaaaacatggaatttcttttaggtgcagtggtggtcttcaaattacattagttttttttatatatattttaaacatatgtaagaaattaagtggcaaagaactgagaaagcttaagacctgcttcaaaagcctgaaaaatggaaaaataaaattgttttcagatatctcatatcactctcataatgttggccccttaaaaagcttgggaatgttttgtatgtacaagtttattaaaactgggtatgcttcatattactggaatgaatttattctcttcagagagaaatattaggttggtgcaaaagtaattgtggtttttgccattgaaagtaatggcaaaaccacaattacttttttaccaacctaataacaatgtattagcaaatatttacaaatggtcaggtgatattcttgattgaaaagttgcttaacatttcagtaatataattttaattctaagtcaaaatacaaatgcatagatagtaaatgataaagtagagactcatatatgcctgtctagacatcaaattgttggttattgtttacaatctagaaatgatgaagctctttcactaattcctaatatgaaatgtatgatggccaaagacaaattgtattgattataatcctttaaaagggggatttcctttctgaaatacatattgtattagcttcccagggcttccataacaaatgacgacaaacttgggtgcttacaacaattttcctcacagtctggaggccagaagtctaaaatcaaagtgtcagcagagttggttccttctggaggctctaaggaagaatccataaacagacattctatgtctgtttcctaatatcttgtggctgtgtgcaattcttggagttctttggcttctggacaaatcttgtccaagtattgcagacagcaatcttcactccagtctctgcctctgtgttcacacggcctttccctctgtcttctcttcattaccttttaaggacagtgtctttgaatgtagggcccaccctgatctagggtgattgtgtctggagacccttaattatgtttacaaagacccatgttccaagtaagtttgtattcacatgatctgagtagacattgtctcttcgtgggatacttttcagtccatgacagttactaaaggacattttaggatagtcttcatatgattgttaggagactacctttttagattttttttattatatatcaaattatagttgtatatacttatgagaaacaaagtggcattatgatttttgaatataatgtgggattaaataaagctaatctatccatcacctcaa

SEQ ID NO: 416871 - DNA, 175 bp, Homo sapiens
gcggccgcctactactactactgctcgaattcaagcttctaacgatgtacggggacatgatggcagagacatccagtcaggacctgacccgtctctgtctgaggccggctcagcagtgcagcctggtccctgggggctggacccaggctcctaaataaaccagcaactccctcga

SEQ ID NO: 416872 - DNA, 1874 bp, Homo sapiens
gctcctgccgggcgccgagcccgccgcgcactgctactgcggccaccaattcggccagttcgccgggcagctgggcgacggcgccgccatgtacctgggcgaggtgtgcacggcgaacggcgagcgctgggagctgcagctcaagggcgccgggcccacgcccttctccagacaggccgacggtcgcaaggtcctacggtcaagcatccgggagtttctatgcagcgaagccatgttccacctgggagtccccaccacacgggccggcgcctgcgtcacgtccgagtccacggtggtgcgcgacgtgttctatgatggtaatcccaaatatgaacaatgcacggttgtgttgcgtgtagcttccactttcataaggtttggatcctttgagatttttaagtctgcagatgagcacacagggcgtgcaggccccagcgtggggaggaacgacattcgagtgcagctgctcgactatgtcatcagctccttttaccccgagatccaggctgctcatgccagcgacagcgtgcagagaaatgctgccttcttccgggaggtgacgcggcgcacggcgcggatggtggccgagtggcagtgtgtgggcttctgccacggcgtgctcaacaccgacaacatgagcatcctggggctcaccatcgactacgggccctttggcttcctggacaggtacgaccccgaccacgtgtgcaatgcctccgacaacaccggccgctacgcgtacagcaagcagcccgaggtgtgcaggtggaacctgcggaagctggccgaggccctgcagccggaactgcccctggagctgggggaggccatcctggccgaggagtttgacgccgagttccaaaggcactacctgcagaagatgcgcaggaagctgggcctcgtgcaggtggagctggaggaagacggggcgctggtgtccaagctcctggagaccatgcatctgaccggtgccgacttcacaaacaccttctacttgctgagctccttcccagtggagctagagtcgccaggcctggcggaattcctggccaggctgatggagcagtgtgcctccctggaggagctgaggctggccttccggccccagatggatccccggcagctatccatgatgctgatgctggcgcagtcaaacccgcagctgttcgcgcttatgggcacccgggcaggcatcgccagggagctggagcgtgtggagcagcagtctcggctggagcagctgagtgcggcagagctgcagagcaggaaccagggccactgggctgactggctacaggcgtacagagcccggctggacaaggacctggaaggcgctggggacgctgccgcctggcaggctgagcacgtgcgcgtgatgcacgccaacaacccgaagtacgtgctgaggaactacatcgcgcagaatgccatcgaggctgccgagcgcggggacttctcagaggtgcggcgggtgctgaaactactggagaccccttaccactgcgaggcgggggccgccacagacgccgaggccacggaagccgacggggcggacggcaggcagcgctcctacagcagtaagcccccgctctgggcagcagaactgtgcgtgacatgatcttcgtaacggcctcggcacgctccacacccctggagtctcccgaggcccccatgtgctgctgagtggccaagatgatgccaggctgccctatacactgggggattctgccctggcccatgcacacccgtctttccatgatggcagagacatccagtcaggacctgacccgtctctgtctgaggccggctcagcagtgcagcctggtccctgggggctggacccaggctcctaaataaaccagcaactccctcga

SEQ ID NO: 416873 - DNA, 1980 bp, Homo sapiens
gctcctgccgggcgccgagcccgccgcgcactgctactgcggccaccaattcggccagttcgccgggcagctgggcgacggcgccgccatgtacctgggcgaggtgtgcacggcgaacggcgagcgctgggagctgcagctcaagggcgccgggcccacgcccttctccagaaagaagatgctgatatgctacaacacggatgaacctggaggacgtggtgcagtgaaataagctggtcacagagagacaaatcctgggtgatcccacttacatgagacaggccgacggtcgcaaggtcctacggtcaagcatccgggagtttctatgcagcgaagccatgttccacctgggagtccccaccacacgggccggcgcctgcgtcacgtccgagtccacggtggtgcgcgacgtgttctatgatggtaatcccaaatatgaacaatgcacggttgtgttgcgtgtagcttccactttcataaggtttggatcctttgagatttttaagtctgcagatgagcacacagggcgtgcaggccccagcgtggggaggaacgacattcgagtgcagctgctcgactatgtcatcagctccttttaccccgagatccaggctgctcatgccagcgacagcgtgcagagaaatgctgccttcttccgggaggtgacgcggcgcacggcgcggatggtggccgagtggcagtgtgtgggcttctgccacggcgtgctcaacaccgacaacatgagcatcctggggctcaccatcgactacgggccctttggcttcctggacaggtacgaccccgaccacgtgtgcaatgcctccgacaacaccggccgctacgcgtacagcaagcagcccgaggtgtgcaggtggaacctgcggaagctggccgaggccctgcagccggaactgcccctggagctgggggaggccatcctggccgaggagtttgacgccgagttccaaaggcactacctgcagaagatgcgcaggaagctgggcctcgtgcaggtggagctggaggaagacggggcgctggtgtccaagctcctggagaccatgcatctgaccggtgccgacttcacaaacaccttctacttgctgagctccttcccagtggagctagagtcgccaggcctggcggaattcctggccaggctgatggagcagtgtgcctccctggaggagctgaggctggccttccggccccagatggatccccggcagctatccatgatgctgatgctggcgcagtcaaacccgcagctgttcgcgcttatgggcacccgggcaggcatcgccagggagctggagcgtgtggagcagcagtctcggctggagcagctgagtgcggcagagctgcagagcaggaaccagggccactgggctgactggctacaggcgtacagagcccggctggacaaggacctggaaggcgctggggacgctgccgcctggcaggctgagcacgtgcgcgtgatgcacgccaacaacccgaagtacgtgctgaggaactacatcgcgcagaatgccatcgaggctgccgagcgcggggacttctcagaggtgcggcgggtgctgaaactactggagaccccttaccactgcgaggcgggggccgccacagacgccgaggccacggaagccgacggggcggacggcaggcagcgctcctacagcagtaagcccccgctctgggcagcagaactgtgcgtgacatgatcttcgtaacggcctcggcacgctccacacccctggagtctcccgaggcccccatgtgctgctgagtggccaagatgatgccaggctgccctatacactgggggattctgccctggcccatgcacacccgtctttccatgatggcagagacatccagtcaggacctgacccgtctctgtctgaggccggctcagcagtgcagcctggtccctgggggctggacccaggctcctaaataaaccagcaactccctcga

SEQ ID NO: 416874 - DNA, 1605 bp, Homo sapiens
caaaaaaaaaaaaaaaatagccacaacaacgtcttttcctttttcttattttcacaaggggctggggtcaggtttggcctgttgacgcctcgggtcttccctccaggtttggatcctttgagatttttaagtctgcagatgagcacacagggcgtgcaggccccagcgtggggaggaacgacattcgagtgcagctgctcgactatgtcatcagctccttttaccccgagatccaggctgctcatgccagcgacagcgtgcagagaaatgctgccttcttccgggaggtgacgcggcgcacggcgcggatggtggccgagtggcagtgtgtgggcttctgccacggcgtgctcaacaccgacaacatgagcatcctggggctcaccatcgactacgggccctttggcttcctggacaggtacgaccccgaccacgtgtgcaatgcctccgacaacaccggccgctacgcgtacagcaagcagcccgaggtgtgcaggtggaacctgcggaagctggccgaggccctgcagccggaactgcccctggagctgggggaggccatcctggccgaggagtttgacgccgagttccaaaggcactacctgcagaagatgcgcaggaagctgggcctcgtgcaggtggagctggaggaagacggggcgctggtgtccaagctcctggagaccatgcatctgaccggtgccgacttcacaaacaccttctacttgctgagctccttcccagtggagctagagtcgccaggcctggcggaattcctggccaggctgatggagcagtgtgcctccctggaggagctgaggctggccttccggccccagatggatccccggcagctatccatgatgctgatgctggcgcagtcaaacccgcagctgttcgcgcttatgggcacccgggcaggcatcgccagggagctggagcgtgtggagcagcagtctcggctggagcagctgagtgcggcagagctgcagagcaggaaccagggccactgggctgactggctacaggcgtacagagcccggctggacaaggacctggaaggcgctggggacgctgccgcctggcaggctgagcacgtgcgcgtgatgcacgccaacaacccgaagtacgtgctgaggaactacatcgcgcagaatgccatcgaggctgccgagcgcggggacttctcagaggtgcggcgggtgctgaaactactggagaccccttaccactgcgaggcgggggccgccacagacgccgaggccacggaagccgacggggcggacggcaggcagcgctcctacagcagtaagcccccgctctgggcagcagaactgtgcgtgacatgatcttcgtaacggcctcggcacgctccacacccctggagtctcccgaggcccccatgtgctgctgagtggccaagatgatgccaggctgccctatacactgggggattctgccctggcccatgcacacccgtctttccatgatggcagagacatccagtcaggacctgacccgtctctgtctgaggccggctcagcagtgcagcctggtccctgggggctggacccaggctcctaaataaaccagcaactccctcga

SEQ ID NO: 416875 - DNA, 1726 bp, Homo sapiens
gtggggactgctgtctggttggggggggccaggccagcagggtggtggtggcaccaggatggacagtggcctggccctggggcaggtgtggcccctcagtgaactgacccttctctgcttctttggggtctctactgggcctgagtctggggttccctgatttttctagtttgggtaaaagccaaattttgtgagcatattaaagagtggatgctgtgagtgcaacgcactcttcatcgccaccttgtggttgaggcggtgacaggacatcaggaagatcgcccagaaactgcagagtgagagccactcagcgaagcacagccggtttcagggaggggaaggatggacacgagtggggaggtctgggcaggaccccgaggagggagcaagcacactgtcccaccccaggtgacgcggcgcacggcgcggatggtggccgagtggcagtgtgtgggcttctgccacggcgtgctcaacaccgacaacatgagcatcctggggctcaccatcgactacgggccctttggcttcctggacaggtacgaccccgaccacgtgtgcaatgcctccgacaacaccggccgctacgcgtacagcaagcagcccgaggtgtgcaggtggaacctgcggaagctggccgaggccctgcagccggaactgcccctggagctgggggaggccatcctggccgaggagtttgacgccgagttccaaaggcactacctgcagaagatgcgcaggaagctgggcctcgtgcaggtggagctggaggaagacggggcgctggtgtccaagctcctggagaccatgcatctgaccggtgccgacttcacaaacaccttctacttgctgagctccttcccagtggagctagagtcgccaggcctggcggaattcctggccaggctgatggagcagtgtgcctccctggaggagctgaggctggccttccggccccagatggatccccggcagctatccatgatgctgatgctggcgcagtcaaacccgcagctgttcgcgcttatgggcacccgggcaggcatcgccagggagctggagcgtgtggagcagcagtctcggctggagcagctgagtgcggcagagctgcagagcaggaaccagggccactgggctgactggctacaggcgtacagagcccggctggacaaggacctggaaggcgctggggacgctgccgcctggcaggctgagcacgtgcgcgtgatgcacgccaacaacccgaagtacgtgctgaggaactacatcgcgcagaatgccatcgaggctgccgagcgcggggacttctcagaggtgcggcgggtgctgaaactactggagaccccttaccactgcgaggcgggggccgccacagacgccgaggccacggaagccgacggggcggacggcaggcagcgctcctacagcagtaagcccccgctctgggcagcagaactgtgcgtgacatgatcttcgtaacggcctcggcacgctccacacccctggagtctcccgaggcccccatgtgctgctgagtggccaagatgatgccaggctgccctatacactgggggattctgccctggcccatgcacacccgtctttccatgatggcagagacatccagtcaggacctgacccgtctctgtctgaggccggctcagcagtgcagcctggtccctgggggctggacccaggctcctaaataaaccagcaactccctcga

SEQ ID NO: 416876 - DNA, 1556 bp, Homo sapiens
gctcctgccgggcgccgagcccgccgcgcactgctactgcggccaccaattcggccagttcgccgggcagctgggcgacggcgccgccatgtacctgggcgaggtgtgcacggcgaacggcgagcgctgggagctgcagctcaagggcgccgggcccacgcccttctccagaaagaagatgctgatatgctacaacacggatgaacctggaggacgtggtgcagtgaaataagctggtcacagagagacaaatcctgggtgatcccacttacatgagacaggccgacggtcgcaaggtcctacggtcaagcatccgggagtttctatgcagcgaagccatgttccacctgggagtccccaccacacgggccggcgcctgcgtcacgtccgagtccacggtggtgcgcgacgtgttctatgatggtaatcccaaatatgaacaatgcacggttgtgttgcgtgtagcttccactttcataaggtaatgccgggggcctttcggcctgtctacacgcacttgcttagagtcctaggagatttgggcctgtgctgctaggattctggtagaaacaaacccagatgaccgccttggcctcttctgaaagtccagcctgtccctggcagcctcagaagctgcctgtccgcgaagtagctgcgtcacgcccactgggagggatctgagtgcaaaggcatttggtactcagttaggacacttgtgctgagccctcccacgtgcccggccaggccctcgttgcagccagagatggccctgcgggagctggtgtgtctcaaagcaccagcagggggctccagggccacgggcaccagagaagggtccctgcctggtgcttctgggggggagggggtccctgagcctgaggctggggacagtgtccagagctgtttgctggagtttatgacaaggaactacttagacttgactgaggaaatggccactgaagaagcaggagccgcaagctgtgcgcggtgtcctgctcaggctttctgatctgatggtccagttgctcgttggtctggagtcctaggctggctcctgtctgacgtgagccatcagttatcagttctcttttctttttttttgagacagagtatcgctctgtcacccaggctggagtgcagtggcgtgatcttggctcagtgcaacctccgcctcccgggttcaagcgattctcctacctcagtccccccaaatagctggggttacagacgtgcgccaccacgtccagctaatttttatatttttagtacagacagggtttctccatgttggccaggctggtctcgaactcctgacctctggtgattcacccatcttggcctcctaaagtgctagaattataggcctgagccaccgcgcccggcccccagccatcagtttttgatgtcaccttgccacctggcgtctagcacttcctcctgaacacctgaatgtagttgtctgttggtcttgcagccccgtcctgcccgggacaccagccgcccacccctgaggctgcctgtgggcctctggcttttcctgtcctgcagggggatgg

SEQ ID NO: 416877 - DNA, 340 bp, Homo sapiens
cgtaagttaaaaagtgttgcggctgtggagaaattggaacccttctgcactgttggtgggaatgtaaaatgatagagttgctgtggaaaacagtgtggaagttcctcaaataattaaatcaccacatgattcagcagttctgcttctgggtatatccccaagagcaggatctcaagatttgtataccgatattcatggccaaaaggcagaacaagtgtctatcagcaggtgaatggattaaatgtgatgtgtacatacagtggaatattattcatccttaagaaagaagatgctgatatgctacaacacggatgaacctggaggacgtggtgcagtgaaa

SEQ ID NO: 416878 - DNA, 352 bp, Homo sapiens
gaacacaacatggatctatcctcttaaattgtggagggcaccgcacatcacagctgacgcaggagcagtgctgtacagccgagccctggagcttgttcacatccgccacccaaaccctgtgtgagccggttaccagctccccattcccctccctgcagcccctggtagcaaccactccgctccgagtctgtgaacctgactgctctaaacccttcatgtaagtggagttacacagcgtgtgcctgtttcttcagtctgttgtctccctctaatcttcgtgtaagtggagttacgcagcgtgcgcctgtttcttcagtctgttgtctccctctaatcttcgtttaagtggagt

SEQ ID NO: 416879 - DNA, 2028 bp, Homo sapiens
gctcctgccgggcgccgagcccgccgcgcactgctactgcggccaccaattcggccagttcgccgggcagctgggcgacggcgccgccatgtacctgggcgaggtgtgcacggcgaacggcgagcgctgggagctgcagctcaagggcgccgggcccacgcccttctccagaaagaagatgctgatatgctacaacacggatgaacctggaggacgtggtgcagtgaaataagctggtcacagagagacaaatcctgggtgatcccacttacatgagacaggccgacggtcgcaaggtcctacggtcaagcatccgggagtttctatgcagcgaagccatgttccacctgggagtccccaccacacgggccggcgcctgcgtcacgtccgagtccacggtggtgcgcgacgtgttctatgatggtaatcccaaatatgaacaatgcacggttgtgttgcgtgtagcttccactttcataaggggctggggtcaggtttggcctgttgacgcctcgggtcttccctccaggtttggatcctttgagatttttaagtctgcagatgagcacacagggcgtgcaggccccagcgtggggaggaacgacattcgagtgcagctgctcgactatgtcatcagctccttttaccccgagatccaggctgctcatgccagcgacagcgtgcagagaaatgctgccttcttccgggaggtgacgcggcgcacggcgcggatggtggccgagtggcagtgtgtgggcttctgccacggcgtgctcaacaccgacaacatgagcatcctggggctcaccatcgactacgggccctttggcttcctggacaggtacgaccccgaccacgtgtgcaatgcctccgacaacaccggccgctacgcgtacagcaagcagcccgaggtgtgcaggtggaacctgcggaagctggccgaggccctgcagccggaactgcccctggagctgggggaggccatcctggccgaggagtttgacgccgagttccaaaggcactacctgcagaagatgcgcaggaagctgggcctcgtgcaggtggagctggaggaagacggggcgctggtgtccaagctcctggagaccatgcatctgaccggtgccgacttcacaaacaccttctacttgctgagctccttcccagtggagctagagtcgccaggcctggcggaattcctggccaggctgatggagcagtgtgcctccctggaggagctgaggctggccttccggccccagatggatccccggcagctatccatgatgctgatgctggcgcagtcaaacccgcagctgttcgcgcttatgggcacccgggcaggcatcgccagggagctggagcgtgtggagcagcagtctcggctggagcagctgagtgcggcagagctgcagagcaggaaccagggccactgggctgactggctacaggcgtacagagcccggctggacaaggacctggaaggcgctggggacgctgccgcctggcaggctgagcacgtgcgcgtgatgcacgccaacaacccgaagtacgtgctgaggaactacatcgcgcagaatgccatcgaggctgccgagcgcggggacttctcagaggtgcggcgggtgctgaaactactggagaccccttaccactgcgaggcgggggccgccacagacgccgaggccacggaagccgacggggcggacggcaggcagcgctcctacagcagtaagcccccgctctgggcagcagaactgtgcgtgacatgatcttcgtaacggcctcggcacgctccacacccctggagtctcccgaggcccccatgtgctgctgagtggccaagatgatgccaggctgccctatacactgggggattctgccctggcccatgcacacccgtctttccatgatggcagagacatccagtcaggacctgacccgtctctgtctgaggccggctcagcagtgcagcctggtccctgggggctggacccaggctcctaaataaaccagcaactccctcga

SEQ ID NO: 416880 - DNA, 2091 bp, Homo sapiens
gctcctgccgggcgccgagcccgccgcgcactgctactgcggccaccaattcggccagttcgccgggcagctgggcgacggcgccgccatgtacctgggcgaggtgtgcacggcgaacggcgagcgctgggagctgcagctcaagggcgccgggcccacgcccttctccagacaggccgacggtcgcaaggtcctacggtcaagcatccgggagtttctatgcagcgaagccatgttccacctgggagtccccaccacacgggccggcgcctgcgtcacgtccgagtccacggtggtgcgcgacgtgttctatgatggtaatcccaaatatgaacaatgcacggttgtgttgcgtgtagcttccactttcataaggtttggatcctttgagatttttaagtctgcagatgagcacacagggcgtgcaggccccagcgtggggaggaacgacattcgagtgcagctgctcgactatgtcatcagctccttttaccccgagatccaggctgctcatgccagcgacagcgtgcagagaaatgctgccttcttccgggaggtgacgcggcgcacggcgcggatggtggccgagtggcagtgtgtgggcttctgccacggcgtgctcaacaccgacaacatgagcatcctggggctcaccatcgactacgggccctttggcttcctggacaggtacgaccccgaccacgtgtgcaatgcctccgacaacaccggccgctacgcgtacagcaagcagcccgaggtgtgcaggtggaacctgcggaagctggccgaggccctgcagccggaactgcccctggagctgggggaggccatcctggccgaggagtttgacgccgagttccaaaggcactacctgcagaagatgcgcaggaagctgggcctcgtgcaggtggagctggaggaagacggggcgctggtgtccaagctcctggagaccatgcatctgaccggaacacaacatggatctatcctcttaaattgtggagggcaccgcacatcacagctgacgcaggagcagtgctgtacagccgagccctggagcttgttcacatccgccacccaaaccctgtgtgagccggttaccagctccccattcccctccctgcagcccctggtagcaaccactccgctccgagtctgtgaacctgactgctctaaacccttcatgtgccgacttcacaaacaccttctacttgctgagctccttcccagtggagctagagtcgccaggcctggcggaattcctggccaggctgatggagcagtgtgcctccctggaggagctgaggctggccttccggccccagatggatccccggcagctatccatgatgctgatgctggcgcagtcaaacccgcagctgttcgcgcttatgggcacccgggcaggcatcgccagggagctggagcgtgtggagcagcagtctcggctggagcagctgagtgcggcagagctgcagagcaggaaccagggccactgggctgactggctacaggcgtacagagcccggctggacaaggacctggaaggcgctggggacgctgccgcctggcaggctgagcacgtgcgcgtgatgcacgccaacaacccgaagtacgtgctgaggaactacatcgcgcagaatgccatcgaggctgccgagcgcggggacttctcagaggtgcggcgggtgctgaaactactggagaccccttaccactgcgaggcgggggccgccacagacgccgaggccacggaagccgacggggcggacggcaggcagcgctcctacagcagtaagcccccgctctgggcagcagaactgtgcgtgacatgatcttcgtaacggcctcggcacgctccacacccctggagtctcccgaggcccccatgtgctgctgagtggccaagatgatgccaggctgccctatacactgggggattctgccctggcccatgcacacccgtctttccatgatggcagagacatccagtcaggacctgacccgtctctgtctgaggccggctcagcagtgcagcctggtccctgggggctggacccaggctcctaaataaaccagcaactccctcga

SEQ ID NO: 416881 - DNA, 2186 bp, Homo sapiens
gctcctgccgggcgccgagcccgccgcgcactgctactgcggccaccaattcggccagttcgccgggcagctgggcgacggcgccgccatgtacctgggcgaggtgtgcacggcgaacggcgagcgctgggagctgcagctcaagggcgccgggcccacgcccttctccagacaggccgacggtcgcaaggtcctacggtcaagcatccgggagtttctatgcagcgaagccatgttccacctgggagtccccaccacacgggccggcgcctgcgtcacgtccgagtccacggtggtgcgcgacgtgttctatgatggtaatcccaaatatgaacaatgcacggttgtgttgcgtgtagcttccactttcataaggtttggatcctttgagatttttaagtctgcagatgagcacacagggcgtgcaggccccagcgtggggaggaacgacattcgagtgcagctgctcgactatgtcatcagctccttttaccccgagatccaggctgctcatgccagcgacagcgtgcagagaaatgctgccttcttccgggaggtgacgcggcgcacggcgcggatggtggccgagtggcagtgtgtgggcttctgccacggcgtgctcaacaccgacaacatgagcatcctggggctcaccatcgactacgggccctttggcttcctggacaggtacgaccccgaccacgtgtgcaatgcctccgacaacaccggccgctacgcgtacagcaagcagcccgaggtgtgcaggtggaacctgcggaagctggccgaggccctgcagccggaactgcccctggagctgggggaggccatcctggccgaggagtttgacgccgagttccaaaggcactacctgcagaagatgcgcaggaagctgggcctcgtgcaggtggagctggaggaagacggggcgctggtgtccaagctcctggagaccatgcatctgaccggaacacaacatggatctatcctcttaaattgtggagggcaccgcacatcacagctgacgcaggagcagtgctgtacagccgagccctggagcttgttcacatccgccacccaaaccctgtgtgagccggttaccagctccccattcccctccctgcagcccctggtagcaaccactccgctccgagtctgtgaacctgactgctctaaacccttcatgtgccgacttcacaaacaccttctacttgctgagctccttcccagtggagctagagtcgccaggcctggcggaattcctggccaggctgatggagcagtgtgcctccctggaggagctgaggctggccttccggccccagatggatccccggcagctatccatgatgctgatgctggcgcagtcaaacccgcagctgttcgcgcttatgggcacccgggcaggcatcgccagggagctggagcgtgtggagcagcagtctcggctggagcagctgagtgcggcagagctgcagagcaggaaccagggccactgggctgactggctacaggcgtacaggtgagccctgcgtccatggtcaccgggggacggcgggtcgcgtgctggaaaaagtccagcccggctgtgactccagagcccggatgtcattccagagcccggctggacaaggacctggaaggcgctggggacgctgccgcctggcaggctgagcacgtgcgcgtgatgcacgccaacaacccgaagtacgtgctgaggaactacatcgcgcagaatgccatcgaggctgccgagcgcggggacttctcagaggtgcggcgggtgctgaaactactggagaccccttaccactgcgaggcgggggccgccacagacgccgaggccacggaagccgacggggcggacggcaggcagcgctcctacagcagtaagcccccgctctgggcagcagaactgtgcgtgacatgatcttcgtaacggcctcggcacgctccacacccctggagtctcccgaggcccccatgtgctgctgagtggccaagatgatgccaggctgccctatacactgggggattctgccctggcccatgcacacccgtctttccatgatggcagagacatccagtcaggacctgacccgtctctgtctgaggccggctcagcagtgcagcctggtccctgggggctggacccaggctcctaaataaaccagcaactccctcga

SEQ ID NO: 416882 - DNA, 288 bp, Homo sapiens
tgaactctgtgtttggtttcagacaggccgacggtcgcaaggtcctacggtcaagcatccgggagtttctatgcagcgaagccatgttccacctgggagtccccaccacacgggccggcgcctgcgtcacgtccgagtccacggtggtgcgcgacgtgttctatgatggtaatcccaaatatgaacaatgcacggttgtgttgcgtgtagcttccactttcataaggtaatgccgggggcctttcggcctgtctacacgcacttgcttagagtcctaggagatttggg

SEQ ID NO: 416883 - DNA, 417 bp, Homo sapiens
tctaattatccaagcgggcgggcggcagaggtgacatgcagcaagatgggctccgagtcatttacctggaatgcagccaagacaaggctggagaaggcagaattccaatgaagctgacactcaggacactgagcacaaagaaggaggcatctatgaactcacaggtcacaaggtcacagatgaccgcctcctgcctgctgacgatggctcgatccacggtggactgttccaggtactcgatgcgcatctgagccacctgcagctgtaagtatgagagaagtctattggacatctgttgtccctgataccaggacagagacatgggattaatatacaggcggccctcatgtcttcacaactattcatcaactcacacctgggagaaagcaaataaatttgcatttgaagctgccaggt

SEQ ID NO: 416884 - DNA, 293 bp, Homo sapiens
ctcaaatctcttaatctgcaccttctggaactctgtcttgttctctaggtcacagatgaccgcctcctgcctgctgacgatggctcgatccacggtggactgttccaggtactcgatgcgcatctgagccacctgcagctgtaagtatgagagaagtctattggacatctgttgtccctgataccaggacagagacatgggattaatatacaggcggccctcatgtcttcacaactattcatcaactcacacctgggagaaagcaaataaatttgcatttgaagctgccaggt

SEQ ID NO: 416885 - DNA, 239 bp, Homo sapiens
ccttgcacagtatgctacggacacaatgatgagcaaacccatccctaccttagaagcctagtctggcagaagacagacgtttcacagccagttacaacagaaggcagtgacgggcatgttattcacagctagcatctcttctggagccccacctttgtgccagccccgggcatacctgactccactgaattcccagaaccttccaaggcccaggttccttagtcatcttcattttccag

SEQ ID NO: 416886 - DNA, 838 bp, Homo sapiens
atgatgccattatagcttcatatactatttattaagttattaatatgaacagatatgcaacattacagatgtctttcaaagcctgtaataaaatatagtccactatccagcccaggagaaagacaacaaacagtatcattcttatagtaagtgtagcatacgtactcacaatagttcccttatttggacatcaaagggaacaatcagtcaagattctttacctccattagaatttaactttcttggattatagctgttttagagtcaaaagtccaacttagattatccacagagatgtgtagcatcacatgttggagaggaaggagctactgtcacctccgtggcagccctttctactgtcttgcagtccttctatatcgaagcccatcttgccttttaggccagtagtggtcaaatttgggtatggggagaaggcaggtgggtcacagggaggttttgattaatttacaaagattgtgtttcaaagctctaaaaacccatttggtggtggcagtggcagtgaagagtacactatatttcgccaagggggtcttctcatctcttgagtcttggctttctcatatcctttaaaattgctgcagttctcagtgggaaagtggaggtggcaaactctaacagcgattggtatggggccatctgcagaatgaactggactggctactatggcttttataacctgctttcctttctttagtctagacaagcttatttcttcatctttccacctacgtcctgctagttctaacataagatttaaaaggactatggaagataaaacttctcactttctagctgaatgatgaaaaacagcaaaaaa

SEQ ID NO: 416887 - DNA, 836 bp, Homo sapiens
gtgctcgactccccttcctctctatttcccactcccataagaccgagagtttgcaacaaaactaatgatgatacaattgattttgattatactgttctacttcatgaattatcaacacaggaaataattccctgtcgcattcacttggtctggtaccctggcaaacctcttaaagtgaagtaccactgtcaagagctacagacaccagaagaagcctccggaactgaagaaggatcagctgtagtaccaacagagcttagtaatttctaaaaagaaaaaatgatctttttccgacttctaaacaagtgactatactagcataaatcattcttctagtaaaacagctaaggtatagacattctaataatttgggaaaacctatgattacaagtaaaaactcagaaatgcaaagatgttggttttttgtttctcagtctgctttagcttttaactctggaagcgcatgcacactgaactctgctcagtgctaaacagtcaccagcaggttcctcagggtttcagccctaaaatgtaaaacctggataatcagtgtatgttgcaccagaatcagcattttttttttaactgcaaaaaatgatggtctcatctctgaatttatatttctcattcttttgaacatactatagctaatatattttatgttgctaaattgcttctatctagcatgttaaacaaagataatatactttcgatgaaagtaaattataggaaaaaaattaactgttttaaaaagaacttgattatgttttatgatttcaggcaagtattcatttttaacttgctacctacttttaaataaatgtttacatttctaa

SEQ ID NO: 416888 - DNA, 851 bp, Homo sapiens
ccacgtccggggtgccgagccaactttcctgcgtccatgcagccccgccggcaacggctgcccgctccctggtccgggcccaggggcccgcgccccaccgccccgctgctcgcgctgctgctgttgctcgccccggtggcggcgcccgcggggtccgggggccccgacgaccctgggcagcctcaggatgctggggtcccgcgcaggctcctgcagcaggcggcgcgcgcggcgcttcacttcttcaacttccggtccggctcgcccagcgcgctgcgagtgctggccgaggtgcaggagggccgcgcgtggattaatccaaaagagggatgtaaagttcacgtggtcttcagcacagagcgctacaacccagagtctttacttcaggaaggtgagggacgtttggggaaatgttctgctcgagtgtttttcaagaatcagaaacccagaccaaccatcaatgtaacttgtacacggctcatcgagaaaaagaaaagacaacaagaggattacctgctttacaagcaaatgaagcaactgaaaaaccccttggaaatagtcagcatacctgataatcatggacatattgatccctctctgagactcatctgggatttggctttccttggaagctcttacgtgatgtgggaaatgacaacacaggtgtcacactactacttggcacagctcactagtgtgaggcagtgggtaagaaaaacctgaaaattaacttgtgccacaagagttacaatcaaagtggtctccttagactgaattcatgtgaacttctaatttcatatcaagagttgtaatcacatttatttcaataaatatgtgagttcctgcaatgg

SEQ ID NO: 416889 - DNA, 1231 bp, Homo sapiens
  misc_feature (25)..(25): n is a, c, g, or t
  misc_feature (69)..(69): n is a, c, g, or t
  misc_feature (71)..(72): n is a, c, g, or t
  misc_feature (1125)..(1125): n is a, c, g, or t
cgtgtaaaactagaataaaaaaaanaaaaaaaagcccgccatcccactcatagtgagtctcattatgangnngattatactgttctacttcatgaattatcaacacaggaaataattccctgtcgcattcacttggtctggtaccctggcaaacctcttaaagtgaagtaccactgtcaagagctacagacaccagaagaagcctccggaactgaagaaggatcagctgtagtaccaacagagcttagtaatttctaaaaagaaaaaatgatctttttccgacttctaaacaagtgactatactagcataaatcattcttctagtaaaacagctaaggtatagacattctaataatttgggaaaacctatgattacaagtaaaaactcagaaatgcaaagatgttggttttttgtttctcagtctgctttagcttttaactctggaagcgcatgcacactgaactctgctcagtgctaaacagtcaccagcaggttcctcagggtttcagccctaaaatgtaaaacctggataatcagtgtatgttgcaccagaatcagcattttttttttaactgcaaaaaatgatggtctcatctctgaatttatatttctcattcttttgaacatactatagctaatatattttatgttgctaaattgcttctatctagcatgttaaacaaagataatatactttcgatgaaagtaaattataggaaaaaaattaactgttttaaaaagaacttgattatgttttatgatttcaggcaagtattcatttttaacttgctacctacttttaaataaatgtttacatttctaatagagaacagcaccgaaacataaacgacgacgttgtttcgccctcctatcgtgaagcgattatcctcttagtcccttcgtatcccacatgaacgccacgcctcccggttggcctgtcacgcttctccgggcgatttccgactccctattcccgcgccgtcattcgttggaattaaccatcacaggcgatcggtctcgatatggatagagaaacgtgacatggcgaagcacgaaataatcgcgggcgtgttccgaccggcgacgtacacaccttcaattttcaccgatacatcaccaccccnatcattccctcacatcatccccccgtctccttcaatgcgcgttcatattcatccccccctcacgtcattcgccatttcttccctccctacactctttatcactagg

SEQ ID NO: 416890 - DNA, 383 bp, Homo sapiens
tcccttcctagctgtaatctcaaattacctctcctgtaaaaccaggctcataatacacagattgtaaaggagaattagatgagaacatgtagaaggtgcctagcacagaacccagcccatggtggaccttctagaattactgattgcccctccccttgtcttattgcctgtcatatcagggctaatatatcagcttgaggtatatatacagtatctagatccttaaggttgttaaaagaatctccctattcccacagactttggtctccatcagaaaaagtgacagacattcaaccagactttcatataactcagtgacaagacaaaaatgaggatccatgacttccatatcttgaagcaaaataccaccaaaaaccgtgagg

SEQ ID NO: 416891 - DNA, 1487 bp, Homo sapiens
ccacgtccggggtgccgagccaactttcctgcgtccatgcagccccgccggcaacggctgcccgctccctggtccgggcccaggggcccgcgccccaccgccccgctgctcgcgctgctgctgttgctcgccccggtggcggcgcccgcggggtccgggggccccgacgaccctgggcagcctcaggatgctggggtcccgcgcaggctcctgcagcaggcggcgcgcgcggcgcttcacttcttcaacttccggtccggctcgcccagcgcgctgcgagtgctggccgaggtgcaggagggccgcgcgtggattaatccaaaagagggatgtaaagttcacgtggtcttcagcacagagcgctacaacccagagtctttacttcaggaaggtgagggacgtttggggaaatgttctgctcgagtgtttttcaagaatcagaaacccagaccaaccatcaatgtaacttgtacacggctcatcgagaaaaagaaaagacaacaagaggattacctgctttacaagcaaatgaagcaactgaaaaaccccttggaaatagtcagcatacctgataatcatggacatattgatccctctctgagactcatctgggatttggctttccttggaagctcttacgtgatgtgggaaatgacaacacaggtgtcacactactacttggcacagctcactagtgtgaggcagtggaaaactaatgatgatacaattgattttgattatactgttctacttcatgaattatcaacacaggaaataattccctgtcgcattcacttggtctggtaccctggcaaacctcttaaagtgaagtaccactgtcaagagctacagacaccagaagaagcctccggaactgaagaaggatcagctgtagtaccaacagagcttagtaatttctaaaaagaaaaaatgatctttttccgacttctaaacaagtgactatactagcataaatcattcttctagtaaaacagctaaggtatagacattctaataatttgggaaaacctatgattacaagtaaaaactcagaaatgcaaagatgttggttttttgtttctcagtctgctttagcttttaactctggaagcgcatgcacactgaactctgctcagtgctaaacagtcaccagcaggttcctcagggtttcagccctaaaatgtaaaacctggataatcagtgtatgttgcaccagaatcagcattttttttttaactgcaaaaaatgatggtctcatctctgaatttatatttctcattcttttgaacatactatagctaatatattttatgttgctaaattgcttctatctagcatgttaaacaaagataatatactttcgatgaaagtaaattataggaaaaaaattaactgttttaaaaagaacttgattatgttttatgatttcaggcaagtattcatttttaacttgctacctacttttaaataaatgtttacatttctaa

SEQ ID NO: 416892 - DNA, 1267 bp, Homo sapiens
aggattaggcactgctagtttcagctcccatcccctctggcatccactgtgtgagacgaaatattcccccctttagttaaatactcatcccctgataagggtttcgatgactcatcgaaacccttcatcaacctggtcatcgaaaccctagggatggtgtatttctggcctttccaaatgaaagcaaactacttctgatgggttttatggacagggtttgatgaccccgcatcggcatcaatgtaacttgtacacggctcatcgagaaaaagaaaagacaacaagaggattacctgctttacaagcaaatgaagcaactgaaaaaccccttggaaatagtcagcatacctgataatcatggacatattgatccctctctgagactcatctgggatttggctttccttggaagctcttacgtgatgtgggaaatgacaacacaggtgtcacactactacttggcacagctcactagtgtgaggcagtggaaaactaatgatgatacaattgattttgattatactgttctacttcatgaattatcaacacaggaaataattccctgtcgcattcacttggtctggtaccctggcaaacctcttaaagtgaagtaccactgtcaagagctacagacaccagaagaagcctccggaactgaagaaggatcagctgtagtaccaacagagcttagtaatttctaaaaagaaaaaatgatctttttccgacttctaaacaagtgactatactagcataaatcattcttctagtaaaacagctaaggtatagacattctaataatttgggaaaacctatgattacaagtaaaaactcagaaatgcaaagatgttggttttttgtttctcagtctgctttagcttttaactctggaagcgcatgcacactgaactctgctcagtgctaaacagtcaccagcaggttcctcagggtttcagccctaaaatgtaaaacctggataatcagtgtatgttgcaccagaatcagcattttttttttaactgcaaaaaatgatggtctcatctctgaatttatatttctcattcttttgaacatactatagctaatatattttatgttgctaaattgcttctatctagcatgttaaacaaagataatatactttcgatgaaagtaaattataggaaaaaaattaactgttttaaaaagaacttgattatgttttatgatttcaggcaagtattcatttttaacttgctacctacttttaaataaatgtttacatttctaa

SEQ ID NO: 416893 - DNA, 987 bp, Homo sapiens
gtatagctgattctagaggatcacccggaaagcacactgcaacaccccttgggaaatagtcagcatacctgataatcatggacatattgatccctctctgagactcatctgggatttggctttccttggaagctcttacgtgatgtgggaaatgacaacacaggtgtcacactactacttggcacagctcactagtgtgaggcagtggaaaactaatgatgatacaattgattttgattatactgttctacttcatgaattatcaacacaggaaataattccctgtcgcattcacttggtctggtaccctggcaaacctcttaaagtgaagtaccactgtcaagagctacagacaccagaagaagcctccggaactgaagaaggatcagctgtagtaccaacagagcttagtaatttctaaaaagaaaaaatgatctttttccgacttctaaacaagtgactatactagcataaatcattcttctagtaaaacagctaaggtatagacattctaataatttgggaaaacctatgattacaagtaaaaactcagaaatgcaaagatgttggttttttgtttctcagtctgctttagcttttaactctggaagcgcatgcacactgaactctgctcagtgctaaacagtcaccagcaggttcctcagggtttcagccctaaaatgtaaaacctggataatcagtgtatgttgcaccagaatcagcattttttttttaactgcaaaaaatgatggtctcatctctgaatttatatttctcattcttttgaacatactatagctaatatattttatgttgctaaattgcttctatctagcatgttaaacaaagataatatactttcgatgaaagtaaattataggaaaaaaattaactgttttaaaaagaacttgattatgttttatgatttcaggcaagtattcatttttaacttgctacctacttttaaataaatgtttacatttctaa

SEQ ID NO: 416894 - DNA, 834 bp, Homo sapiens
ccaacgtagtactaacatacatagaacgagatgcaactatccggatctcatgaacaaaactaatgatgatacaattgattttgattatactgttctacttcatgaattatcaacacaggaaataattccctgtcgcattcacttggtctggtaccctggcaaacctcttaaagtgaagtaccactgtcaagagctacagacaccagaagaagcctccggaactgaagaaggatcagctgtagtaccaacagagcttagtaatttctaaaaagaaaaaatgatctttttccgacttctaaacaagtgactatactagcataaatcattcttctagtaaaacagctaaggtatagacattctaataatttgggaaaacctatgattacaagtaaaaactcagaaatgcaaagatgttggttttttgtttctcagtctgctttagcttttaactctggaagcgcatgcacactgaactctgctcagtgctaaacagtcaccagcaggttcctcagggtttcagccctaaaatgtaaaacctggataatcagtgtatgttgcaccagaatcagcattttttttttaactgcaaaaaatgatggtctcatctctgaatttatatttctcattcttttgaacatactatagctaatatattttatgttgctaaattgcttctatctagcatgttaaacaaagataatatactttcgatgaaagtaaattataggaaaaaaattaactgttttaaaaagaacttgattatgttttatgatttcaggcaagtattcatttttaacttgctacctacttttaaataaatgtttacatttctaa

SEQ ID NO: 416895 - DNA, 832 bp, Homo sapiens
caatgggagccgaggggcttgggactacggcacgaggaagactgaactgttcaaaaactaatgatgatacaattgattttgattatactgttctacttcatgaattatcaacacaggaaataattccctgtcgcattcacttggtctggtaccctggcaaacctcttaaagtgaagtaccactgtcaagagctacagacaccagaagaagcctccggaactgaagaaggatcagctgtagtaccaacagagcttagtaatttctaaaaagaaaaaatgatctttttccgacttctaaacaagtgactatactagcataaatcattcttctagtaaaacagctaaggtatagacattctaataatttgggaaaacctatgattacaagtaaaaactcagaaatgcaaagatgttggttttttgtttctcagtctgctttagcttttaactctggaagcgcatgcacactgaactctgctcagtgctaaacagtcaccagcaggttcctcagggtttcagccctaaaatgtaaaacctggataatcagtgtatgttgcaccagaatcagcattttttttttaactgcaaaaaatgatggtctcatctctgaatttatatttctcattcttttgaacatactatagctaatatattttatgttgctaaattgcttctatctagcatgttaaacaaagataatatactttcgatgaaagtaaattataggaaaaaaattaactgttttaaaaagaacttgattatgttttatgatttcaggcaagtattcatttttaacttgctacctacttttaaataaatgtttacatttctaa

SEQ ID NO: 416896 - DNA, 824 bp, Homo sapiens
  misc_feature (25)..(25): n is a, c, g, or t
  misc_feature (69)..(69): n is a, c, g, or t
  misc_feature (71)..(72): n is a, c, g, or t
cgtgtaaaactagaataaaaaaaanaaaaaaaagcccgccatcccactcatagtgagtctcattatgangnngattatactgttctacttcatgaattatcaacacaggaaataattccctgtcgcattcacttggtctggtaccctggcaaacctcttaaagtgaagtaccactgtcaagagctacagacaccagaagaagcctccggaactgaagaaggatcagctgtagtaccaacagagcttagtaatttctaaaaagaaaaaatgatctttttccgacttctaaacaagtgactatactagcataaatcattcttctagtaaaacagctaaggtatagacattctaataatttgggaaaacctatgattacaagtaaaaactcagaaatgcaaagatgttggttttttgtttctcagtctgctttagcttttaactctggaagcgcatgcacactgaactctgctcagtgctaaacagtcaccagcaggttcctcagggtttcagccctaaaatgtaaaacctggataatcagtgtatgttgcaccagaatcagcattttttttttaactgcaaaaaatgatggtctcatctctgaatttatatttctcattcttttgaacatactatagctaatatattttatgttgctaaattgcttctatctagcatgttaaacaaagataatatactttcgatgaaagtaaattataggaaaaaaattaactgttttaaaaagaacttgattatgttttatgatttcaggcaagtattcatttttaacttgctacctacttttaaataaatgtttacatttctaa

SEQ ID NO: 416897 - DNA, 834 bp, Homo sapiens
ccacgtccggggtgccgagccaactttcctgcgtccatgcagccccgccggcaacggctgcccgctccctggtccgggcccaggggcccgcgccccaccgccccgctgctcgcgctgctgctgttgctcgccccggtggcggcgcccgcggggtccgggggccccgacgaccctgggcagcctcaggatgctggggtcccgcgcaggctcctgcagcaggcggcgcgcgcggcgcttcacttcttcaacttccggtccggctcgcccagcgcgctgcgagtgctggccgaggtgcaggagggccgcgcgtggattaatccaaaagagggatgtaaagttcacgtggtcttcagcacagagcgctacaacccagagtctttacttcaggaaggtgagggacgtttggggaaatgttctgctcgagtgtttttcaagaatcagaaacccagaccaaccatcaatgtaacttgtacacggctcatcgagaaaaagaaaagacaacaagaggattacctgctttacaagcaaatgaagcaactgaaaaaccccttggaaatagtcagcatacctgataatcatggacatattgatccctctctgagactcatctgggatttggctttccttggaagctcttacgtgatgtgggaaatgacaacacaggtgtcacactactacttggcacagctcactagtgtgaggcagtggactttggtctccatcagaaaaagtgacagacattcaaccagactttcatataactcagtgacaagacaaaaatgaggatccatgacttccatatcttgaagcaaaataccaccaaaaaccgtgagg

SEQ ID NO: 416898 - DNA, 422 bp, Homo sapiens
caagagtaaagtggccactactctaaaggtttgagccaagcagtgctcaatggatgtcaatgatatttctttggaaatatgcccaatgtcattttataaagtcacaatcagaagacaagagtttaaatgatagcaaagagagaaggactgttgtattcagctgtgagcacaacccacaataaaccaaaacccactacatctattgatgccagagcctgcctgccttgtacaatgaactcttctcaatcttgtgtgtgcttgtgtgcactggggtgagtgggaggtgataaagtatcctgtttaactccacagtctttacttcaggaaggtgagggacgtttggggaaatgttctgctcgagtgtttttcaagaatcagaaacccagaccaaccatcaatgtaacttgtacacggctcatcga

SEQ ID NO: 416899 - DNA, 223 bp, Homo sapiens
  misc_feature (206)..(206): n is a, c, g, or t
gactgggaagcagagaccaccatcacattgactgtagacctaaaccagaagataatcatggacatattgatccctctctgagactcatctgggatttggctttccttggaagctcttacgtgatgtgggaaatgacaacacaggtgtcacactactacttggcacagctcactagtgtgaggcagtggaatctccctattcccatnatgactttgggcgagaa

SEQ ID NO: 416900 - DNA, 1507 bp, Homo sapiens
ccacgtccggggtgccgagccaactttcctgcgtccatgcagccccgccggcaacggctgcccgctccctggtccgggcccaggggcccgcgccccaccgccccgctgctcgcgctgctgctgttgctcgccccggtggcggcgcccgcggggtccgggggccccgacgaccctgggcagcctcaggatgctggggtcccgcgcaggctcctgcagcaggcggcgcgcgcggcgcttcacttcttcaacttccggtccggctcgcccagcgcgctgcgagtgctggccgaggtgcaggagggccgcgcgtggattaatccaaaagagggatgtaaagttcacgtggtcttcagcacagagcgctacaacccagagtctttacttcaggaaggtgagggacgtttggggaaatgttctgctcgagtgtttttcaagaatcagaaacccagaccaaccatcaatgtaacttgtacacggctcatcgagaaaaagaaaagacaacaagaggattacctgctttacaagcaaatgaagcaactgaaaaaccccttggaaatagtcagcatacctgataatcatggacatattgatccctctctgagactcatctgggatttggctttccttggaagctcttacgtgatgtgggaaatgacaacacaggtgtcacactactacttggcacagctcactagtgtgaggcagtggaaaactaatgatgatacaattgattttgattatactgttctacttcatgaattatcaacacaggaaataattccctgtcgcattcacttggtctggtaccctggcaaacctcttaaagtgaagtaccactgtcaagagctacagacaccagaagaagcctccggaactgaagaaggatcagctgtagtaccaacagagcttagtaatttctaaaaagaaaaaatgatctttttccgacttctaaacaagtgactatactagcataaatcattcttctagtaaaacagctaaggtatagacattctaataatttgggaaaacctatgattacaagtaaaaactcagaaatgcaaagatgttggttttttgtttctcagtctgctttagcttttaactctggaagcgcatgcacactgaactctgctcagtgctaaacagtcaccagcaggttcctcagggtttcagccctaaaatgtaaaacctggataatcagtgtatgttgcaccagaatcagcattttttttttaactgcaaaaaatgatggtctcatctctgaatttatatttctcattcttttgaacatactatagctaatatattttatgttgctaaattgcttctatctagcatgttaaacaaagataatatactttcgatgaaagtaaattataggaaaaaaattaactgttttaaaaagaacttgattatgttttatgatttcaggcaagtattcatttttaacttgctacctacttttaaataaatgtttacatttctaaataatgaaatgtgttgaatg

SEQ ID NO: 416901 - DNA, 1138 bp, Homo sapiens
  misc_feature (19)..(19): n is a, c, g, or t
  misc_feature (51)..(52): n is a, c, g, or t
gaggatccccatcgaggcnatgtgaagacagccagccgacattcttccaannggaagatgtgcatagaaacagatacaaacaaatcacatatatggctcaaggtcttgctgtgagagagatgactggtatgactaagtttaaaccctatttcatttctgcaacttctgagattttgtctcaaaaatgcattaatacaaatgtgctttttttgtctctctcagataatcatggacatattgatccctctctgagactcatctgggatttggctttccttggaagctcttacgtgatgtgggaaatgacaacacaggtgtcacactactacttggcacagctcactagtgtgaggcagtggaaaactaatgatgatacaattgattttgattatactgttctacttcatgaattatcaacacaggaaataattccctgtcgcattcacttggtctggtaccctggcaaacctcttaaagtgaagtaccactgtcaagagctacagacaccagaagaagcctccggaactgaagaaggatcagctgtagtaccaacagagcttagtaatttctaaaaagaaaaaatgatctttttccgacttctaaacaagtgactatactagcataaatcattcttctagtaaaacagctaaggtatagacattctaataatttgggaaaacctatgattacaagtaaaaactcagaaatgcaaagatgttggttttttgtttctcagtctgctttagcttttaactctggaagcgcatgcacactgaactctgctcagtgctaaacagtcaccagcaggttcctcagggtttcagccctaaaatgtaaaacctggataatcagtgtatgttgcaccagaatcagcattttttttttaactgcaaaaaatgatggtctcatctctgaatttatatttctcattcttttgaacatactatagctaatatattttatgttgctaaattgcttctatctagcatgttaaacaaagataatatactttcgatgaaagtaaattataggaaaaaaattaactgttttaaaaagaacttgattatgttttatgatttcaggcaagtattcatttttaacttgctacctacttttaaataaatgtttacatttctaa

SEQ ID NO: 416902 - DNA, 1894 bp, Homo sapiens
  misc_feature (1788)..(1788): n is a, c, g, or t
ccacgtccggggtgccgagccaactttcctgcgtccatgcagccccgccggcaacggctgcccgctccctggtccgggcccaggggcccgcgccccaccgccccgctgctcgcgctgctgctgttgctcgccccggtggcggcgcccgcggggtccgggggccccgacgaccctgggcagcctcaggatgctggggtcccgcgcaggctcctgcagcaggcggcgcgcgcggcgcttcacttcttcaacttccggtccggctcgcccagcgcgctgcgagtgctggccgaggtgcaggagggccgcgcgtggattaatccaaaagagggatgtaaagttcacgtggtcttcagcacagagcgctacaacccagagtctttacttcaggaaggtgagggacgtttggggaaatgttctgctcgagtgtttttcaagaatcagaaacccagaccaaccatcaatgtaacttgtacacggctcatcgagaaaaagaaaagacaacaagaggattacctgctttacaagcaaatgaagcaactgaaaaaccccttggaaatagtcagcatacctgataatcatggacatattgatccctctctgagactcatctgggatttggctttccttggaagctcttacgtgatgtgggaaatgacaacacaggtgtcacactactacttggcacagctcactagtgtgaggcagtggaaaactaatgatgatacaattgattttgattatactgttctacttcatgaattatcaacacaggaaataattccctgtcgcattcacttggtctggtaccctggcaaacctcttaaagtgaagtaccactgtcaagagctacagacaccagaagaagcctccggaactgaagaaggatcagctgtagtaccaacagagcttagtaatttctaaaaagaaaaaatgatctttttccgacttctaaacaagtgactatactagcataaatcattcttctagtaaaacagctaaggtatagacattctaataatttgggaaaacctatgattacaagtaaaaactcagaaatgcaaagatgttggttttttgtttctcagtctgctttagcttttaactctggaagcgcatgcacactgaactctgctcagtgctaaacagtcaccagcaggttcctcagggtttcagccctaaaatgtaaaacctggataatcagtgtatgttgcaccagaatcagcattttttttttaactgcaaaaaatgatggtctcatctctgaatttatatttctcattcttttgaacatactatagctaatatattttatgttgctaaattgcttctatctagcatgttaaacaaagataatatactttcgatgaaagtaaattataggaaaaaaattaactgttttaaaaagaacttgattatgttttatgatttcaggcaagtattcatttttaacttgctacctacttttaaataaatgtttacatttctaatagagaacagcaccgaaacataaacgacgacgttgtttcgccctcctatcgtgaagcgattatcctcttagtcccttcgtatcccacatgaacgccacgcctcccggttggcctgtcacgcttctccgggcgatttccgactccctattcccgcgccgtcattcgttggaattaaccatcacaggcgatcggtctcgatatggatagagaaacgtgacatggcgaagcacgaaataatcgcgggcgtgttccgaccggcgacgtacacaccttcaattttcaccgatacatcaccaccccnatcattccctcacatcatccccccgtctccttcaatgcgcgttcatattcatccccccctcacgtcattcgccatttcttccctccctacactctttatcactagg

SEQ ID NO: 416903 - DNA, 793 bp, Homo sapiens
ccacgtccggggtgccgagccaactttcctgcgtccatgcagccccgccggcaacggctgcccgctccctggtccgggcccaggggcccgcgccccaccgccccgctgctcgcgctgctgctgttgctcgccccggtggcggcgcccgcggggtccgggggccccgacgaccctgggcagcctcaggatgctggggtcccgcgcaggctcctgcagcaggcggcgcgcgcggcgcttcacttcttcaacttccggtccggctcgcccagcgcgctgcgagtgctggccgaggtgcaggagggccgcgcgtggattaatccaaaagagggatgtaaagttcacgtggtcttcagcacagagcgctacaacccagagtctttacttcaggaaggtgagggacgtttggggaaatgttctgctcgagtgtttttcaagaatcagaaacccagaccaaccatcaatgtaacttgtacacggctcatcgagaaaaagaaaagacaacaagaggattacctgctttacaagcaaatgaagcaactgaaaaaccccttggaaatagtcagcatacctggtatgaatcagcatttggaatttctatattcaggaatgtatgtaataactaaatccttaaaagaaagatcatttaagtttttatccctaaagtggcactttcattcaactaaatattgtggtatccctcataatttaaacaaaactcagaggtatcatctttctgttcttcatctctaatccaacacagtaactccaccaacagcatgtatccctttcatca

SEQ ID NO: 416904 - DNA, 686 bp, Homo sapiens
tcttttagtttactaacttgacttaagaagtcctgatcattttttgatgttcatgcataccgtatagatcctacctcatttgactcctacaaaatatttgttaagggtgttctaaaagttactttttgtagttaaactacactttatttacatttgtttgttatggaaataatgcataataatcgttaaaaatccaaacaaaaggggggaacatattaaaagaaaagtaagggtctccctgctactctacctacctacccacctaccttatctgttaccatatcctagacccaactgcaattaacaatttctggttttagttcttctggttcttttcattataaccttaaatactgtacatatacatcttgactcaccagctgaaaatccttcaaagggacaaaaacttattcttaactcctaatttaaaaaattgtattacttttagttttgctagaagctttcatgactttaggttgtttacctaaatcattatttataaattttacacactgtatattggctccctactaggagaggtgaggaattggtacattcttactttctcgtcttttcccctccccctcctaattttgttagtttcattctcatttttagtctgtcaagaatttgcattctttttgtaaataaaattacagacatcccttggtatccatgggggattg

SEQ ID NO: 416905 - DNA, 403 bp, Homo sapiens
ccctctcctgtaagggtatttttttaacgtcattttagacataaacaggctttaaagagtagaagtgcttttgaagataatgagttacagtatttcaaagaaactgtacttttatttttctaatcaactgagacagacaccattctaaaaaggtcaagaatcataaacttgacaagaaaagttttcatcactctaggcctttccctttacattatataagagcaggaatctgggaagaattaagtccctcccattccctctcccaataacttgtaaaaaggagtagcagtcacaaaagaaaatatgattcatagatatattctaccatgtgttttgacttgtagaatttttcataccagaaaaggttaaacattttattaactgtaaggtgtttaggtgggta

SEQ ID NO: 416906 - DNA, 466 bp, Homo sapiens
agaaatctgtctttataaaaaagttcaaatttattgctctaaaattacattttaaaatttctgtatggttagtaactatatcccctcttgcattccatgtaaaatatctattttctttttttgttatgataagcttaattctagcctttttgaaaaattaagtcctgatatgattaatcctctattgtgcgttagatataattaattaaattctgctatttatttccttccatattttttatgggagtttatattgctaattcttttcctaacttcttgagatcaatgctataacagattctgttatgttgttcaatcctcatattccccagaagagaagattatgcatattcaacactgtcacctgccttttaagaatatatattccaaaattagccaggtttggtggtgcatgcctgtagtcccagctactcaggaggctgaagcactgcttgagcccaggagg

SEQ ID NO: 416907 - DNA, 436 bp, Homo sapiens
ttcagagaaaagttctaaaaaactttaaaaataagaaaaggctttgaaatctatgaaaaatgtttcatttgattattcttcccaaatatacaggaactaaatataagattatgtatctttgaacagtataactgagaggaggggagagtaaatgacttacccaagataacagttcaatgtgctgagcactcttctctcctggtatctcttctttagatgtaacaaagctccaaaactacttgggagagttgtatagtaacgtagaagtatagctgactttgctagttgtatgggccgccttttttgaaattttgttggataggttaaaaaaaaaattgctagatgcagtggctcacatctgtaatcccagcactttggaagacccaggcgggagaatctcagaggcaggaattcaagaccagcgcccccataggaa

SEQ ID NO: 416908 - DNA, 390 bp, Homo sapiens
aggccatcagacatagtttggaactacatcaccacctttcctatgtctccacattgcacacagcagattcccagcctccataattgtgtgtatcaactacttaaatacattataacacacacacacacacacacacacacacacacacacacatacaccatttgtcctgtttctctgaagaactctgacaaaatacagattttggtactgaaagagattctagaggaacggaattttaaggataaattttctgaattggttatggggtttctgaaattggctctataatctaattagatataaaattctggtaactttatttacaataataaagatagcactatgtgttcatggcttgaactggtaataaagatacaaaaatatccacat

SEQ ID NO: 416909 - DNA, 387 bp, Homo sapiens
taaaaattatttcaaaatattctcaccaaggaatgagtaagctgaagtatttatctaccgaatctcatatgccattgattgagagttgctcctgttggtgttaaaccttgtgtatgggctgagtgaactcctgagtaccagtgaaaattacaggtagaaaagctaagacatgcgggcacttgaggggacataggacctgtccatcacaggtgtagaagacagtgaagtagaagtaagcatgagactgatatctttaaaaccaaatgaagaaagtgtttcaagaaggaggtatgtattgactgtgttgatggaccaagtaagatgaattgactactgggtttgacaccatggcttctacattttctagatgcaccctagaggttctcc

SEQ ID NO: 416910 - DNA, 345 bp, Homo sapiens
aatacatttggtaaaatttttactaggaaatgttctatcttttctaaagatttcaaattattggtatgaagttcttcataaaaatccttatattaacattttaaatcctcagtattctgcagtgttctatatgctttgattaggtcatgtgactgttcattttgtatgtcaaattgactgggcaaagggatacccaggtagttggtgaaacattattttggggtatgtctgtgagagtatttctggaagagattagcattcgaatcagtagattgaatgaagaagatcccccttcactactgtagataggcgttatccagtccctgtgtgggaagcaaggactgt

SEQ ID NO: 416911 - DNA, 336 bp, Homo sapiens
cctgggtgacagagtgagactctgtctcaaaaataaataaataaaataaaataaataaaaataaaaagtttgtttccaaagtgcccaatggaattttttatgtgtacattatatataactaggcctttctattcatgtctctgtctctcacacacacacacgcgcacgcgcgcacacacacacacactgtcatcctctctctctccctagtttatttagtgaatttcttgatgtagatagcttcaacagttgaagtaaatagggatttgtttttagtagggctaaggaaccttaagatgaaaacaaagatattaaactttacttatggttttcctc

SEQ ID NO: 416912 - DNA, 412 bp, Homo sapiens
gcttgtggctaaggtatggaactgtttggttgtttgatttaatactctttcttgacaatcttgaaagtatcaaccttaagcagtcccccaatttttagaaaaaaatattggtttatgagattaaaatttttttaggaactgctgttgtatactataatgctaagttgtgcattcaatgctctatgtaatgaacagagttaaattgacctaaatagaattgattttctcttgaactggtatagtgactaaacataattctgaataaccatgtagtctgcattatttggttgttaatatggccaaaataaccagactgactctggcaacaagtctgtcttcttagcaaagtaaacggattgactatatgtctatataattgctttctcagcagttgtgtaatgcttgatccagt

SEQ ID NO: 416913 - DNA, 1336 bp, Homo sapiens
  misc_feature (955)..(955): n is a, c, g, or t
gagagtttggacatgtcataggttgtgggtaagagaaaacctaagataatctattcttccttccccgttgtttataccttatgtttgcagtgcctttattatttcttctgttttccctgtcacaattctgatgttacaaaatctagcccaaatctctctcaaagccatcccagactctttcatgccactctgatttctccctcttactctatttttatctgtaactgtatgtaacacatagcttattgtctgagtatagacattcagcaaactttggttgattggaaagtcttcgtttaaacttctaatttctctaaggaacgagttgaagcagttaatatggctgaaggaatcattcacgacacagaaaccaagatggaagaattcaaggaccaattacctgctgatgagtgcaacaagctgaaagaagagatttccaaaatgagggagctcctggctagaaaagacagcgaaacaggagaaaatattagacaggcagcatcctctcttcagcaggcatcattgaagctgttcgaaatggcatacaaaaagatggcatctgagcgagaaggctctggaagttctggcactggggaacaaaaggaagatcaaaaggaggaaaaacagtaataatagcagaaattttgaagccagaaggacaacatatgaagcttaggagtgaagagacttcctgagcagaaatgggcgaacttcagtctttttactgtgtttttgcagtattctatatataatttccttaatttgtaaatttagtgaccattagctagtgatcatttaatggacagtgattctaacagtataaagttcacaatattctatgtccctagcctgtcatttttcagctgcatgtaaaaggaggtaggatgaattgatcattataaagatttaactattttatgctgaagtgaccatattttcaaggggtgaaaccatntctcgcacacagcaatgaaggtagtcatccatagacttgaaatgagaccacatatggggatgagatccttctagttagcctagtactgctgtactggcctgtatgtacatggggtccttcaactgaggccttgcaagtcaagctggctgtgccatgtttgtagatggggcagaggaatctagaacaatgggaaacttagctatttatattaggtacagctattaaaacaaggtaggaatgaggctagacctttaacttccctaaggcatacttttctagctaccttctgccctgtgtctggcacctacatccttgatgattgttctcttacccattctggaatttttttttttttaaataaatacagaaagcatcttgatc

SEQ ID NO: 416914 - DNA, 1435 bp, Homo sapiens
  misc_feature (1054)..(1054): n is a, c, g, or t
tcccctgtctactgggatattgaaactctaggaggtgtctttaccacaacttattaataggaataccatcgtattccaaccaagaagagccaggtattctctactgccgcctgatggtcaaacgcaagtggcaagattaaagtgtgtcagggtgaatacgagagatggctggatgacaacaaactccttggacagttcactttgattggaattccaccagcccctcgtggagttcctcagattgaagttacatttgacattgatgccaatgggatagtacatgtttctgctaaagataaaggcacaggacgtgagcagcagattgtaatccagtcttctggtggattaagcaaagatgatattgaaaatatggttaaaaatgcagagaaatatgctgaagaagaccggcgaaagaaggaacgagttgaagcagttaatatggctgaaggaatcattcacgacacagaaaccaagatggaagaattcaaggaccaattacctgctgatgagtgcaacaagctgaaagaagagatttccaaaatgagggagctcctggctagaaaagacagcgaaacaggagaaaatattagacaggcagcatcctctcttcagcaggcatcattgaagctgttcgaaatggcatacaaaaagatggcatctgagcgagaaggctctggaagttctggcactggggaacaaaaggaagatcaaaaggaggaaaaacagtaataatagcagaaattttgaagccagaaggacaacatatgaagcttaggagtgaagagacttcctgagcagaaatgggcgaacttcagtctttttactgtgtttttgcagtattctatatataatttccttaatttgtaaatttagtgaccattagctagtgatcatttaatggacagtgattctaacagtataaagttcacaatattctatgtccctagcctgtcatttttcagctgcatgtaaaaggaggtaggatgaattgatcattataaagatttaactattttatgctgaagtgaccatattttcaaggggtgaaaccatntctcgcacacagcaatgaaggtagtcatccatagacttgaaatgagaccacatatggggatgagatccttctagttagcctagtactgctgtactggcctgtatgtacatggggtccttcaactgaggccttgcaagtcaagctggctgtgccatgtttgtagatggggcagaggaatctagaacaatgggaaacttagctatttatattaggtacagctattaaaacaaggtaggaatgaggctagacctttaacttccctaaggcatacttttctagctaccttctgccctgtgtctggcacctacatccttgatgattgttctcttacccattctggaatttttttttttttaaataaatacagaaagcatcttgatc

SEQ ID NO: 416915 - DNA, 437 bp, Homo sapiens
tagctgaacaggtagcacagctggggaggatgtggaggctccgtgccccttctcacaggccctgcccagtgcagctcttcatctgtgtcctttgtaatatcctttatgataaatgggtaagcacaaggcagatggaattaacagactgtggctgctgtttttaaacagggtttgccaatatctgtgtgtctcttgggaggatgaggccgtctttctgcaacaagggagaacagaatcacaagatctttaggggggaccttgacatttcctgtggcagatttcagtattgctggtcagaactcatttcatccatcagagttgctgtaggctttctttctaagttccttaatcatctttagccttccttggatttaccaggccgtggatgctgaaaataacaatcctggtgtttcaggacaggagtggacttttttttt

SEQ ID NO: 416916 - DNA, 644 bp, Homo sapiens
tagaagttatgcaaacctatgcaaaccccatacaaatgagctggccaggccagtgtctagttgggcaaaaatatcggaaatattgtgcacaccagcctgtcattgctgtcacagaaggagagcaacaaggagaagggttatctctggtgcatttctggattaaatcataactttagaatacttttctcttttacaaagtctgactgtctctctaagtaagacatcttggataaatgtccctttccctctccgtgtttccgcattgcatgttaattttcaggtggcagttttatctcattagtcattgtcacttccactgatcacccctttgaagctacatgtaaactttacttttaaactttctaaaaatgcggctttccccccttgctttaggttccagaaaacgctttgttcctggcactgtccaaccttagggatcacataggagtcaggctcacaggcttctggggccagaggagcactttaataccaggtcagcagtcactcagttgtttctgaagttggaatggcagatttgtctcagtggttctccttttaaacccttttatgccggaggttgcaattttttgaattgcagacgtgtgaaaaatcagaccttggcaatgaccttgagcagtaggata

SEQ ID NO: 416917 - DNA, 320 bp, Homo sapiens
aacaggttgatggtaaaacaaccctgtaataattcaataaaaatgataaaaatttatctttatgagataagcaacaacatccatccctcttaccctttaggtactgctctatttttttcaaacttggccactatcttagggaagcataaatatattttttaaaactccaccaacatagagatttcttgttgagagactatgaacatattcctcgctcataaaaataactaacgattgtatgagaatcaagtttgaattactgaaatagaaataaagcatacctctatacttttcatgttgtaaaagtactttattaccag

SEQ ID NO: 416918 - DNA, 468 bp, Homo sapiens
aatatttttttttctccagaaataaaatctcactcagtcacccaggctggagtgcagtggcacagtcttagctctctgaagcctgaaactcctggcctcaagcaatcctcctgattcagcctcccgagtagctaggactagaggcatgcaccactatgctcagctaatttctttaatgtgtggaggtggggatcttgctatgttgctcaggctggtcttaaactcctggcctcaggtgattcccctgcattggcctcccaaaggactgggattatgggcacaagccatttgagtgaaatttagaatgcttccttccctttacatcactttattcttctccatttataattgtcttaaatatttatttgtatttgagaaccatatcagtttttttgttcttcaaccatcaaacataatttagaaaacccaaaaggaaaaggagaatattatattgactcattttgcatt

SEQ ID NO: 416919 - DNA, 609 bp, Homo sapiens
tcagatcatctccatgacccttcacccactctgtgaagtgggcagcttataggtgttgtcatctccctagagatgaggaaggtcagaataccaggaagtggccaagacaggactaggatcccggggttttaaagtcatcacagcgctgcttgggctgcagccttcgggcccctattgaatgttcttcattcttacctcacatgctccttcgcgcttcatgggagatgccccttcccatttttcttccaacaccagcctttgagcctcttggctcctgcctctcccctgtccccttaggatctttgtcttccagcacacttttgggaggtgctgctttacttaagaacctccgggctgttctgtacctggactataatgttcacattccctagactgtcctgcagctgccttgctctggataaattcactgcttctcacccccactcccaaaacctgcttacatgcacacacatgcacacacacacatacacaccttgccagttgccacctgaggggctgtgaatatgacctcctttttcttccctgccattctaaaaccattatcatcttcaaactccagatgaaaactagccttcttcaaaaaaaaaa

SEQ ID NO: 416920 - DNA, 786 bp, Homo sapiens
tattgtcggtctagcagtaattgttgtataactctatgttccccaaagttgggtgcatctacatttacgatagttaagtcttcttgttgaattgaaccctttatcgttacgcaatacctttctttgttttattttactattaatgatttaaagctattttttcttaaaagagaaacaattccaggtatggtagcttgtgccagcactttcagactgaagcagtcggattgcctgagaccaggagtttgagaccagccgaggcaacacagcaacatactgtttgtacaaatttttttaaagaaactatacaggaggggtaatgtgcacaactgtggtcatatttactcaggagacataggtggcatgactgcttgacttccgaaatttgaggttacagtgagctgtgattccaccagtgtactctgtcccaggagataaagtaagatcctctgcataaaatgaaaaaaaaaaaacacaacgataacaactttgttgggccggctcttgggccctgagaaaaaggctttgtaaacaccaattccgttgtgggccgcggggcccccaagatggtgttacgtggacaaccgtggcccatgagtggttccctagaggacaccctgggctatgacaatagtcgcggggaatctctcccgaaaattaaaaaacggccgggggggaaacccggagggttctctgaacaacacccaaaaggggcttcgtagaggacaaacagggggactcttacacaggggctccaggcaacccgatataaatatgccggcgtgg

SEQ ID NO: 416921 - DNA, 527 bp, Homo sapiens
acaggccccctatgtgctgagaaatgaagttctccacattagcagaggagagagggcaaccatcaccacccagatgcttgacatccgagatgatgacaacccacaggatgtggtcattgaaataatcgatcctccacttcatggccaattgcttcagacacttcagtccccggcaacccctatctatcaattccagctggatgaactctctagaggccttctccactatgctcatgatggttcagacagcacatccgatgttgcagtcttgcaggccaatgatggacactccttccataatatactgttccaagtgaagaccgtgcctcaggtaggtgtcattcctagagttacagtttctttgcacctagatgtgaacttctacggttgatattattttatgatactcacaaagttaagatatgggtagtcattcacttattcaaatataacctattatatagagggcactatatatctagttaggagcacccttgatctgaaagacctgtccccatgttctctac

SEQ ID NO: 416922 - DNA, 549 bp, Homo sapiens
cagtgtgtccagggttggaaacccagctggcagacagtagcagtgtaggagggtcccagacctgctcgtggctttcatggtatgactccaagccaggcatcttaactagcaggacaggcgtgttgctcatagtccacatcagccaacagatgtgtgaaccacgcccacaggctacgcagatggcaggtgtgatacgatcacatgtatattggttttcatccgcaattcctggctcataactcccatagcccttattacaatgttttgttatcatgttgggtgagttaggcctcaggagcaggccccaggaaacagagtctctctctttgaccttctcctgtcctcctgtcacctgcctaaggcaggactctaatctgattgtgggtcaagagaccgattccagaggggtcttataggaaggcatgccacacagagaggccaagaaaagtctgaggctgggcacagtggctcacgcctgtaatcccagcacttagggaggccaaggcgggcagatcacgaggtcagaagttcgagaccaccctggccaat

SEQ ID NO: 416923 - DNA, 390 bp, Homo sapiens
ttttttgagatggaatttcactcttcctgcccagtctgaagtgcaatggtgtgatctcagctcatggcaacctctgcctcctgggttcaagcgattctcctgcctcagcctcccaagtagctggaattacaggctgcataaggggagtgaacacaaagtacatttgaccacaaaatgactctttaaaagtcagaactacggtagcatgaagccaaacgaggtaatctacaataaaattttctatgcttcttttccttctttgctctctttctactctaataactgcgattcacacaggtaatgaagagtgtaattccttgatagaaacacagctccaagattaatcctttctttaactatgaagttcgcgtgtccaaaatctgtggtagt

SEQ ID NO: 416924 - DNA, 766 bp, Homo sapiens
  misc_feature (7)..(7): n is a, c, g, or t
  misc_feature (9)..(9): n is a, c, g, or t
  misc_feature (11)..(11): n is a, c, g, or t
ccaattngncnttggccgggggaagccgggccggcttggggcttggttctatgtccctgcgggtcggtgcaagggcgaagaggaacccgtgggcctcaggggatcccggggggccggaccagtgttccctagttgtgggagcagacgcgtgggcacattgcgggcggctatgtttccagtgtcctctgggtgtttccaagagcaacaagaaacgaataaatctctggttccacagaagtctccagtcttcaaatcttcagtgtatgaaagcacagattcctgaaagaatggcctcaaatgaccaggagtaggagctctctatatccctgctcctgaaaaacaagctaactggagtctccatcacctgccaccagctatacacactaccaactacccaactgaactccatgactgatttgccagctaatcatgcccctgacccagcccacatggacatgggaaggacatcagtgaactgtgaaaagaggcagagactcactcccgtttgtattatgaaaacacacgccaataggacataaaaagaagcaagagtactgggctttaccatgagttcaaatctcatttctggcaattcctatgtctaaaaaaagcttcgtaatctcttttgagccctcacattctctatcttagagaatcaccttgaccagaatgttcaacgccaagaaaaatactagaaaggttttttattctttccagattccttaaaaattctgaaatttttagacccctggattctgcataaaaa

SEQ ID NO: 416925 - DNA, 873 bp, Homo sapiens
  misc_feature (7)..(7): n is a, c, g, or t
  misc_feature (9)..(9): n is a, c, g, or t
  misc_feature (11)..(11): n is a, c, g, or t
ccaattngncnttggccgggggaagccgggccggcttggggcttggttctatgtccctgcgggtcggtgcaagggcgaagaggaacccgtgggcctcaggggatcccggggggccggaccagtgttccctagttgtgggagcagacgcgtgggcacattgcgggcgggcagggcctgaagtgcagctatgtttccagtgtcctctgggtgtttccaagagcaacaagaaacgaataaatctctggctgcataaggggagtgaacacaaagtacatttgaccacaaaatgactctttaaaagtcagaactacggtagcatgaagccaaacgagggttccacagaagtctccagtcttcaaatcttcagtgtatgaaagcacagattcctgaaagaatggcctcaaatgaccaggagtaggagctctctatatccctgctcctgaaaaacaagctaactggagtctccatcacctgccaccagctatacacactaccaactacccaactgaactccatgactgatttgccagctaatcatgcccctgacccagcccacatggacatgggaaggacatcagtgaactgtgaaaagaggcagagactcactcccgtttgtattatgaaaacacacgccaataggacataaaaagaagcaagagtactgggctttaccatgagttcaaatctcatttctggcaattcctatgtctaaaaaaagcttcgtaatctcttttgagccctcacattctctatcttagagaatcaccttgaccagaatgttcaacgccaagaaaaatactagaaaggttttttattctttccagattccttaaaaattctgaaatttttagacccctggattctgcataaaaa

SEQ ID NO: 416926 - DNA, 390 bp, Homo sapiens
cactgtcttgattactgtggctttgtagtaaggtttgaaagtgaaatgtgtgagtcctccaactttgttctttttcaagattgttttgactcttctggatctctcattttcatatgaagtttaggatgtttgtcattttctgcaaaataggcagctgcaattttgataggggtcgtattaaatctgtagatgagtttggggagtattgcctttacaataatattaaatcttaacaatccaagggcatgggaagacgttccatttttttaaagccctaatttcctttagtgttttgtttgtttgttttgagacaaactctcgctatatggcccaggctggagagcagtggcatgatcttggctcactgtaaagtccgcctccctggttcaa

SEQ ID NO: 416927 - DNA, 2202 bp, Homo sapiens
cagcaccacaccaggaccctccagaggctgtgagaaacatcctgcacccaggtcctctctatctgtttatcattgtctattttgtattctgcattcagaaccaagagcctgaagacgacccaggagctttagctatggctgtcttcattattttgtccctgtttagtgttctggtgacaggcatgggtgaaggtggggctgggagtgagaaaggaggtgagagggaatgtaagctgaaccagcttccccattgcccctccgtatctcccagtgcccagccttggacacaccctggccagagccagctgtttgcagacctgagccgagaggagctgacggctgtgatgcgctttctgacccagcagctggggccagggctggtggatgcagcccaggcccagccctcggacaactgtgtcttctcagtggagttgcagctgcctcccaaggctgcagccctggctcacttggacagggggagccccccacctgcccgggaggcactggccatcgtcttctttggcaggcaaccccagcccaacgtgagtgagctggtggtggggccactgcctcacccctcctacatgcgggacgtgactgtggagcgtcatggaggccccctgccctatcaccgacgccccatgttgttccaagagtacctggacatagaccagatgatcttcgacagagagctgccccaggcttctgggcttctccatcactgttgcttctacaagcgccggggacggaacctggtgacaatgaccacggctccccgtggtctgcaatcaggggaccgggccacctagtttggcctctactacaacatctcgggcgctgggttcttcctgcaccacgtgggcttggagctgctagtgaaccacaaggcccttgaccctgcccgctggactatccagaaggtgttctatcaaggccgctactatgacagcctggcccagctggaggcccagtttgaggccggcctggtgaatgtggtgctgatcccagacaatggcacaggtgggtcctggtccctgaagtcccctgtgcccccgggtccagctccccctctgcagttccatccccaaggcccccgcttcagtgtccagggaagtcgagtggcctcctcactgtggactttctcctttggcctcggagcattcagtggcccaaggatctttgacgttcccttccaaggggagagggtggcctatgaagtcagtgtccaggcggccttggccatctatggaggcaattctccttctgctctacgaagccggtacatagatagtggctttggcttgggccacttctccacgcccctgacccatggggtggactgcccctacctggccacctacgtggactggcacttcctttttgagtcccaggccgccaagacaatacgcgatgccttttgtatatttgaacagaaccagggcctccccctgcggcgacaccactcagatctctactcccactactttgggggccttgcggaaacggtgctggtcatcagatctgtgtctactatgctcaactatgactatgtgtgggatatggtcttccaccctaatggggccatagaaatcagactccacaccaccggctacatcagctcagcattcccctttggtgctgcccagaggtatggaaacaaagtttcagagcacaccctgggcacggtccacacccacagcgcccacttcaaggtggacctggatgtagcaggtaaggcatcctggcagaggcaaaagtgctggaggggtgagctgaagtctccatgcctagctttaaaagttttcgttgggctgggagcagtagcttatgcctgtaagcccaacactttgggagactgaggggggtggatcacttgaggtcaggagttcaaaaccagcctggccaacatggcgaaatcctgtctgtactaaaaatacaaaaattagctgggcatgggtatgctgtaatcctagctactcgggaggctgaggcaggagaatcacttgaatctgggagtcagaggttgcagtgagctgagattgagccactgcactccatcctgcgtgactgaacaagactttgtctcaaaaaaaaaaagtattccatgctttaaaaattacctctgtgattatagaatttattatattgtatactatgtataaatatgatatattgatataagtatttagatttctatattca

SEQ ID NO: 416928 - DNA, 2125 bp, Homo sapiens
cagcaccacaccaggaccctccagaggctgtgagaaacatcctgcacccaggtcctctctatctgtttatcattgtctattttgtattctgcattcagaaccaagagcctgaagacgacccaggagctttagctatggctgtcttcattattttgtccctgtttagtgttctggtgacaggcatgggtgaaggtggggctgggagtgagaaaggaggtgagagggaatgtaagctgaaccagcttccccattgcccctccgtatctcccagtgcccagccttggacacaccctggccagagccagctgtttgcagacctgagccgagaggagctgacggctgtgatgcgctttctgacccagcagctggggccagggctggtggatgcagcccaggcccagccctcggacaactgtgtcttctcagtggagttgcagctgcctcccaaggctgcagccctggctcacttggacagggggagccccccacctgcccgggaggcactggccatcgtcttctttggcaggcaaccccagcccaacgtgagtgagctggtggtggggccactgcctcacccctcctacatgcgggacgtgactgtggagcgtcatggaggccccctgccctatcaccgacgccccatgttgttccaagagtacctggacatagaccagatgatcttcgacagagagctgccccaggcttctgggcttctccatcactgttgcttctacaagcgccggggacggaacctggtgacaatgaccacggctccccgtggtctgcaatcaggggaccgggccacctagtttggcctctactacaacatctcgggcgctgggttcttcctgcaccacgtgggcttggagctgctagtgaaccacaaggcccttgaccctgcccgctggactatccagaaggtgttctatcaaggccgctactatgacagcctggcccagctggaggcccagtttgaggccggcctggtgaatgtggtgctgatcccagacaatggcacaggtgggtcctggtccctgaagtcccctgtgcccccgggtccagctccccctctgcagttccatccccaaggcccccgcttcagtgtccagggaagtcgagtggcctcctcactgtggactttctcctttggcctcggagcattcagtggcccaaggatctttgacgttcccttccaaggggagagggtggcctatgaagtcagtgtccaggcggccttggccatctatggaggcaattctccttctgctctacgaagccggtacatagatagtggctttggcttgggccacttctccacgcccctgacccatggggtggactgcccctacctggccacctacgtggactggcacttcctttttgagtcccaggccgccaagacaatacgcgatgccttttgtatatttgaacagaaccagggcctccccctgcggcgacaccactcagatctctactcccactactttgggggccttgcggaaacggtgctggtcatcagatctgtgtctactatgctcaactatgactatgtgtgggatatggtcttccaccctaatggggccatagaaatcagactccacaccaccggctacatcagctcagcattcccctttggtgctgcccagaggtatggaaacaaagtttcagagcacaccctgggcacggtccacacccacagcgcccacttcaaggtggacctggatgtagcaggacttggtggcctgggtgacagctggttttctgcatatcccacatgcagaggacattcctaacacagtgactgtggggaacagcgtgggcttcttcctccgaccctacaacttctttgacgaagacccctccttctactctgccgactccatctacttccgaggggaccaggatgctggggcctgcgaggtcaaccccctagcttgcctgccccaggctgctgcctgtgcccccgacctccctgccttctcccacgggggcttctctcacaactaggcggtcctgggatggggcatgtggccaagggctccagggccagggtgtgagggatggggagcagctgggcactgggccggcagcctggttccctcttccctgtgccaggactctcttc

SEQ ID NO: 416929 - DNA, 1789 bp, Homo sapiens
cagcaccacaccaggaccctccagaggctgtgagaaacatcctgcacccaggtcctctctatctgtttatcattgtctattttgtattctgcattcagaaccaagagcctgaagacgacccaggagctttagctatggctgtcttcattattttgtccctgtttagtgttctggtgacaggcatgggtgaaggtggggctgggagtgagaaaggaggtgagagggaatgtaagctgaaccagcttccccattgcccctccgtatctcccagtgcccagccttggacacaccctggccagagccagctgtttgcagacctgagccgagaggagctgacggctgtgatgcgctttctgacccagcagctggggccagggctggtggatgcagcccaggcccagccctcggacaactgtgtcttctcagtggagttgcagctgcctcccaaggctgcagccctggctcacttggacagggggagccccccacctgcccgggaggcactggccatcgtcttctttggcaggcaaccccagcccaacgtgagtgagctggtggtggggccactgcctcacccctcctacatgcgggacgtgactgtggagcgtcatggaggccccctgccctatcaccgacgccccatgttgttccaagagtacctggacatagaccagatgatcttcgacagagagctgccccaggcttctgggcttctccatcactgttgcttctacaagcgccggggacggaacctggtgacaatgaccacggctccccgtggtctgcaatcaggggaccgggccacctagtttggcctctactacaacatctcgggcgctgggttcttcctgcaccacgtgggcttggagctgctagtgaaccacaaggcccttgaccctgcccgctggactatccagaaggtgttctatcaaggccgctactatgacagcctggcccagctggaggcccagtttgaggccggcctggtgaatgtggtgctgatcccagacaatggcacagaaccagggcctccccctgcggcgacaccactcagatctctactcccactactttgggggccttgcggaaacggtgctggtcatcagatctgtgtctactatgctcaactatgactatgtgtgggatatggtcttccaccctaatggggccatagaaatcagactccacaccaccggctacatcagctcagcattcccctttggtgctgcccagaggtatggaaacaaagtttcagagcacaccctgggcacggtccacacccacagcgcccacttcaaggtggacctggatgtagcaggtaaggcatcctggcagaggcaaaagtgctggaggggtgagctgaagtctccatgcctagctttaaaagttttcgttgggctgggagcagtagcttatgcctgtaagcccaacactttgggagactgaggggggtggatcacttgaggtcaggagttcaaaaccagcctggccaacatggcgaaatcctgtctgtactaaaaatacaaaaattagctgggcatgggtatgctgtaatcctagctactcgggaggctgaggcaggagaatcacttgaatctgggagtcagaggttgcagtgagctgagattgagccactgcactccatcctgcgtgactgaacaagactttgtctcaaaaaaaaaaagtattccatgctttaaaaattacctctgtgattatagaatttattatattgtatactatgtataaatatgatatattgatataagtatttagatttctatattca

SEQ ID NO: 416930 - DNA, 417 bp, Homo sapiens
agagcactggtcaatataccgtgaccacaccatgaacttttatattatagctacactatatacatcactcctaatcttccttcatttaagaatgtacttcatctttcagcccttgacaattgagatgattgtttgtcatcaaagcccaattcagatgctgccttttctgtcatgcttgtccatttctctttgagttaatttattttactatttgcatttctgcaacactttatatttcaattgaagcaattaatttgctttttgccctatctctaagtctgttggaaatgattttgtttacccccacaagttgcaagccccttgggaatatggctcaggtcctattcctttgagtttttcttagtttagtggacgaaatgcattttgttggattgaactggattgaaaatttttcag

SEQ ID NO: 416931 - DNA, 479 bp, Homo sapiens
ttggagttctctctgcctaagtggtccccacccctaaaaaataactaactgctcagtagcctcataaataaaactaatttttctcgtccttctgtcttaacacacacgctcatgcatttccaagttatttctggtgacctaaaagacgcacgcatgccaaacgcctgcagattctgccagagtcaaccttcttctcctgtcttagtggccagagaacagtccctggaattcaaaggataaacaaggcctgcgtccagacagagttgtttctctgaaacattgctggcttcttctgagtttgattcagctgttctctgatgaaattcagggaaaacttgccttcagagatatctctcaaattttactaatcttcagctttagttggtcaacattcattccacaaatatcaattgaactcctactgtgggcctggtggtggtctgagtgctgaagatacagtgatttaaaaatattaaaaa

SEQ ID NO: 416932 - DNA, 378 bp, Homo sapiens
caatagaaaggttgctgtgataaacctgagagacaccagaaggaattttaacatattgaccatactaaacaatatttaacatattgattgtattcagctatcttttacaatgtggtgtacagactctaaaatagctcctaattgtccctgtcctattttttttttaatactcatgtccgtgtataatccccccttgtctgtggatggaaactgtgacttaacggtaacaaatagaatttggcaaatgtgatatgttaagattataatgtctgctatgctaggagattctctcccttgctggtttcaatgaagtaagtggtcatgttggggaggcccatttggcaaagaactaagggtgacttcaggccaatgactaac

SEQ ID NO: 416933 - DNA, 436 bp, Homo sapiens
tggcttactgctgtccttgtgatagtgagttctctcaagatttggttgtttaacaatgtgtgacatcttgcccctcactctctcgcttgctcccacccttgccatgtaatgttcctgttcccactttgccttctgccatgagtaaagctccttgaggccttcccaggagcctagcagatgccagtgccatgctttctatatagccttcagaaccatgagcaaattaaactgcttttctttataaattacctagtctcaagtattgctttatagcattgttcttgaagttaggctgcaagaacagcctaacacataaaattggtcgtgagagtgggacattggtataaagatacctgaaaatgtggaagcaactttggaacttggtaacagaggcttaacaagttcagaggactcagaagaaggcaggaagatgagg

SEQ ID NO: 416934 - DNA, 1429 bp, Homo sapiens
agcattaggtatatctcctaatgctatccttcccctctccccccaaaacaccccccaaaacatgttcttactgtataagaaattatgaatgacatttattttatgttaaaacagtatattttatctacaaaaggagtaaaagacagtaatacaaaaaattggcacataaaggaacaaaaatgctaaaaaattaaaatttaccaataatcctatcacctaaattgataatttttaatataattaaatgtaggattttaaaataattaaatgtaggattttaaaataaatttcttttaatttatttatttaaacatatagattatttttagaccctcttcaggcatcccctgttgaataagttccatgatttacaggcctactctctctattattaaatattttattgctttcaatgaacaacattttttgtaaacattttcacagaaacaaatatgggcacattgagacatgttttcttttcaaaaagtcctagcactttaattactgtgtaaagagatattagtgtacaattttcacacatattgactaacgtccctgcaaaatgttgaatcaatttatacttgcagcaccaatcggcaaattaatgtccattatgctttcgcttcaccaaaactgatacttatattttattttgctagacaaaaatacatattatcttaatttgcataactgtaattaatagaaagattaaattttttttcagatgtatcataggacatcattttttcttgagtctggtgggtgcttagttcctttaaagcattaatcttgtatacattaattttatgtgcaaaacaatcattaagtacaatttgaaatatggacaaataaatagctggattaagaaaaaaacaaatagagcttctggaattaaaacattcactaatggaatttcaaaacacagttggaatctttaacaataaactagaccaagcagaagaaataattttagactttgaaactggtctttcaaagtaacccagtcagacaaaaataaaagaaaaaagaactgaaaaacaaagcccttaagaaatatgggattatgtaaagtgaccaaacttataacttattggcattcctacaacagaagaataaaaagtaaccaactaagaaagtatatttaagggaataatttaggaaaagttctctagtcttgctagaaaggttgacattcagatataagaaattcagagaacacctgtgggatagtaaacaagatgcccattcctaaggcatccacagtcattagaatagctgtggtcaatgcaaaagaaaatatattaaaggcagctcaaacaaagggccaaattacctataaagtaaattagattaacaacagacttagcagcagataccctgcaacctagaaaagattggggcctagcgttagccttctcaaaaaaaaaaa

SEQ ID NO: 416935 - DNA, 2400 bp, Homo sapiens
ggcctcggggaagcggtcccggaacagcgacgccaggagcccttcatcctccacctcgccgagagccgctgctgtggccgtggctaccgatgggatagtcgccgcggtcgccatcttcccagcaacaacgtcacttcccttccggaccacaaggggcgctgactccgaacttaggacaggaagaaacaggcacatttccggtctctatgctttctcatccggccggcttgctttcccctgcggtcgtccagactattgggcgctagcgagacgaactattggtacggggctagagaggaaggctttgggattgccggggagcagcgagcgaccgacttccgtttccagttaccaaggcacgaggatccggtgttccaacccagggggaaaaatgcggcctttgactgaagaggagacccgtgtcatgtttgagaagatagcgaaatacattggggagaatcttcaactgctggtggaccggcccgatggcacctactgtttccgtctgcacaacgaccgggtgtactatgtgagtgagaagattatgaagctggccgccaatatttccggggacaagctggtgtcgctggggacctgctttggaaaattcactaaaacccacaagtttcggttgcacgtcacagctctggattaccttgcaccttatgccaagtataaagtttggataaagcctggtgcagagcagtccttcctgtatgggaaccatgtgttgaaatctggtctgggtcgaatcactgaaaatacttctcagtaccagggcgtggtggtgtactccatggcagacatccctttgggttttggggtggcagccaaatctacacaagactgcagaaaagtagaccccatggcgattgtggtatttcatcaagcagacattggggaatatgtgcggcatgaagagacgttgacttaaaacgaagccattccaaggacagacggctgtatggaaaggccgagctttgtttcctgtgtttgtgtggactccaccatcatgttgaattttgtcaacactctggcctcttcagggacttcttatttactgtactctctatcactgacaaatgcaggctggattcttattatatacagagatggctcaaaaatggggtttcagatctttgtgacgaaatagaatactgtttcatatttgaatcagagggcttcttgttctgagaaataggttcaaaatcattggaaccaggaacaagaatagcttattgttatctgtgataacactgttttctaaacacaaggattttcttttttattaatatgcaacatagacattgccataacagaataataaaccacatgtggggttttaaaaatgaaatttggctaataggagcaattcagctatttttctatacagtaattggtgtgtggtatagaagaaaaacgggttcaaaccccacttctgccacctaccagctatatggccttgaatgagtcattcagctttaataaggttcattttcttctgtttaaaaagacacaaaacttgaaaatcagctttggccatctacctgagaattagaaagtctgatttttggaattagaaatcatgattgtaggctgggcacagtggctcgcgcctgtaatcccagcactttgggaggccaaggcggacggatcacttgaggttaggagtttgagaccagcctggccaacatggtgaaaccccatctctactaaaaaaaaaaaaaaaattaggtgtggtgacacatggctgtggtcctagttacttgggaggctgaggcaggagaatggcttgaactggggaagcagagcttgcagtgagccaagatggtgccattgcactccagcctgggcgtgacagagtgagactccatctgattgtaaagcatctagtacagtgtacagtgccttggaaatgataggtatggaataaatggtaattatttttatattatatatattatgtattcctgttattaagtgtagagttttatgagtataatttgattttattaccttcttttttacaagctgttttctcagtatttttcttggatgggatgacgctaggctggaaagtttttttcatcactatgattttataaaacaattttttctatgaacctttacttacttgactggattggactaaaagcactgatcagaggccacgacataaaaattcagtccctttgtccttccccgtgcctcccaaagttactttaagatccttagaatatttctttaaatattttatagacaaaaaatttaaagactatctgtattgcaaaattaaactatttctttaatgaatatattgcttattttaagttccaaaggtgaagtctttaagaataaaacattaccaactcctgcttttatatgtaaaaaaagtcgacg

SEQ ID NO: 416936 - DNA, 2006 bp, Homo sapiens
ggcctcggggaagcggtcccggaacagcgacgccaggagcccttcatcctccacctcgccgagagccgctgctgtggccgtggctaccgatgggatagtcgccgcggtcgccatcttcccagcaacaacgtcacttcccttccggaccacaaggggcgctgactccgaacttaggacaggaagaaacaggcacatttccggtctctatgctttctcatccggccggcttgctttcccctgcggtcgtccagactattgggcgctagcgagacgaactattggtacggggctagagaggaaggctttgggattgccggggagcagcgagcgaccgacttccgtttccagttaccaaggcacgaggatccggtgttccaacccagggggaaaaatgcggcctttgactgaagaggagacccgtgtcatgtttgagaagatagcgaaatacattggggagaatcttcaactgctggtggaccggcccgatggcacctactgtttccgtctgcacaacgaccgggtgtactatgtgagtgagaagattatgaagctggccgccaatatttccggggacaagctggtgtcgctggggacctgctttggaaaattcactaaaacccacaagtttcggttgcacgtcacagctctggattaccttgcaccttatgccaagtataaagtttggataaagcctggtgcagagcagtccttcctgtatgggaaccatgtgttgaaatctggtctgggtcgaatcactgaaaatacttctcagtaccagggcgtggtggtgtactccatggcagacatccctttgggttttggggtggcagccaaatctacacaagactgcagaaaagtagaccccatggcgattgtggtatttcatcaagcagacattggggaatatgtgcggcatgaagagacgttgacttaaaacgaagccattccaaggacagacggctgtatggaaaggccgagctttgtttcctgtgtttgtgtggactccaccatcatgttgaattttgtcaacactctggcctcttcagggacttcttatttactgtactctctatcactgacaaatgcaggctggattcttattatatacagagatggctcaaaaatggggtttcagatctttgtgacgaaatagaatactgtttcatatttgaatcagagggcttcttgttctgagaaataggttcaaaatcattggaaccaggaacaagaatagcttattgttatctgtgataacactgttttctaaacacaaggattttcttttttattaatatgcaacatagacattgccataacagaataataaaccacatgtggggttttaaaaatgaaatttggctaataggagcaattcagctatttttctatacagtaattggtgtgtggtatagaagaaaaacgggttcaaaccccacttctgccacctaccagctatatggccttgaatgagtcattcagctttaataaggttcattttcttctgtttaaaaagacacaaaacttgaaaatcagctttggccatctacctgagaattagaaagtctgatttttggaattagaaatcatgattgtaggctgggcacagtggctcgcgcctgtaatcccagcactttgggaggccaaggcggacggatcacttgaggttaggagtttgagaccagcctggccaacatggtgaaaccccatctctactaaaaaaaaaaaaaaaaaaaaaaaaaaaatttttggggggcctgggccctggaaaaagttttctaaaccattctgttggggcgggcggcgggcgcccacggtgggtacgtgtagaactggtcgtccatacgctggttcccaagggagaatccgggcgccaaggaataggtcgtggggtttcctccccatataaaaaacggcccgggggcacccggagtgtctctgaaaaatccaaaggggaggtcggaaggcatagggggtcgataacgggagtcaagggagcgaattaatac

SEQ ID NO: 416937 - DNA, 2259 bp, Homo sapiens
ggcctcggggaagcggtcccggaacagcgacgccaggagcccttcatcctccacctcgccgagagccgctgctgtggccgtggctaccgatgggatagtcgccgcggtcgccatcttcccagcaacaacgtcacttcccttccggaccacaaggggcgctgactccgaacttaggacaggaagaaacaggcacatttccggtctctatgctttctcatccggccggcttgctttcccctgcggtcgtccagactattgggcgctagcgagacgaactattggtacggggctagagaggaaggctttgggattgccggggagcagcgagcgaccgacttccgtttccagttaccaaggcacgaggatccggtgttccaacccagggggaaaaatgcggcctttgactgaagaggagacccgtgtcatgtttgagaagatagcgaaatacattggggagaatcttcaactgctggtggaccggcccgatggcacctactgtttccgtctgcacaacgaccgggtgtactatgtgagtgagaagattatgaagctggccgccaatatttccggggacaagctggtgtcgctggggacctgctttggaaaattcactaaaacccacaagtttcggttgcacgtcacagctctggattaccttgcaccttatgccaagggttttggggtggcagccaaatctacacaagactgcagaaaagtagaccccatggcgattgtggtatttcatcaagcagacattggggaatatgtgcggcatgaagagacgttgacttaaaacgaagccattccaaggacagacggctgtatggaaaggccgagctttgtttcctgtgtttgtgtggactccaccatcatgttgaattttgtcaacactctggcctcttcagggacttcttatttactgtactctctatcactgacaaatgcaggctggattcttattatatacagagatggctcaaaaatggggtttcagatctttgtgacgaaatagaatactgtttcatatttgaatcagagggcttcttgttctgagaaataggttcaaaatcattggaaccaggaacaagaatagcttattgttatctgtgataacactgttttctaaacacaaggattttcttttttattaatatgcaacatagacattgccataacagaataataaaccacatgtggggttttaaaaatgaaatttggctaataggagcaattcagctatttttctatacagtaattggtgtgtggtatagaagaaaaacgggttcaaaccccacttctgccacctaccagctatatggccttgaatgagtcattcagctttaataaggttcattttcttctgtttaaaaagacacaaaacttgaaaatcagctttggccatctacctgagaattagaaagtctgatttttggaattagaaatcatgattgtaggctgggcacagtggctcgcgcctgtaatcccagcactttgggaggccaaggcggacggatcacttgaggttaggagtttgagaccagcctggccaacatggtgaaaccccatctctactaaaaaaaaaaaaaaaattaggtgtggtgacacatggctgtggtcctagttacttgggaggctgaggcaggagaatggcttgaactggggaagcagagcttgcagtgagccaagatggtgccattgcactccagcctgggcgtgacagagtgagactccatctgattgtaaagcatctagtacagtgtacagtgccttggaaatgataggtatggaataaatggtaattatttttatattatatatattatgtattcctgttattaagtgtagagttttatgagtataatttgattttattaccttcttttttacaagctgttttctcagtatttttcttggatgggatgacgctaggctggaaagtttttttcatcactatgattttataaaacaattttttctatgaacctttacttacttgactggattggactaaaagcactgatcagaggccacgacataaaaattcagtccctttgtccttccccgtgcctcccaaagttactttaagatccttagaatatttctttaaatattttatagacaaaaaatttaaagactatctgtattgcaaaattaaactatttctttaatgaatatattgcttattttaagttccaaaggtgaagtctttaagaataaaacattaccaactcctgcttttatatgtaaaaaaagtcgacg

SEQ ID NO: 416938 - DNA, 1030 bp, Homo sapiens
ggcctcggggaagcggtcccggaacagcgacgccaggagcccttcatcctccacctcgccgagagccgctgctgtggccgtggctaccgatgggatagtcgccgcggtcgccatcttcccagcaacaacgtcacttcccttccggaccacaaggggcgctgactccgaacttaggacaggaagaaacaggcacatttccggtctctatgctttctcatccggccggcttgctttcccctgcggtcgtccagactattgggcgctagcgagacgaactattggtacggggctagagaggaaggctttgggattgccggggagcagcgagcgaccgacttccgtttccagttaccaaggcacgaggatccggtgttccaacccagggggaaaaatgcggcctttgactgaagaggagacccgtgtcatgtttgagaagatagcgaaatacattggggagaatcttcaactgctggtggaccggcccgatggcacctactgtttccgtctgcacaacgaccgggtgtactatgtgaggtgaggcggggccgggcaggcagcatggacccaggggagaggggtcctgggtcccacgagcctccttcatccgcaaccttgctccccctttacccttttagtgagaagattatgaagctggccgccaatatttccggggacaagctggtgtcgctggggacctgctttggaaaattcactaaaacccacaagtttcggttgcacgtcacagctctggattaccttgcaccttatgccaagtataaagtttggataaagcctggtgcagagcagtccttcctgtatgggaaccatgtgttgaaatctggtctgggtcgaatcactgaaaatacttctcagtaccagggcgtggtggtgtactccatggcagacatccctttggtgagtagagatggtagctgttacagaactcaagtactcttattcaagaagggtatgtcttcaatctgagtgcttgagagaataaattctcagcacgttttgaatcccagaaaga

SEQ ID NO: 416939 - DNA, 1316 bp, Homo sapiens
ggcctcggggaagcggtcccggaacagcgacgccaggagcccttcatcctccacctcgccgagagccgctgctgtggccgtggctaccgatgggatagtcgccgcggtcgccatcttcccagcaacaacgtcacttcccttccggaccacaaggggcgctgactccgaacttaggacaggaagaaacaggcacatttccggtctctatgctttctcatccggccggcttgctttcccctgcggtcgtccagactattgggcgctagcgagacgaactattggtacggggctagagaggaaggctttgggattgccggggagcagcgagcgaccgacttccgtttccagttaccaaggcacgaggatccggtgttccaacccagggggaaaaatgcggcctttgactgaagaggagacccgtgtcatgtttgagaagatagcgaaatacattggggagaatcttcaactgctggtggaccggcccgatggcacctactgtttccgtctgcacaacgaccgggtgtactatgtgagtgagaagattatgaagctggccgccaatatttccggggacaagctggtgtcgctggggacctgctttggaaaattcactaaaacccacaagtttcggttgcacgtcacagctctggattaccttgcaccttatgccaaggtttgtggggcggtttccaattctgccacgggcgatgaagtcaaggattaggcagattgtccggcagcttctctcccacagagtccctgacagtgtgcttggaggagtttcagcacatggagatgtgtagaggtcttgcagcttgagcatggtcagggctatgggataggaatgctatgtggctgcgtagggttagttttctccagcgaagtagaagagcctagggagacccagctagagatcagaaagcaaataagtggcagcaatgaagacaccggggtccagaaaaagagctgttaacctggccatggaggatgatccttgtagagttgagaaaataactttttctatttttttctttttctttcttgctctgttttttcttttcatttctctttctctttcttcctgacacagtttcactctgtcgcccaggctagagtgcagtggtgcgatctcactgcagcctccactttccagtttccagtgattcttgtgcctcagtagctgggattacaggcatgtgccaccacacctggctgatttttttgtgtgtttttagtagagacagtgtttcactgtgttggccaggctggtctcgaactcctggcctcaagtgatccacctgccttggcctcccaaa

SEQ ID NO: 416940 - DNA, 1451 bp, Homo sapiens
ggcctcggggaagcggtcccggaacagcgacgccaggagcccttcatcctccacctcgccgagagccgctgctgtggccgtggctaccgatgggatagtcgccgcggtcgccatcttcccagcaacaacgtcacttcccttccggaccacaaggggcgctgactccgaacttaggacaggaagaaacaggcacatttccggtctctatgctttctcatccggccggcttgctttcccctgcggtcgtccagactattgggcgctagcgagacgaactattggtacggggctagagaggaaggctttgggattgccggggagcagcgagcgaccgacttccgtttccagttaccaaggcacgaggatccggtgttccaacccagggggaaaaatgcggcctttgactgaagaggagacccgtgtcatgtttgagaagatagcgaaatacattggggagaatcttcaactgctggtggaccggcccgatggcacctactgtttccgtctgcacaacgaccgggtgtactatgtgagtgagaagattatgaagctggccgccaatatttccggggacaagctggtgtcgctggggacctgctttggaaaattcactaaaacccacaagtttcggttgcacgtcacagctctggattaccttgcaccttatgccaagtataaagtttggataaagcctggtgcagagcagtccttcctgtatgggaaccatgtgttgaaatctggtctgggtcgaatcactgaaaatacttctcagtaccagggcgtggtggtgtactccatggcagacatccctttgggttttggggtggcagccaaatctacacaagactgcagaaaagtagaccccatggcgattgtggtatttcatcaagcagacattggggaatatgtgcggcatgaagagacgttgacttaaaacgaagccattccaaggacagacggctgtatggaaaggccgagctttgtttcctgtgtttgtgtggactccaccatcatgttgaattttgtcaacactctggcctcttcagggacttcttatttactgtactctctatcactgacaaatgcaggctggattcttattatatacagagatggctcaaaaatggggtttcagatctttgtgacgaaatagaatactgtttcatatttgaatcagagggcttcttgttctgagaaataggttcaaaatcattggaaccaggaacaagaatagcttattgttatctgtgataacactgttttctaaacacaatggcacgtggatcgatccacgtcccattgtgtataaattcagaataccctttttacacaaagaactacaaaaagttacaaagacagccttcagaaccacacttagaaaagtgaccgacagccttcaccaaacctccttcaaagaatctcacaaagcacgtggagagatcctctagatg

SEQ ID NO: 416941 - DNA, 2422 bp, Homo sapiens
ggcctcggggaagcggtcccggaacagcgacgccaggagcccttcatcctccacctcgccgagagccgctgctgtggccgtggctaccgatgggatagtcgccgcggtcgccatcttcccagcaacaacgtcacttcccttccggaccacaaggggcgctgactccgaacttaggacaggaagaaacaggcacatttccggtctctatgctttctcatccggccggcttgctttcccctgcggtcgtccagactattgggcgctagcgagacgaactattggtacggggctagagaggaaggctttgggattgccggggagcagcgagcgaccgacttccgtttccagttaccaaggcacgaggatccggtgttccaacccagggggaaaaatgcggcctttgactgaagaggagacccgtgtcatgtttgagaagatagcgaaatacattggggagaatcttcaactgctggtggaccggcccgatggcacctactgtttccgtctgcacaacgaccgggtgtactatgtgagtgagaagattatgaagctggccgccaatatttccggggacaagctggtgtcgctggggacctgctttggaaaattcactaaaacccacaagtttcggttgcacgtcacagctctggattaccttgcaccttatgccaagtataaagtttggataaagcctggtgcagagcagtccttcctgtatgggaaccatgtgttgaaatctggtctgggtcgaatcactgaaaatacttctcagtaccagggcgtggtggtgtactccatggcagacatccctttgtgtctcttcttttgaatcccagggttttggggtggcagccaaatctacacaagactgcagaaaagtagaccccatggcgattgtggtatttcatcaagcagacattggggaatatgtgcggcatgaagagacgttgacttaaaacgaagccattccaaggacagacggctgtatggaaaggccgagctttgtttcctgtgtttgtgtggactccaccatcatgttgaattttgtcaacactctggcctcttcagggacttcttatttactgtactctctatcactgacaaatgcaggctggattcttattatatacagagatggctcaaaaatggggtttcagatctttgtgacgaaatagaatactgtttcatatttgaatcagagggcttcttgttctgagaaataggttcaaaatcattggaaccaggaacaagaatagcttattgttatctgtgataacactgttttctaaacacaaggattttcttttttattaatatgcaacatagacattgccataacagaataataaaccacatgtggggttttaaaaatgaaatttggctaataggagcaattcagctatttttctatacagtaattggtgtgtggtatagaagaaaaacgggttcaaaccccacttctgccacctaccagctatatggccttgaatgagtcattcagctttaataaggttcattttcttctgtttaaaaagacacaaaacttgaaaatcagctttggccatctacctgagaattagaaagtctgatttttggaattagaaatcatgattgtaggctgggcacagtggctcgcgcctgtaatcccagcactttgggaggccaaggcggacggatcacttgaggttaggagtttgagaccagcctggccaacatggtgaaaccccatctctactaaaaaaaaaaaaaaaattaggtgtggtgacacatggctgtggtcctagttacttgggaggctgaggcaggagaatggcttgaactggggaagcagagcttgcagtgagccaagatggtgccattgcactccagcctgggcgtgacagagtgagactccatctgattgtaaagcatctagtacagtgtacagtgccttggaaatgataggtatggaataaatggtaattatttttatattatatatattatgtattcctgttattaagtgtagagttttatgagtataatttgattttattaccttcttttttacaagctgttttctcagtatttttcttggatgggatgacgctaggctggaaagtttttttcatcactatgattttataaaacaattttttctatgaacctttacttacttgactggattggactaaaagcactgatcagaggccacgacataaaaattcagtccctttgtccttccccgtgcctcccaaagttactttaagatccttagaatatttctttaaatattttatagacaaaaaatttaaagactatctgtattgcaaaattaaactatttctttaatgaatatattgcttattttaagttccaaaggtgaagtctttaagaataaaacattaccaactcctgcttttatatgtaaaaaaagtcgacg

SEQ ID NO: 416942 - DNA, 141 bp, Homo sapiens
gtttacagctcatttcatattctgcaaaatgttttcccgtctgctatcaccgccgccatcctcacagcagcctgggagaaaggcagagccaaaagtctcatctccacttcgtgcatgggtgatctgaggcccagttaagaa

SEQ ID NO: 416943 - DNA, 178 bp, Homo sapiens
ttttttttactgaagtgggattgttatttaaatgttctttgggtaatcctgttccctggacaaccctgacttggacagtgtcccctagggcagaccctccaattcaggttggatctcttgccaggcagatgtgtgagttctctgtggcagtagctcaggcaggctgagggaggggtgg

SEQ ID NO: 416944 - DNA, 778 bp, Homo sapiens
attataaacagcttaactcatttaatgcatcctgctcacatagaggttggttttatatctcaaatccttcctgccagacaaagattaaggtttcagagggcttaatactggactattggtttaatactgaatggttggttgcagtttgtccatagaagacctaaataagcagaactgactaatatttaaagaatgaaatttgtaggcaggtttcaatctgagtttagtataattatgtgtaagaggatggccactcaaagtatttagcacatcctctaaatataaatagatctgtatcttaaatagcccggctcccacctctttaagcccatcatcgtttagcaagcttaaaaatggccactaatgtatggcccttatagttgttttagactttacatagctcagatgataattgctaagtattgtcatggctgattttttttcttaaaagagaggaatttggattataacattttaagcacagaagctctgggttgtgccattcaagaaaaggtttcatgggtatgtatatcattaaaaaaagtactgtttctatagtaaaaaccaaagaggcacaatgaagttgtaagatttgacttcactcactttaaaattattcttaatctgcaggacatgctcatataatgccccatatatatcttagcagattgtaattgaagagtaagatcttcagttcatattgaaagtggccatttctggtatttataatttgagttatcagtactgttacatttaagggaagattcacctcatgatt

SEQ ID NO: 416945 - DNA, 805 bp, Homo sapiens
ccactgtgctccagcctgggcaacagagcaagaccctgtctgaaaaataaaaaagaaagaaaagaaaaaaaaaaaaacaggcaatctctgccatcagggagttatattccaatgagatcttgatggaaaatttggccctacctttaaggcaactttaccttcccagctaatactctaaatatagagtaagagttccttctaggctagaagaatacttttgcaaatatacttcctatttacctaatattttaatcctaaaattgccaaaaatattaaaatcagggagagctgttttcctgttttcctttttgttcttccagagtggttccttttgtaaccatatatggagattagatgtattagcctcttttatttgagaatgtaactttgtgatcgaaactagaacattcagaaatgtctgattttagcatactatgaatgcagcagcggtcacagattagattcccatgggcctccatggccagtgacttcacttctaatctaagttccccgtcactaagcagttgacctttgactacaaatggcagtgagaaaagaagcaaagacttcttgaaattcatcacccatttcacaagttaagccacaaattctgggggtattcttatatggaatagccataacaagttatattttaatgttgtattaaatattttgacagtaatggttttagatgtgtttctaatttctttcaaaatagaaaatatattttaatttccttgattttaaaacaatatatatatatatctacaaatttttcagtgtatgactatgtgaagttaaaaag

SEQ ID NO: 416946 - DNA, 186 bp, Homo sapiens
aggtgttagtagtaatgagttcaggtgtttctccttagggaaggtcaaatgaaggacttagcgacataatgatcctgaaatttgaaatatatatattatatatataatatatatatgactgaaaacaagggtcatatatatacttatttaaaataattattaatatttattattaatttattatat

SEQ ID NO: 416947 - DNA, 370 bp, Homo sapiens
gaactataaagtcttaaaattgctattagtgaattaacaaatcaatccatagacagggtagaaatgaatagagaaagagatgaacaatcctggatcgatgatgactgctggtggcgtatgagtcatatgcgatgaatacgtgtctagaactctgaggtccatcacagaagaaatctagctcattttctgtgtttgatataatcctttagacaggcatcaggaatattagatgagtttggttttagtctttgtatttacatgttttaattctatttttgtaattggccaatataaaaaccaataaacaaatgtataaataaagatgagtaaggttaatcattgtccagttgtaaaaaatatttggtgaggt

SEQ ID NO: 416948 - DNA, 748 bp, Homo sapiens
atggattggacatcttggtaattgaccatccaggaggtacttgagggagagatgaagataaaaaggagatagattgtgttttgtttgtctctccactcagatgtaaactctgtggggggaggggcttgtctattttatttgctgttgcagccccagtgccttcaatactttgaatgaggatatatggacgcatacaaaatatggtgggactttacatgtttcaagactgtacagtggaagcctggtgcacggactatgccagcaactgctagcatcgacctctgtagaaagtctcctgagcatatgtcctgaggctaagcaactttatgaatatctattcaatgccacaaggtcatatgcccccgctgaaatattcctaccaaaaggtagatcaaattcaaaaaaaaaaaggcagaagaaacagaataccagctgttctaagaacagagggagaaccactgcacacaccaagtgttggtatgagggaaacaaccggtttgggttgttaatggttgaaaacttagaggaacatagtgaggcctccaacattgaataaaactcagtttgcatcaaactagatgtatttaatataatccttacttaaaattcttccgttaccacccttgaaacaattagctttttctttaggactgacctgttaggggataaacatcacaataatctgaattccaagttattttgtattttgtttttaataaatacaacctgatttaagaaaaaaaaatat

SEQ ID NO: 416949 - DNA, 2746 bp, Homo sapiens
gttcgccgacccaagtaggcggagaaagcagaggaggaccggcgggccaagctttcctagcctgacagcagccatttcggaacgtacgtcccagccctctttagctacttagcgcctctgggcccgagaacacctgctccttggctcagtctggcgccaccggcatcacggaactgtacttcccagagacgtcacaccgggagacttccgattcccgctcttgagattggactctcacgtgcaggagccagtcctcgctgggctctagcgggcttctgatggaggagctactcctctgggaggacagaaattagcagcagcctctgtcaccatccaaagattacaacccatgaaaccattgaatttgtgccttgtatcagaaagcaaaggagaatgaaaaagcacagctaacattgcttgaggatctaggcgattaattctttagactgtcatcatgggtatccgaggactaatgagttttgtggaagatcatagtaatgagttcttcactgatttgaagttgcgggacacaaaaattgtcattgatggttatgctcttttccaccgtctttgcttcagttcaaacttggatctccggtatggaggggactatgattcttttgcagatgttgtacaaaaattctttgaatcactgtttgcttgtaatatatgcccatatgttgtattagatggaggatgtgacatttcagataaaaagcttacaactttaaaggatagagctagagagaagatccagatggcccattccctttctgttggtgggagtgggtacgtatgtcccttactcatccgggaagtattcatacaggttttgatcaagctgcgggtgtgttttgtccagtgcttttcagaagcagatcgggacattatgacacttgctaaccattggaattgccctgtgttatcatcagatagtgacttttgcatttttgacctgaaaactgggttttgcccattgaatagctttcagtggagaaatatgaacactattaagggcacacaaaactatatccctgccaaatgcttttcccttgatgcattctgccatcacttcagcaatatgaataaagctctactacctctctttgcggtgctatgtggaaatgaccatgttaatctacccatcatggagacattcttaagtaaagcgcgtcttcctcttggagctaccagttctaaagggaggagacaccaccgaatcctgggacttctgaattggttgtctcattttgccaaccctaccgaagcactagataatgttctgaaatacctcccaaaaaaggatcgagaaaatgttaaggaacttctctgctgttccatggaagaataccaacagtcccaggtgaagctacaggacttcttccagtgtggtacttatgtctgtccagatgccttgaatcttggtttaccagaatgggtattagtggctttagctaaaggccagctatctcctttcatcagtgatgctttggtcctaagacggaccattcttcccacacaggtggaaaacatgcagcaaccaaatgcccacagaatatctcagcccatcaggcaaatcatctatgggcttcttttaaatgcctcaccacatctggacaagacatcctggaatgcattgcctcctcagcctctagctttcagtgaagtggaaaggattaataaaaatatcagaacctcaatcattgatgcagtagaactggccaaggatcattctgacttaagcagattgactgagctctccttgaggaggcggcagatgcttctgttagaaaccctgaaggtgaaacagaccattctggagccaatccctacttcactgaagttgcccattgctgtcagttgctactggttgcagcacaccgagaccaaagcaaagctacatcatctacaatccttactgctcacaatgctagtggggcccttgattgccataatcaacagccctggaaatgtggaccctgtacccaggcaggctcagtgtcttgctcctcgctagttggtaaaaggtaaggaagagctgcaggaagatggtgctaagatgttgtatgcagagttccaaagagtgaaggcgcagacacggctgggcacaagactggacttagacacagctcacatcttctgtcagtggcagtcctgtctccagatggggatgtatctcaaccagctgctgtccactcctctcccagagccagacctaactcgactgtacagtggaagcctggtgcacggactatgccagcaactgctagcatcgacctctgtagaaagtctcctgagcatatgtcctgaggctaagcaactttatgaatatctattcaatgccacaaggtcatatgcccccgctgaaatattcctaccaaaaggtagatcaaattcaaaaaaaaaaaggcagaagaaacagaataccagctgttctaagaacagagggagaaccactgcacacaccaagtgttggtatgagggaaacaaccggtttgggttgttaatggttgaaaacttagaggaacatagtgaggcctccaacattgaataaaactcagtttgcatcaaactagatgtatttaatataatccttacttaaaattcttccgttaccacccttgaaacaattagctttttctttaggactgacctgttaggggataaacatcacaataatctgaattccaagttattttgtattttgtttttaataaatacaacctgatttaagaaaaaaaaatat

SEQ ID NO: 416950 - DNA, 2272 bp, Homo sapiens
gttcgccgacccaagtaggcggagaaagcagaggaggaccggcgggccaagctttcctagcctgacagcagccatttcggaacgtacgtcccagccctctttagctacttagcgcctctgggcccgagaacacctgctccttggctcagtctggcgccaccggcatcacggaactgtacttcccagagacgtcacaccgggagacttccgattcccgctcttgagattggactctcacgtgcaggagccagtcctcgctgggctctagcgggcttctgatggaggagctactcctctgggaggacagaaattagcagcagcctctgtcaccatccaaagattacaacccatgaaaccattgaatttgtgccttgtatcagaaagcaaaggagaatgaaaaagcacagctaacattgcttgaggatctaggcgattaattctttagactgtcatcatgggtatccgaggactaatgagttttgtggaagatcatagtaatgagttcttcactgatttgaagttgcgggacacaaaaattgtcattgatggttatgctcttttccaccgtctttgcttcagttcaaacttggatctccggtatggaggggactatgattcttttgcagatgttgtacaaaaattctttgaatcactgtttgcttgtaatatatgcccatatgttgtattagatggaggatgtgacatttcagataaaaagcttacaactttaaaggatagagctagagagaagatccagatggcccattccctttctgttggtgggagtgggtacgtatgtcccttactcatccgggaagtattcatacaggttttgatcaagctgcgggtgtgttttgtccagtgcttttcagaagcagatcgggacattatgacacttgctaaccattggaattgccctgtgttatcatcagatagtgacttttgcatttttgacctgaaaactgggttttgcccattgaatagctttcagtggagaaatatgaacactattaagggcacacaaaactatatccctgccaaatgcttttcccttgatgcattctgccatcacttcagcaatatgaataaagctctactacctctctttgcggtgctatgtggaaatgaccatgttaatctacccatcatggagacattcttaagtaaagcgcgtcttcctcttggagctaccagttctaaagggaggagacaccaccgaatcctgggacttctgaattggttgtctcattttgccaaccctaccgaagcactagataatgttctgaaatacctcccaaaaaaggatcgagaaaatgttaaggaacttctctgctgttccatggaagaataccaacagtcccagatgcttctgttagaaaccctgaaggtgaaacagaccattctggagccaatccctacttcactgaagttgcccattgctgtcagttgctactggttgcagcacaccgagaccaaagcaaagctacatcatctacaatccttactgctcacaatgctagtggggcccttgattgccataatcaacagccctggtaaggaagagctgcaggaagatggtgctaagatgttgtatgcagagttccaaagagtgaaggcgcagacacggctgggcacaagactggacttagacacagctcacatcttctgtcagtggcagtcctgtctccagatggggatgtatctcaaccagctgctgtccactcctctcccagagccagacctaactcgactgtacagtggaagcctggtgcacggactatgccagcaactgctagcatcgacctctgtagaaagtctcctgagcatatgtcctgaggctaagcaactttatgaatatctattcaatgccacaaggtcatatgcccccgctgaaatattcctaccaaaaggtagatcaaattcaaaaaaaaaaaggcagaagaaacagaataccagctgttctaagaacagagggagaaccactgcacacaccaagtgttggtatgagggaaacaaccggtttgggttgttaatggttgaaaacttagaggaacatagtgaggcctccaacattgaataaaactcagtttgcatcaaactagatgtatttaatataatccttacttaaaattcttccgttaccacccttgaaacaattagctttttctttaggactgacctgttaggggataaacatcacaataatctgaattccaagttattttgtattttgtttttaataaatacaacctgatttaagaaaaaaaaatat

SEQ ID NO: 416951 - DNA, 465 bp, Homo sapiens
agtgtttgttaaagacacctgctcagtctggggctagctgcaaaaccactaagcatgcatcacgtaatttgttgatgaaaagtttttaagtatcaccagcaaagaatctttgtcataccagctcagttccttccttcaaagaacagattattcttaagtaatttcgataatattatagagcaataagagctctcattgtttagatgcatttgttgaagctatgtcaatggtagttatcctgttgcactgaattacttctttaacaacatacttttttcttgctttgaacagactgtacagtggaagcctggtgcacggactatgccagcaactgctagcatcgacctctgtagaaagtctcctgagcatatgtcctgaggctaagcaactttatgaatatctattcaatgccacaaggtcatatgcccccgctgaaatattcctaccaaaaggtagatcaaattc

SEQ ID NO: 416952 - DNA, 2686 bp, Homo sapiens
gttcgccgacccaagtaggcggagaaagcagaggaggaccggcgggccaagctttcctagcctgacagcagccatttcggaacgtacgtcccagccctctttagctacttagcgcctctgggcccgagaacacctgctccttggctcagtctggcgccaccggcatcacggaactgtacttcccagagacgtcacaccgggagacttccgattcccgctcttgagattggactctcacgtgcaggagccagtcctcgctgggctctagcgggcttctgatggaggagctactcctctgggaggacagaaattagcagcagcctctgtcaccatccaaagattacaacccatgaaaccattgaatttgtgccttgtatcagaaagcaaaggagaatgaaaaagcacagctaacattgcttgaggatctaggcgattaattctttagactgtcatcatgggtatccgaggactaatgagttttgtggaagatcatagtaatgagttcttcactgatttgaagttgcgggacacaaaaattgtcattgatggttatgctcttttccaccgtctttgcttcagttcaaacttggatctccggtatggaggggactatgattcttttgcagatgttgtacaaaaattctttgaatcactgtttgcttgtaatatatgcccatatgttgtattagatggaggatgtgacatttcagataaaaagcttacaactttaaaggatagagctagagagaagatccagatggcccattccctttctgttggtgggagtgggtacgtatgtcccttactcatccgggaagtattcatacaggttttgatcaagctgcgggtgtgttttgtccagtgcttttcagaagcagatcgggacattatgacacttgctaaccattggaattgccctgtgttatcatcagatagtgacttttgcatttttgacctgaaaactgggttttgcccattgaatagctttcagtggagaaatatgaacactattaagggcacacaaaactatatccctgccaaatgcttttcccttgatgcattctgccatcacttcagcaatatgaataaagctctactacctctctttgcggtgctatgtggaaatgaccatgttaatctacccatcatggagacattcttaagtaaagcgcgtcttcctcttggagctaccagttctaaagggaggagacaccaccgaatcctgggacttctgaattggttgtctcattttgccaaccctaccgaagcactagataatgttctgaaatacctcccaaaaaaggatcgagaaaatgttaaggaacttctctgctgttccatggaagaataccaacagtcccaggtgaagctacaggacttcttccagtgtggtacttatgtctgtccagatgccttgaatcttggtttaccagaatgggtattagtggctttagctaaaggccagctatctcctttcatcagtgatgctttggtcctaagacggaccattcttcccacacaggtggaaaacatgcagcaaccaaatgcccacagaatatctcagcccatcaggcaaatcatctatgggcttcttttaaatgcctcaccacatctggacaagacatcctggaatgcattgcctcctcagcctctagctttcagtgaagtggaaaggattaataaaaatatcagaacctcaatcattgatgcagtagaactggccaaggatcattctgacttaagcagattgactgagctctccttgaggaggcggcagatgcttctgttagaaaccctgaaggtgaaacagaccattctggagccaatccctacttcactgaagttgcccattgctgtcagttgctactggttgcagcacaccgagaccaaagcaaagctacatcatctacaatccttactgctcacaatgctagtggggcccttgattgccataatcaacagccctggtaaggaagagctgcaggaagatggtgctaagatgttgtatgcagagttccaaagagtgaaggcgcagacacggctgggcacaagactggacttagacacagctcacatcttctgtcagtggcagtcctgtctccagatggggatgtatctcaaccagctgctgtccactcctctcccagagccagacctaactcgactgtacagtggaagcctggtgcacggactatgccagcaactgctagcatcgacctctgtagaaagtctcctgagcatatgtcctgaggctaagcaactttatgaatatctattcaatgccacaaggtcatatgcccccgctgaaatattcctaccaaaaggtagatcaaattcaaaaaaaaaaaggcagaagaaacagaataccagctgttctaagaacagagggagaaccactgcacacaccaagtgttggtatgagggaaacaaccggtttgggttgttaatggttgaaaacttagaggaacatagtgaggcctccaacattgaataaaactcagtttgcatcaaactagatgtatttaatataatccttacttaaaattcttccgttaccacccttgaaacaattagctttttctttaggactgacctgttaggggataaacatcacaataatctgaattccaagttattttgtattttgtttttaataaatacaacctgatttaagaaaaaaaaatat

SEQ ID NO: 416953 - DNA, 2252 bp, Homo sapiens
gttcgccgacccaagtaggcggagaaagcagaggaggaccggcgggccaagctttcctagcctgacagcagccatttcggaacgtacgtcccagccctctttagctacttagcgcctctgggcccgagaacacctgctccttggctcagtctggcgccaccggcatcacggaactgtacttcccagagacgtcacaccgggagacttccgattcccgctcttgagattggactctcacgtgcaggagccagtcctcgctgggctctagcgggcttctgatggaggagctactcctctgggaggacagaaattagcagcagcctctgtcaccatccaaagattacaacccatgaaaccattgaatttgtgccttgtatcagaaagcaaaggagaatgaaaaagcacagctaacattgcttgaggatctaggcgattaattctttagactgtcatcatgggtatccgaggactaatgagttttgtggaagatcatagtaatgagttcttcactgatttgaagttgcgggacacaaaaattgtcattgatggttatgctcttttccaccgtctttgcttcagttcaaacttggatctccggtatggaggggactatgattcttttgcagatgttgtacaaaaattctttgaatcactgtttgcttgtaatatatgcccatatgttgtattagatggaggatgtgacatttcagataaaaagcttacaactttaaaggatagagctagagagaagatccagatggcccattccctttctgttggtgggagtgggtacgtatgtcccttactcatccgggaagtattcatacaggttttgatcaagctgcgggtgtgttttgtccagtgcttttcagaagcagatcgggacattatgacacttgctaaccattggaattgccctgtgttatcatcagatagtgacttttgcatttttgacctgaaaactgggttttgcccattgaatagctttcagtggagaaatatgaacactattaagggcacacaaaactatatccctgccaaatgcttttcccttgatgcattctgccatcacttcagcaatatgaataaagctctactacctctctttgcggtgctatgtggaaatgaccatgttaatctacccatcatggagacattcttaagtaaagcgcgtcttcctcttggagctaccagttctaaagggaggagacaccaccgaatcctgggacttctgaattggttgtctcattttgccaaccctaccgaagcactagataatgttctgaaatacctcccaaaaaaggatcgagaaaatgttaaggaacttctctgctgttccatggaagaataccaacagtcccaggtgaagctacaggacttcttccagtgtggtacttatgtctgtccagatgccttgaatcttggtttaccagaatgggtattagtggctttagctaaaggccagctatctcctttcatcagtgatgctttggtcctaagacggaccattcttcccacacaggtggaaaacatgcagcaaccaaatgcccacagaatatctcagcccatcaggcaaatcatctatgggcttcttttaaatgcctcaccacatctggacaagacatcctggaatgcattgcctcctcagcctctagctttcagtgaagtggaaaggattaataaaaatatcagaacctcaatcattgatgcagtagaactggccaaggatcattctgacttaagcagattgactgagctctccttgaggaggcggcagatgcttctgttagaaaccctgaaggtgaaacagaccattctggagccaatccctacttcactgaagttgcccattgctgtcagttgctactggttgcagcacaccgagaccaaagcaaagctacatcatctacaatccttactgctcacaatgctagtggggcccttgattgccataatcaacagccctggtaaggaagagctgcaggaagatggtgctaagatgttgtatgcagagttccaaagagtgaaggcgcagacacggctgggcacaagactggacttagacacagctcacatcttctgtcagtggcagtcctgtctccagatggggatgtatctcaaccagctgctgtccactcctctcccagagccagacctaactcggtaagcaccatgggaaactttagttcagatggaagcacacaaaagtaaatacagtattttcacttatatttaaagcaacaaagttactt

SEQ ID NO: 416954 - DNA, 345 bp, Homo sapiens
gtgtggactcctatttgtaatctctggcttgctcagatccatgtcccctgtaaagctttcaatatttatcattccagagcaatgaaactctcttctctatagctcccacgcccctaacgctgagttaatttaaaatcatgtcttttctcccaatgaggagatgcaaataccacggggaagcaaattgagacaaaaatccaggttctccagctgcttccactgagctcctttcactctcctgtgtgcctcagattcaaaaggaagcaaatgtgaggcagggagaatttggataaacaggtaaagaaagaaaaccgtttcttccgtgccatcccccacagccactga

SEQ ID NO: 416955 - DNA, 441 bp, Homo sapiens
tcacatttgcaagttcaatttgaacctttttttagtctgcttgtacttctcttatcaagcaagaaagcacttttctgcttttcctattactagtaacagtggagattaaatatctcatgtttttgggcattctagagcccaacacatcacctgttcctttccatactaccacaactgacactctctggaaagtgccacctccctgcagcaggccaaccagtacaaaaatagtacattaaaccagcaaagctaagaaccctcaaagagtacatttcaccctcctaccgcctccactggaacaggtgctggtatccacagctgagagacccacagatggttcacatctcccgactctgtgcagactaccccccagtaccagcctggagcctggtagacttgctgggtggctagatccagaagagagatagcaatcactacagc

SEQ ID NO: 416956 - DNA, 984 bp, Homo sapiens
tggcttgagtttttcaaaacaatcaatcctggtttggggaagtttaaatatggcctgtatatgataccattgaattacttgctcatgtactcaggtgcaagtttggtattgtggttctgcgggagaatgtccttattcttaggagttgcaagctgaagaatttaggggtgaggtgctgctatctgcaactgccatccaaaaggttcagaaaaaatgttctatgtatgtatctctttaaatagagaaaaagaaagaaaggccaaactttaacaactggcaaatcttgctgaagggttcatggatatttattgtgctctttttttcaactttctgtagattagaacatttcccaaataaaaacatgaaaaaacaacttttaatagaatagacatttacatcctctcccattcaaaatttgggaaaaaaatcagtgaaagtggaagagaaatggaagactgaaataatcttaaagaaatgttacagatgtcaggcttaaagaaaaaagagtctgtttgtcacatgtgttgagtacagttctaactgaaggctcatccagtcttagataattacaataatttacttttcttaagtaagtaaactttattatttcagcagctggaattaaaatgggcaacaaatgtagaataagttctcaatcatataaaatagtatctaattgttcagataattaaatgatctaatgtacttaaagcgccagagaacctggcacagaggatatggcctgactacttgcagaggtatgccatagattagacagggcatagacacagctgacactcacaaacacctgttgactgactcactcaactccccatcacctcgaaaccaagctcatatactccacagaagtgattgctaacagttctgggtacagcattttccccacgtgtacaatcggacatatgcaatacatatacatacaatacagctgacccttgaacaacacaggtttgaaccaccttg

SEQ ID NO: 416957 - DNA, 456 bp, Homo sapiens
cagacggagaatgatgatgttcagctgcttcaaaatgacagactctaatcaggattgcccacctatcacaccaaattaccagtaaaaaatgcaaattttctaccgacatgacacttttaaacacagacatctcacagacctccagaagccctgggtatagataagacttgaattactttcctccaatgttacattaggattggaaggcagattttaaaattatgtttttaaaaagcggtcattcttccccatgttaagaatttaaccttaaagatgaaaaagctaagaaactgaagtttgtcagtggattctagcttctgtaaaagttggaagaaaaaaaaaatccacttaaattttgtaaaaattgaaaaaaaaaacaactaaggaataaaaaagaaatgccaagaacatataaatgaaagagcaaaagaacaacttgagtaaaacattatagta

SEQ ID NO: 416958 - DNA, 584 bp, Homo sapiens
ctaattactggattctaagttctcacccccagcactagcccagggcctgcacacagcaggccctcagtaaatggtttttcaaagaataatcaagaggctaacaggtgttatatgacaaacatattcagtaatttgtaaacacagacctttacaaacaatctcaaataggaggtacaaccttcaaacctctcagatgatctctcctttaagaagggttcctggcaagtccaccacagcagttaccccacttcaataggccattcagaaataaacttggtaagatacaaatttttcacaggaaatacaagcagaggaggctaaatatgacctaagagctgactcaacagcctctgtgatggataaggcttctctctctagggccaaacaccccatgttgttctttgtggatataggccagctgtccccagaaactcatcctcctaaactgtaccaataatggccccacaaagccactcagcaacaacatgcaggaagcgtgaaggttaagattgatccggggttgtcctgaaatactgctacaaaatccacgaatgcctacaaccatcactcagcccctttaaaaa

SEQ ID NO: 416959 - DNA, 491 bp, Homo sapiens
gcggccgcctactactactaaaaaaacgacaggtcagacgaaatgaagacttccttagagttgatgggacttaaactgtatattacagaatgaataggccaagtagagaaaatggctcttttgaggttagggaaatattgaatcaaacaaataattgcaggacataatgcaggcatgtattagccctataatgaagctagcatgaccagagcagagctcctgtgggaaataatgtagggaccagattacggctaaattctgctatgtaaagcttgactgaggccttgtggagaatggggagataggatttccatataggatttcattcagagaaatgacattttctgcaaatgctaccctaaagaatgccataggccaggtgtggtggctcacacctgtaattctagcacttgggaggctgaggtgggaggattacttgagcccaggagttcaagactagcctaggcaacatagtgacaccccctctaaaa

SEQ ID NO: 416960 - DNA, 317 bp, Homo sapiens
actggaagacagaataataaaaagtacccaacccgaaaaacagactgggtggggggaaaagtaaaacagagccttagggatctgtaggcttgtaacaaaaaaaaaaaagtaacattcatgtcactggagtcccaaaaggaaaggaaaaagaggacagagttagaaaagtcctccaaaaacactactgtttgaaatgtctcaaatttggcaaaagacataaatctacagatagaaggttagcaaacactaggaaggataaaacccaaagaaacaccaagatacaccaaattcaaatttctgaaaaccaaagacaaaga

SEQ ID NO: 416961 - DNA, 479 bp, Homo sapiens
ccccaggagacatctggcaacgtctggagacattattggttgtcacaaatggaggatgctactggcatctagtgggtagagaccagggatactgctaaataccctacaatgcacaggacagcccctacaacaagaagtattcggcctcaaatatggcaaggttgagaaactgtgagaaatcaattaataatatttttgttgccttcattcaatgagggcagtgtttctcaaaaacgtaaactttctgactccaaactctttactgactccaacaaacacctccaagaattctgaaaaataggcaaatgtttacttagtccccacattttaaaaataagatactcaaggaacatatatgctggtgaatgttagaattcaaatgttaaatccatctaatccttgcaagctttctcatatatgatctcatacatattttctttaccacagccccagaaaggagaactgttaggcccagtgca

SEQ ID NO: 416962 - DNA, 601 bp, Homo sapiens
agataatgctgggtaaagacattattttacaataagtaagtgatttgaagagaataaaatgatatatttggtataatcaacattaatgcaatcataaataatagaaaactctcatgtttggaacacatagtttagattttaaggtaatttgaatatatcatgtgtgattacttagagatcaactattctcagccctggctgtgcattagaattactgaggaacattttaaaaatactgatgtctgggtctcacactcggagattctgatttaatttgggaagtggatcagactctatattctcagagatccatggggaaattctaatgtatagtcaaagctgggaaccaccagtataaaaccttgcaacttagagtgtgggccatagacagtgttagcctcacctacagcttattaaaaatacaaactctcaggccccaccttagactttctgaatcaaagtctgcattttaaggtgaggtaaggtagctgacacctgtaatcccagaactttgggaggctgaggtgggcagattgcttgaggtcaggagttcgagagcagcctggccaacatggtgaaaccccgactctactaaaaaaaa

SEQ ID NO: 416963 - DNA, 310 bp, Homo sapiens
gcaattctgcctcagcctcccgagtagctggaactgcaggcgtgcaccaccacgcctggctaattttttgaatttttagtagagacagggtttcaccatgttggccaggctggtcttgaactcctgacctcaggtgatcctcctgccttggcctcccaaagtgctgggattacaggcatgagccgccactcccggccgctgcagagaatttttaaaataaatgatagattctcacagataagaagtacaggataattatttgccaaagtttgaaactgccattatattcaaaggcattctcttttgggag

SEQ ID NO: 416964 - DNA, 343 bp, Homo sapiens
cagtagagacagggtttcaccatgttggccaggttggtctcgaactcctgacctcaggtgatctgcctgccttggcctcccaaagtgttagtattacaggtgtaagtcaccacacctggccatgtacttgaatattttttaatagcatcctatgaagtcaagaggtcaatatcttttatactttgatatgaagagaagttcatatcaaattaaagactttatacaaatgtctagtgatctttagctgtccactcctatttaagagagaaacactaaaaatctagttgaaagcactgtgcctacaggtggagttgtcaatcattgctttactgtaaggtctggt

SEQ ID NO: 416965 - DNA, 382 bp, Homo sapiens
cttatgtttagaatgtagctttctaggttttactaagtcaggtactacctctccatttgtattcctgcttctaaaatgttattcttagctcctgtctcctgcttctttatgcctttataggtatatgtatgtgtgcgtgtgtgtttaatctctttacttaatgccatgttagtcagagttttggaggcagcggaagcaaatgcatgtgtttagtgtgccatctttctcaaaaagtccaggtgtttttcctacacttagagatcctcaaagaaaatgttttcagaatttttactggcaacataagcattttcataaagtttcagaagagcatcatgtcaaagcttgaagatacttctctgttaaggctctacctcacacaatc

SEQ ID NO: 416966 - DNA, 440 bp, Homo sapiens
agcaacttttaaagggttataaaatatttaacattaaaactataattaacataatttgatattttatcccaaagtcacttcacataagagtaattttctaagcatcaagtatgagaatgccatgacaaaattcaggatgttcgaattatctgctcattttaacctggattaacaagttttcacttaggcctgggatgttttccaaagtaatagatttaaatggtctgttggagattacattgcacacctcctgacaacgactaaaaccggtctctcctcatttccttgtcgcactctgcaaccctttgaagagctggaaaggtggttctcagcctcccctgcatgctttttcaggtcatgctcctggcacgtgtcagtttttcacagctcacgttttcagcactttctgggcactcttggagaaaggaagagcgcccatc

SEQ ID NO: 416967 - DNA, 238 bp, Homo sapiens
ccctgcccatcttctctggaaaccctcctaataaatctttcccacaaatcctcacagaaagcactgcctctggggacctagcctaaggcaaggtagatgcaggattcaaacccaagcctgtgtgtcttcaaagttttttcccactatgttgtggttgagatgttattacaatcgtgttggtctgctctttgttcattttacagttatacatttaaaatgcatcatacaaccctgtctc

SEQ ID NO: 416968 - DNA, 360 bp, Homo sapiens
aatcatcccacttcttataataaagaatctaataatgcagtaaattatgcatcttgtatataaaagatacccccatcccacctccccaacagtcatcttcttaggctcaaggtccactcctctgtgacacggaaggacccttcctctggggaaaggatgggctcagctgcctcagcacgagctgctcctccagcctgcctgcctgtgacactgctacctgctagccagaagcatcccagtgtctactgagctgctgcagattgaacagactgtgaatccagccagaggataagaggttgttttaattggctaaatctgctatgtagtaagcgtatggccatgaatttgtagccaaaacac

SEQ ID NO: 416969 - DNA, 398 bp, Homo sapiens
gtaaatgtttgagttaaattaataagatccccaagatatagggcttaattttatctgcacatgtgagtcttcttgaatgaatggtgtggagtgctgctttttttctgtgcttgtttggcagtttgtttatatggagaagaatgaagaccatgtggtttcagtttgaacggaaattgttgcatagcgatttaccatacagctgtgagactgaacaaatgagtttaaatattatacagtagaaaagaaaactgactttggaacttaaggtattatttcaatttttttctcttctcttctctctagacaaggcctcgctctgtcacccaggctggagtgcagtggtgtgatcatacctcactgcagcctccaactcctgggctcaggcaatccttctgtct

SEQ ID NO: 416970 - DNA, 1112 bp, Homo sapiens
gctggtcttgaactcccaacctcaggtgatctgcccgcctcggactcccaaagtgcttggattacaggccaccacatccggcctcccaaatccttctaaaacaagagtgaagaaacttttaaaaagaaaggagaaacagcaacgaagtttttcagccctgaagcaggtggatagatgtggtgagctgaatctgaaattggtactggggaaaactgagaagaaacccaatttgcacccccacacctgcttggggctcaagagttaatagtaccagagactctagggatccctggaaataggaatgaagtgaggctaaacacagacagctggctgaacatcttttaaagagaccgcttaaagctcccctcagctcccattgcctccctcagtccctactgcaggcatctgcctttccctagccctgatatgtgacaggcttattctctggggagggtgcaaaggaggctctctggacatgggcaccaggcacagttgagggtggggcaccatattgaaaacgggaagaaggagacttgacgtgcagatgttgagacctccagccttcttccctaactcgactcccgaaatgttgccaacacccagaattaaacccactgggcaggatatttgaagaggcttatctggagacttttgggaccagcccaagaggtttctgggtaaaatgacttggccaaagcaccctatgggccaaacagagtcccatagttagcaggcctcacccaaatgcactcagctccctgttctcttgagtgtccccttttaagtctccggggacaaccaagaatgagaagacatttgggaaaactctgtggtgtacagagacaagtaaagaaatcagaaaaaatacatttagaggaacagagaccatgcagagagggaaaaatgtatatatgaatactcacatgtaaaatccttaaatcaaataagtgaatgcattcatgacacaaaagtgtaatgcttgttttttaaaaaaggaatagaaaggaactcttggaaataaaaaatgtaatagtacaaattagagactcaggagcagtgttggaggataagcacacatcccagaaaataaagctaaaagaaaagaaaatagg

SEQ ID NO: 416971 - DNA, 828 bp, Homo sapiens
aatgaaagattgagttgagcagggcagattgaacatgtatttattcccaccttcccaaatccttccttttttttttgagatggagtttcgctcttgttgccaggccggagtgcaatggcgcgatcttggctcactgcaacctccgcctccaggatacaagtgattttcccgcctcggcctccccagtagctgggatttcaggcatgtgccaccacacctggctaattttgtattttagtagagatggggtttatccatgttggtcaggctggtcttgaactcccaacctcaggtgatctgcccgcctcggactcccaaagtgcttggattacaggccaccacatccggcctcccaaatccttctaaaacaagagtgaagaaacttttaaaaagaaaggagaaacagcaacgaagtttttcagccctgaagcaggtggatagatgtggtgagctgaatctgaaattggtactggggaaaactgagaagaaacccaatttgcacccccacacctgcttggggctcaagagttaatagtaccagagactctagggatccctggaaataggaatgaagtgaggctaaacacagacagctggctgaacatcttttaaagagaccgcttaaagctcccctcagctcccattgcctccctcagtccctactgcaggcatctgcctttccctagccctgatatgtgacaggcttattctctggggagggtgcaaaggaggctctctggacatgggcaccaggcacagttgagggtggggcaccatattgaaaacgggaagaaggagacttgacgtgcagatgttgagacctccagc

SEQ ID NO: 416972 - DNA, 437 bp, Homo sapiens
tatgtatttttaggtcaaattaaattgcaagtaagaaacctaaagctgatccctttccccattttctcagagaatttctactgaaccattacccacatcatactatcaacagttatacaggccaggccactacatgaactctatgtatggcagcccacagagaggcttttagtataaggtaaaatatactggtatgagtggaccagcgcaaacccacggtccacgtctacacaatgcgcccctttctcaagttgctcattttgaggctgaggtcactatccctggcactagagactagaagctccaggagttcttccccagatttcagccatttcaccctctccccaagacttgcaggtgagaactccatacttatggccactctccccagtccagtcctctagctttcatctacaccaataacatcccctattacc

SEQ ID NO: 416973 - DNA, 406 bp, Homo sapiens
ctccctgaaaagagtcccgtccagagaaagcccagaaggccaggtgtggcaccaaaggaagcctccagcaattacagaccgagaggaactcacattcaggcaccacataacattcgtgcagactgtgatactaacagaatattgttctttatgagttgctttctttatatttcccaggttaatcccaaaatatactttgctttctaggtacactctagtatcagaaggatcccaaatcagtatgaagaatgcacagtatttacttcagggattcaatcatatgaccacagtagaaataaaagaatggaataatttttggaaaaaaaaagaagcaggaaaagatttctgtgaggtttttaaatagtagattttaacacaattctgcgcaattttaaagttgatgtac

SEQ ID NO: 416974 - DNA, 652 bp, Homo sapiens
aatatatgggctgttttataaaactttggtgtatatctttctaaagaatatatctagcatatcacatgaaattatctgttcttatctaagcctgagggtctgagactttcatgtttgccagtttcatgaaaagaacacaccagctttctctagaacggaaagatttttcttccaaagtaaatagaatagggaaaatgtgattattttatcgtgaaacatcagcttctacatatttctgggggaaaaacagtgtgcaacatttaaagagattctaactcaagttgtctgaatgttttatttagtaaaggagtaatttctgctgaaaatgtgtggatgaataattgtgcttatctgttccctaggttctaagctccaaactcatgccaacagctgatgatgacatggccagaagctgtgccaaatccttctgtgaaaacttcctcaaagctggcggtttgaggttagagtttcaatgtaatgttacatgagttgccgaaaatgaatatagttattttagttaatttcccctgcaaagtcttgcttattcctacaaggtatcatatgactcattgtgagagttattataagaaggaatgatgtttcagtcctttaaaatattttaaatcattttataacttctgattatttgaaa

SEQ ID NO: 416975 - DNA, 2636 bp, Homo sapiens
atcattcccttactcgaatgaattaaagtacaggattggggctaaataatgtgagtgccacgctctttctgaagctcttatatcaaggaacatgcattacaactttcctaatccctgcttccctcacttccagattgtgagatgtgtcagaacttcttcattgacagctgtgctgctcatgggccccctacatttgtaaaggacagtgcagtggacaaggggcatcccaaccgttcagccctcagtctgcccccggggctgagaattgggccatcaggcatccctcaggctgggcttggagtatggaacgaggcatctgatctgccactgggtctgcactttggcccctatgagggccgaattacagaagacgaagaggcagccaacagtggatattcctggctaatcaccaaggggagaaactgctatgagtatgtggatggaaaagataaatcctcggccaactggatgaggtatgtgaactgtgcccgggatgatgaagagcagaacctggtggccttccagtaccacaggcagatcttctatagaacctgccgagtcattaggccaggctgtgaactgctggtctggtatggggatgagtatggccaggaactgggcatcaagtggggcagcaagtggaagaaagagctcatggcagggagagaaccaaagccagagatccatccatgtccctcatgctgtctggccttttcaagtcaaaaatttctcagtcaacatgtggaacgcaatcactcctctcagaacttcccaggaccatctgcaagaaaacttctccaaccagagaatccctgcccaggggatcagaatcaggagcggcaatattctgatccacgctgctgtaatgacaaaaccaaaggtcaagagatcaaagaaaggtccaaactcttgaataaaaggacatggcagagggagatttcaagggccttttctagcccacccaaaggacaaatggggagctctagagtgggagaaagaatgatggaagaagagtccagaacaggccagaaagtgaatccagggaacacaggcaaattatttgtgggggtaggaatctcaagaattgcgaaagtcaaatatggagagtgtgggcaaggtttcagtgataagtcagatgttattacacaccaaaggacacacacaggggggaagccctacgtctgcagagagtgtgggagggctttagccggaagtcagacctcctcagtcaccagaggacacacacaggggagaagccttatgtctgcagagagtgtgagcggggctttagccggaagtcagtcctcctcattcaccagaggacacacaggggagaagccccagtctgcaggaaggatgagtaagtcattagtaataaaaccttatctcaatagccacaagaagacaaacgtgatcaccacacacttgcacaccccagctctgaggtggcttcagcgaaagtctgctaaccccttacattccccgagagtgtaaagagatcggaaataactaattaaacaaatccgccactttcatgactagagttgaggaagaacaggggatagttctgtaagtgttcgggggacgtcaacatgtgtggttgtttcccgcactgatcccctccattttttgtgttttgcctcctgttctaattaattttgtctccatacatatctgaaccccaagtgtgtacctcattcttcccttatcactgaaggaaggaagagtccagaagggccacagagaactcaaacgttcagttcaagtctccacaggaattcaaccccagaaagacataaacttggagtccatctggtttaattattggagaatcgattcccaagtccaggaagagaaatgtagggttttacagagtcgcagcaggaaagagagctccctggtctcctgggaagtgtgacctcttctaatggacccctctcctctgctgccatactcccccttggctccccctgtctcctctcctgatttcctccaatctctgtagccccagaagtgaacgccagacaggaacacgcatgtgtgtatatatgtgttcacgtgtgctatgtgtgttaagcctgcatgcatgggtgtgggggtatgtgccctctgtgtacgtatctgtgtgagtgtgggggtttcaagggtgtattaggaataacgctcaaaatcctaaggaaattgaatactctgagagaagagagacagaccctctcatactgttttatattgttttatactcagaaaaggaaaaagaagcaaaactaaaggcaggtagcctggcgcctaggaaccagacctgaaaccaaggaaccagacccgaaaccaggcctgggccggcctgacctaagcctggtagttaaaattcgacccctgacctagcaactgatgttatctatagattatagaaagacattgtgaaacttcccggtctgttctgttccactctgaccatcggtgcatgcagcccctgtcacctaccccctgcttgctcaatcgatcacgaccctctcacgtggacccccttagagttgtgagcccttaaaagggacaggaattgctcactcggggagctcggctcttgagacagcagtcttgctgatgctcctggccgaataaaccgcttccttctttaa

SEQ ID NO: 416976 - DNA, 2267 bp, Homo sapiens
ctagttctaagatcgcgggcggccgctcgcgatctagaaccaaggggcatcccaaccgttcagccctcagtctgcccccggggctgagaattgggccatcaggcatccctcaggctgggcttggagtatggaacgaggcatctgatctgccactgggtctgcactttggcccctatgagggccgaattacagaagacgaagaggcagccaacagtggatattcctggctaatcaccaaggggagaaactgctatgagtatgtggatggaaaagataaatcctcggccaactggatgagaaccaaagccagagatccatccatgtccctcatgctgtctggccttttcaagtcaaaaatttctcagtcaacatgtggaacgcaatcactcctctcagaacttcccaggaccatctgcaagaaaacttctccaaccagagaatccctgcccaggggatcagaatcaggagcggcaatattctgatccacgctgctgtaatgacaaaaccaaaggtcaagagatcaaagaaaggtccaaactcttgaataaaaggacatggcagagggagatttcaagggccttttctagcccacccaaaggacaaatggggagctctagagtgggagaaagaatgatggaagaagagtccagaacaggccagaaagtgaatccagggaacacaggcaaattatttgtgggggtaggaatctcaagaattgcgaaagtcaaatatggagagtgtgggcaaggtttcagtgataagtcagatgttattacacaccaaaggacacacacaggggggaagccctacgtctgcagagagtgtgggagggctttagccggaagtcagacctcctcagtcaccagaggacacacacaggggagaagccttatgtctgcagagagtgtgagcggggctttagccggaagtcagtcctcctcattcaccagaggacacacaggggagaagccccagtctgcaggaaggatgagtaagtcattagtaataaaaccttatctcaatagccacaagaagacaaacgtgatcaccacacacttgcacaccccagctctgaggtggcttcagcgaaagtctgctaaccccttacattccccgagagtgtaaagagatcggaaataactaattaaacaaatccgccactttcatgactagagttgaggaagaacaggggatagttctgtaagtgttcgggggacgtcaacatgtgtggttgtttcccgcactgatcccctccattttttgtgttttgcctcctgttctaattaattttgtctccatacatatctgaaccccaagtgtgtacctcattcttcccttatcactgaaggaaggaagagtccagaagggccacagagaactcaaacgttcagttcaagtctccacaggaattcaaccccagaaagacataaacttggagtccatctggtttaattattggagaatcgattcccaagtccaggaagagaaatgtagggttttacagagtcgcagcaggaaagagagctccctggtctcctgggaagtgtgacctcttctaatggacccctctcctctgctgccatactcccccttggctccccctgtctcctctcctgatttcctccaatctctgtagccccagaagtgaacgccagacaggaacacgcatgtgtgtatatatgtgttcacgtgtgctatgtgtgttaagcctgcatgcatgggtgtgggggtatgtgccctctgtgtacgtatctgtgtgagtgtgggggtttcaagggtgtattaggaataacgctcaaaatcctaaggaaattgaatactctgagagaagagagacagaccctctcatactgttttatattgttttatactcagaaaaggaaaaagaagcaaaactaaaggcaggtagcctggcgcctaggaaccagacctgaaaccaaggaaccagacccgaaaccaggcctgggccggcctgacctaagcctggtagttaaaattcgacccctgacctagcaactgatgttatctatagattatagaaagacattgtgaaacttcccggtctgttctgttccactctgaccatcggtgcatgcagcccctgtcacctaccccctgcttgctcaatcgatcacgaccctctcacgtggacccccttagagttgtgagcccttaaaagggacaggaattgctcactcggggagctcggctcttgagacagcagtcttgctgatgctcctggccgaataaaccgcttccttctttaa

SEQ ID NO: 416977 - DNA, 2442 bp, Homo sapiens
atcattcccttactcgaatgaattaaagtacaggattggggctaaataatgtgagtgccacgctctttctgaagctcttatatcaaggaacatgcattacaactttcctaatccctgcttccctcacttccagattgtgagatgtgtcagaacttcttcattgacagctgtgctgctcatgggccccctacatttgtaaaggacagtgcagtggacaaggggcatcccaaccgttcagccctcagtctgcccccggggctgagaattgggccatcaggcatccctcaggctgggcttggagtatggaacgaggcatctgatctgccactgggtctgcactttggcccctatgagggccgaattacagaagacgaagaggcagccaacagtggatattcctggctaatcaccaaggggagaaactgctatgagtatgtggatggaaaagataaatcctcggccaactggatgagaaccaaagccagagatccatccatgtccctcatgctgtctggccttttcaagtcaaaaatttctcagtcaacatgtggaacgcaatcactcctctcagaacttcccaggaccatctgcaagaaaacttctccaaccagagaatccctgcccaggggatcagaatcaggagcggcaatattctgatccacgctgctgtaatgacaaaaccaaaggtcaagagatcaaagaaaggtccaaactcttgaataaaaggacatggcagagggagatttcaagggccttttctagcccacccaaaggacaaatggggagctctagagtgggagaaagaatgatggaagaagagtccagaacaggccagaaagtgaatccagggaacacaggcaaattatttgtgggggtaggaatctcaagaattgcgaaagtcaaatatggagagtgtgggcaaggtttcagtgataagtcagatgttattacacaccaaaggacacacacaggggggaagccctacgtctgcagagagtgtgggagggctttagccggaagtcagacctcctcagtcaccagaggacacacacaggggagaagccttatgtctgcagagagtgtgagcggggctttagccggaagtcagtcctcctcattcaccagaggacacacaggggagaagccccagtctgcaggaaggatgagtaagtcattagtaataaaaccttatctcaatagccacaagaagacaaacgtgatcaccacacacttgcacaccccagctctgaggtggcttcagcgaaagtctgctaaccccttacattccccgagagtgtaaagagatcggaaataactaattaaacaaatccgccactttcatgactagagttgaggaagaacaggggatagttctgtaagtgttcgggggacgtcaacatgtgtggttgtttcccgcactgatcccctccattttttgtgttttgcctcctgttctaattaattttgtctccatacatatctgaaccccaagtgtgtacctcattcttcccttatcactgaaggaaggaagagtccagaagggccacagagaactcaaacgttcagttcaagtctccacaggaattcaaccccagaaagacataaacttggagtccatctggtttaattattggagaatcgattcccaagtccaggaagagaaatgtagggttttacagagtcgcagcaggaaagagagctccctggtctcctgggaagtgtgacctcttctaatggacccctctcctctgctgccatactcccccttggctccccctgtctcctctcctgatttcctccaatctctgtagccccagaagtgaacgccagacaggaacacgcatgtgtgtatatatgtgttcacgtgtgctatgtgtgttaagcctgcatgcatgggtgtgggggtatgtgccctctgtgtacgtatctgtgtgagtgtgggggtttcaagggtgtattaggaataacgctcaaaatcctaaggaaattgaatactctgagagaagagagacagaccctctcatactgttttatattgttttatactcagaaaaggaaaaagaagcaaaactaaaggcaggtagcctggcgcctaggaaccagacctgaaaccaaggaaccagacccgaaaccaggcctgggccggcctgacctaagcctggtagttaaaattcgacccctgacctagcaactgatgttatctatagattatagaaagacattgtgaaacttcccggtctgttctgttccactctgaccatcggtgcatgcagcccctgtcacctaccccctgcttgctcaatcgatcacgaccctctcacgtggacccccttagagttgtgagcccttaaaagggacaggaattgctcactcggggagctcggctcttgagacagcagtcttgctgatgctcctggccgaataaaccgcttccttctttaa

SEQ ID NO: 416978 - DNA, 2746 bp, Homo sapiens
ctagttctaagatcgcgggcggccgctcgcgatctagaaccaaggggcatcccaaccgttcagccctcagtctgcccccggggctgagaattgggccatcaggcatccctcaggctgggcttggagtatggaacgaggcatctgatctgccactgggtctgcactttggcccctatgagggccgaattacagaagacgaagaggcagccaacagtggatattcctggctaatcaccaaggggagaaactgctatgagtatgtggatggaaaagataaatcctcggccaactggatgaggtatgtgaactgtgcccgggatgatgaagagcagaacctggtggccttccagtaccacaggcagatcttctatagaacctgccgagtcattaggccaggctgtgaactgctggtctggtatggggatgagtatggccaggaactgggcatcaagtggggcagcaagtggaagaaagagctcatggcagggagagaaccaaagccagagatccatccatgtccctcatgctgtctggccttttcaagtcaaaaatttctcagtcaacatgtggaacgcaatcactcctctcagaacttcccaggaccatctgcaagaaaacttctccaaccagagaatccctgcccaggggatcagaatcaggagcggcaatattctgatccacgctgctgtaatgacaaaaccaaaggtcaagagatcaaagaaaggtccaaactcttgaataaaaggacatggcagagggagatttcaagggccttttctagcccacccaaaggacaaatggggagctctagagtgggagaaagaatgatggaagaagagtccagaacaggccagaaagtgaatccagggaacacaggcaaattatttgtgggggtaggaatctcaagaattgcgaaagtcaaatatggagagtgtgggcaaggtttcagtgataagtcagatgttattacacaccaaaggacacacacaggggggaagccctacgtctgcagagagtgtgggagggctttagccggaagtcagacctcctcagtcaccagaggacacacacaggggagaagccttatgtctgcagagagtgtgagcggggctttagccggaagtcagtcctcctcattcaccagaggacacacaggggagaagccccagtctgcaggaaggatgagtaagtcattagtaataaaaccttatctcaatagccacaagaagacaaacgtgatcaccacacacttgcacaccccagctctgaggtggcttcagcgaaagtctgctaaccccttacattccccgagagtgtaaagagatcggaaataactaattaaacaaatccgccactttcatgactagagttgaggaagaacaggggatagttctgtaagtgttcgggggacgtcaacatgtgtggttgtttcccgcactgatcccctccattttttgtgttttgcctcctgttctaattaattttgtctccatacatatctgaaccccaagtgtgtacctcattcttcccttatcactgaaggaaggaagagtccagaagggccacagagaactcaaacgttcagttcaagtctccacaggaattcaaccccagaaagacataaacttggagtccatctggtttaattattggagaatcgattcccaagtccaggaagagaaatgtagggttttacagagtcgcagcaggaaagagagctccctggtctcctgggaagtgtgacctcttctaatggacccctctcctctgctgccatactcccccttggctccccctgtctcctctcctgatttcctccaatctctgtagccccagaagtgaacgccagacaggaacacgcatgtgtgtatatatgtgttcacgtgtgctatgtgtgttaagcctgcatgcatgggtgtgggggtatgtgccctctgtgtacgtatctgtgtgagtgtgggggtttcaagggtgtattaggaataacgctcaaaatcctaaggaaattgaatactctgagagaagagagacagaccctctcatactgttttatattgttttatactcagaaaaggaaaaagaagcaaaactaaaggcaggtagcctggcgcctaggaaccagacctgaaaccaaggaaccagacccgaaaccaggcctgggccggcctgacctaagcctggtagttaaaattcgacccctgacctagcaactgatgttatctatagattatagaaagacattgtgaaacttcccggtctgttctgttccactctgaccatcggtgcatgcagcccctgtcacctaccccctgcttgctcaatcgatcacgaccctctcacgtggacccccttagagttgtgagcccttaaaagggacaggaattgctcactcggggagctcggctcttgagacagcagtcttgctgatgctcctggccgaataaaccgcttccttctttaaaaaaaaaaaaaaaaaaaaaaaaaaaaaattgtttgcggagcgccctgggacccagcagaagaagagtttctataaacatttcgttgggggcggcgggggccccagcaggtgttaggttgcaccggggctccatcggcggttcccagaggaaaaccggggtcaagacatagtgcggggagttccgcaccaattaaaaaaacgccggggggacaaccgacggtttggacaaatccaaaggggttgacgacatacggaataatacaaggagtcaaggaagcgcaatat

SEQ ID NO: 416979 - DNA, 2337 bp, Homo sapiens
atttcaggacttcgctttcgggttcccttgtcctgtgttgtgtaatgcccccgttatggcactagaaatattttttattagccgaagctaaatatagtgggactttggctgatcccgagctcggaggacagccggggtgatccgtttccccccgaggatcgaggtggtgcgctctggacggggttgtgcattctcgccgcgcccgggcggacgatccagcgaacagccccgcttctaacccgagatgctgctgccggcgcccgcgctccgccgcgccctgctgtcccgcccctggaccggggccggcctgcggtggaagcacacctcctccctgaaggtggccaacgagcccgtcttagccttcacgcagggcagccctgagcgagatgccctgcaaaaggccttgaaggacctgaagggccggatggaagccatcccatgcgtggtgggggatgaggaggtgtggacgtcggacgtgcagtaccaagtgtcgccttttaaccatggacataaggtggccaagttctgttatgcagacaagagcctgctcaacaaagccattgaggctgccctggctgcccggaaagagtgggacctgaagcctattgcagaccgggcccagatcttcctgaaggcggcagacatgctgagtgggccgcgcagggctgagatcctcgccaagaccatggtgggacagggtaagaccgtgatccaagcggagattgacgctgcagcggaactcatcgacttcttccggttcaatgccaagtatgcggtggagctggaggggcagcagcccatcagcgtgcccccgagcaccaacagcacggtgtaccggggtctggagggcttcgtggcggccatctcgccctttaacttcactgcaatcggcggcaacctggcgggggcaccggccctgatgggcaacgtggtcctatggaagcccagtgacactgccatgctggccagctatgctgtctaccgcatccttcgggaggctggcctgccccccaacatcatccagtttgtgccagctgatgggcccctatttggggacactgtcaccagctcagagcacctctgtggcatcaacttcacaggcagtgtgcccaccttcaaacacctgtggaagcaggtggcccagaacctggaccggttccacaccttcccacgcctggctggagagtgcggcggaaagaacttccacttcgtgcaccgctcggccgacgtggagagcgtggtgagcgggaccctccgctcagccttcgagtacggtggccagaagtgttccgcctgctcgcgtctctacgtgccgcactcgctgtggccgcagatcaaagggcggctgctggaggagcacagtcggatcaaagtgggcgaccctgcagaggattttgggaccttcttctctgcagtgattgatgccaagtcctttgcccgtatcaagaagtggctggagcacgcgcgctcctcgcccagcctcaccatcctggctgggggcaagtgtgatgactccgtgggctactttgtggagccctgcatcgtggagagcaaggaccctcaggagcccatcatgaaggaggagatcttcgggcctgtactgtctgtgtacgtctacccggacgacaagtacaaggagacgctgcagctggttgacagcaccaccagctatggcctcacgggggcagtgttctcccaggataaggacgtcgtgcaggaggccacaaaggtgctgaggaatgctgccggcaacttctacatcaacgacaagtccactggctcgatagtgggccagcagccctttgggggggcccgagcctctggaaccaatgacaagccagggggcccacactacatcctgcgctggacgtcgccgcaggtcatcaaggagacacataagcccctgggggactggagctacgcgtacatgcagtgagcccctctcgggctccaccgtccagctgtctgtccgtccagatgcctcctgcttggattctgagtggtcagagatctgtaaagcatgactttcaaggatggttcttaggggactgtgtaaagtgttgggtcttcctccaggatgcctgcatgggaccccacccggagctggtgtggccattccccgaagtgccactggcccatggatgggggtgggtgctggtgcacctgggctgggtgtgggttctgtgtccttccaggatctgtgtcatttcccatgaggggccggggcaggtggctgggtgggggcacaggctggagtattcttagttctactggttctacactgtgaggtggcaatgggatttgctcagatgccacccaataaaatgcctgttactt

SEQ ID NO: 416980 - DNA, 3348 bp, Homo sapiens
atttcaggacttcgctttcgggttcccttgtcctgtgttgtgtaatgcccccgttatggcactagaaatattttttattagccgaagctaaatatagtgggactttggctgatcccgagctcggaggacagccggggtgatccgtttccccccgaggatcgaggtggtgcgctctggacggggttgtgcattctcgccgcgcccgggcggacgatccagcgaacagccccgcttctaacccgagatgctgctgccggcgcccgcgctccgccgcgccctgctgtcccgcccctggaccggggccggcctgcggtggaagcacacctcctccctgaaggtggccaacgagcccgtcttagccttcacgcagggcagccctgagcgagatgccctgcaaaaggccttgaaggacctgaagggccggatggaagccatcccatgcgtggtgggggatgaggaggtgtggacgtcggacgtgcagtaccaagtgtcgccttttaaccatggacataaggtggccaagttctgttatgcagacaagagcctgctcaacaaagccattgaggctgccctggctgcccggaaagagtgggacctgaagcctattgcagaccgggcccagatcttcctgaaggcggcagacatgctgagtgggccgcgcagggctgagatcctcgccaagaccatggtgggacagggtaagaccgtgatccaagcggagattgacgctgcagcggaactcatcgacttcttccggttcaatgccaagtatgcggtggagctggaggggcagcagcccatcagcgtgcccccgagcaccaacagcacggtgtaccggggtctggagggcttcgtggcggccatctcgccctttaacttcactgcaatcggcggcaacctggcgggggcaccggccctgatgggcaacgtggtcctatggaagcccagtgacactgccatgctggccagctatgctgtctaccgcatccttcgggaggctggcctgccccccaacatcatccagtttgtgccagctgatgggcccctatttggggacactgtcaccagctcagagcacctctgtggcatcaacttcacaggcagtgtgcccaccttcaaacacctgtggaagcaggtggcccagaacctggaccggttccacaccttcccacgcctggctggagagtgcggcggaaagaacttccacttcgtgcaccgctcggccgacgtggagagcgtggtgagcgggaccctccgctcagccttcgagtacggtggccagaagtgttccgcctgctcgcgtctctacgtgccgcactcgctgtggccgcagatcaaagggcggctgctggaggagcacagtcggatcaaagtgggcgaccctgcagaggattttgggaccttcttctctgcagtgattgatgccaagtcctttgcccgtatcaagaagtggctggagcacgcgcgctcctcgcccagcctcaccatcctggctgggggcaagtgtgatgactccgtgggctactttgtggagccctgcatcgtggagagcaaggaccctcaggagcccatcatgaaggaggagatcttcgggcctgtactgtctgtgtacgtctacccggacgacaagtacaaggagacgctgcagctggttgacagcaccaccagctatggcctcacgggggcagtgttctcccaggataaggacgtcgtgcaggaggccacaaaggtgctgaggaatgctgccggcaacttctacatcaacgacaagtccactggctcgatagtgggccagcagccctttgggggggcccgagcctctggaaccaatgacaagccagggggcccacactacatcctgcgctggacgtcgccgcaggtcatcaaggagacacataagcccctgggggactggagctacgcgtacatgcagtgagcccctctcgggctccaccgtccagctgtctgtccgtccaggtggccgacctcactgcacagaccccactccagcccctccaccccttcttcatgcacagctgcctttctataatccgggcttgactcccttcttaccactgtattctggcctctcccatgcctcaggctctggtttgagatcgtgctggggaggaacatggccactaccccttatcccatcggccatgtgggaggtatgaccctggtgcctggcaggttctccctctgccctccactgggcccagtggctcagggacctggggaaaggagatggagcagctcttgggatcctttggggaaaaggaggccattctgggccccttggcaaacctcaccactcacagaggctcctggccttgatccctgcccctccaggtgtccagggtaaagtgtaactcagactgacctgtggggcacagggggcaccagctggccttgccctctctggtctgggctgtctaccttcctcactgtatctttgcccagacccacctgggccagtaggcctgtccccagccacacaccttagatgctggcatgccttactccaggtgcctgtgtttggccgaggcctgtgtgattcccggtctgcaccacatggcggggttggggggccgctggaggccacctgccaaggcgtgggatgggatggtcctgccggtttaggccgtgattctggaaaaccttggatgggccttcgtcctatgtcagccttccctttgatcctcaggccctacctgtagagacctccactcctagagccagtctcagggtctgggatttccctgcaggagctcagccaccactgtgccatggtgacacaggccaaggcagacattggccctcccttctcccagcccccagaggcctggccttgggttcgtcagcatgggccgaggacgttgcctgtagaatcctcctctgcctgggagtggctctgtgtggaccagtccctcactggcccattctttttttgacgcagccaatctgtgaccacgattcctcccacagatgcctcctgcttggattctgagtggtcagagatctgtaaagcatgactttcaaggatggttcttaggggactgtgtaaagtgttgggtcttcctccaggatgcctgcatgggaccccacccggagctggtgtggccattccccgaagtgccactggcccatggatgggggtgggtgctggtgcacctgggctgggtgtgggttctgtgtccttccaggatctgtgtcatttcccatgaggggccggggcaggtggctgggtgggggcacaggctggagtattcttagttctactggttctacactgtgaggtggcaatgggatttgctcagatgccacccaataaaatgcctgttactt

SEQ ID NO: 416981 - DNA, 1036 bp, Homo sapiens
atttcaggacttcgctttcgggttcccttgtcctgtgttgtgtaatgcccccgttatggcactagaaatattttttattagccgaagctaaatatagtgggactttggctgatcccgagctcggaggacagccggggtgatccgtttccccccgaggatcgaggtggtgcgctctggacggggttgtgcattctcgccgcgcccgggcggacgatccagcgaacagccccgcttctaacccgagatgctgctgccggcgcccgcgctccgccgcgccctgctgtcccgcccctggaccggggccggcctgcggtggaagcacacctcctccctgaaggtggccaacgagcccgtcttagccttcacgcagggcagccctgagcgagatgccctgcaaaaggccttgaaggacctgaagggccggatggaagccatcccatgcgtggtgggggatgaggaggtgtggacgtcggacgtgcagtaccaagtgtcgccttttaaccatggacataaggtggccaagttctgttatgcagacaagagcctgctcaacaaagccattgaggctgccctggctgcccggaaagagtgggacctgaagcctattgcagaccgggcccagatcttcctgaaggcggcagacatgctgagtgggccgcgcagggctgagatcctcgccaagaccatggtgggacagggtaagaccgtgatccaagcggagattgacgctgcagcggaactcatcgacttcttccggttcaatgccaagtatgcggtggagctggaggggcagcagcccatcagcgtgcccccgagcaccaacagcacggtgtaccggggtctggagggcttcgtggcggccatctcgccctttaacttcactgcaatcggcggcaacctggcgggggcaccggccctgatggcttcgagagggagttgtgactctgcctctttgccagatgacaaaactgagacacacagccgtgacttacttggcaagactgagtgactagtaaataaatgatggagcagagaa

SEQ ID NO: 416982 - DNA, 414 bp, Homo sapiens
gggggtttgttcttggtgggaaaccgtcataaatgtgacttgctagaatatattgatcaatatataaacactgaagcaactacccactctctgcttgcatggcaaagttgtcctcctcaaaagggctgagaaactgatttccacagccagctagtagagtgtggagaacttggcaaatcacgaatgaacaaccttctgtcatcgtttagaaacccctctcctagtacagtcaggctccacaagctacaaataccatccatgagatttggctgccatgcatgatgccacgttgcttgggctggtggcatattttggcttgtgcgatgccatgggcttatctaaaaaaggaaaaagtcactcttattttctccaggataaagctgaattaactgctgcatagtgactctgctgcat

SEQ ID NO: 416983 - DNA, 331 bp, Homo sapiens
agagccacaggcctctgcgtggctttctgcacacggtggtatgactgagatagtgactggttctctatacagaccccggggccctgggtttccttcagaagcagaaggagctgtgggaggtgaatggtgggaggtgaacaggcaggttctgtgggagacacagacacgtgggcagaactccagggagaggccagcaagggagaaccatgtgtggccctgctttttctcaaaccctgtgtggttcccggcttcacagttgatgggaaggtttggccccaaggatattttgacattgtgagtatagagcattttaataaaaattaagtgatga

SEQ ID NO: 416984 - DNA, 568 bp, Homo sapiens
cccggaacatgaccgacgaccaagtgtcttcctatgttgttaaggctggtcttgaactcctcgcgtcaagcaatcctcctgccttcacctcccaaagtgctgggatgacgggcatgagccaccatgcgtggcatatggcacaatctgtatgtatttagagagcccctgaaatcaactctgttcctaatcctctgagccaatgatgactttatagccttatcaaactgaagtaaaacttgaagggcaagttgagtgaactgctgagattttatgagctcatctaggctctcctgaagactgtgtcccaaagtagtacttctgtataactgatatgatatggcttaggaagaagaaattgtttttcttattcaagcttgccttgatgtcctgtgctgaaggtttcctgccatggagcagacagaagtgaccaggagcccagcagggggttcctatgttcctgaccacctcttcagtagccacagaaactacagagctgaacccaagactctggagctcttaatatactctcgtattttactttcacttaccctccataaatgtactggct

SEQ ID NO: 416985 - DNA, 592 bp, Homo sapiens
agaggggaaagatgcctgaaaatcatagactcgggttaatttcaacctgatcatgctctaaagcctagaatgccacagctcggtgaagacagaagtagctcagggtgttacccatccaccctcagagcagtggggggatcctgggtgagacaccactgcctgtactacactccaccctgcacttcctcatccacatatttctcacgttaagttcattctatccagactcagcttctccagaggcatttggtcatgatttctggaaacctttccagatgaactacagccctgactacttcagtgggtcccaaggcctcattccacccactggggacatagcaccatgtagcaactattggtttagatgtatactgcatcctaaagaagagggggcatcctttcagggtgtcatctcccagctggccacagctctatcaagatgacagctccaggatgcttgggtatttatttatttatttatttatttatttattgagacatagtctcgttctgtcgcccagcctggagtgcagtggcgtggtcttggctcactgcaagctctgcctcccgggttcatgccattctcctgcct

SEQ ID NO: 416986 - DNA, 333 bp, Homo sapiens
tttatgaatgctaagaaatgcaaataaccctgtttaaacagatgaggaatacaggaaatgatatacttactaaataaagtattacacagcaatccaaaattataaagatatcacattaacacatcttataactcagatggatactaatatcacaaagaaaaaattgctgtttattcagctatcctacatcaaatattttaagatttaccccaattttcaaagttaaaatgtgcaaaaatatgcatctcagggttgattaaatatggaaatgtatgaaaactggaaaatgctttcacataatagagtggaaaaaacagctgtaactgctataat

SEQ ID NO: 416987 - DNA, 483 bp, Homo sapiens
tgatccacctggctggggctccgaaagtgctggattacaggcatgagccagtacaccaggctgagcagcttttcatatgctagttggccattcatatatttttggagaatgtctattcaagtactttcccactttttaattgggtagtttgaggttttttgtcattgagctgtaggaattctttatatattctggatattaagcccttattagattgtagtagtccattcttgcattgctataaaggaatacctgaggctgggtaatttataatgaagagaggtttaattggctcacggttccacaggctgtacagagagcacggcagcatctgcttctggggaggcctcagagagctttactcatggtggcagacaaagcaggagcaggtgtcttacatggcaggggcaggaccaagagagtggggggaggtgctacacacttttaaacaaccagatctcatggtaactcactcactatcat

SEQ ID NO: 416988 - DNA, 599 bp, Homo sapiens
ccttcctaccagtgcggctcaatgtgctgtgcctgactaagatgtgaccagctcaggcagactgaactaagcacccctcccatcctgcgaccctcactggcctggccttgtgggggctccagaaaagaggctaggagaggccagagtctacctggatccagttatggtgcctcaggggctgcgtcagccaaggaaagggaagtgctgcttagtcctggacttttgggccagggtgagaaactagaggcttctccagtgttgccatatccccctaggttgtcttgatccatgaaccagaaccacagggcggtatcccaggccgtgtgctggccctgccccagcctagctgagtgtgctggcaaagttccccacaggactcagccttctcgtctgtccgatgggagcatccccatcaagtgcagtgtacagtgcagatatgtctccttctttaggaagaataaagtgccttctgagcaagcagctcagggtctgcatcagtgctccaagagtcagtgagcaggtgtgttgaagacttggggcttcagtgttctgctgttgggctgccaaggtcgatggtctctgctctccatctggtgtcc

SEQ ID NO: 416989 - DNA, 248 bp, Homo sapiens
gaagcgcgcagcggcgttctagaggatcccagcggggaacaatcacttcactattgtgaagtgatgttcagatttctagttttttttctagtttttaattttaacatcagaactgaaataaaaaattatggatacgtgttttgaattgcaaactattcctcaggaattccaattaaatttattttacttgaataggaatgatcataaaagtgatggttccccgctatacatggacggcgcccagcgag

SEQ ID NO: 416990 - DNA, 287 bp, Homo sapiens
cgcggggaaccatcacttagttccagtgattgttccagtgattgttccagtgattgttccagtgattgttcagcggggaacaatcacttcactattgtgaagtgatgttcagatttctagttttttttctagtttttaattttaacatcagaactgaaataaaaaattatggatacgtgttttgaattgcaaactattcctcaggaattccaattaaatttattttacttgaataggaatgatcataaaagtgatggttccccgcggggtaccgagctcgcaattcg

SEQ ID NO: 416991 - DNA, 399 bp, Homo sapiens
ttattcaaggacacacagtttaatacaggaagtgcctagtcattctgtgtctggccccagctgggaaaagttctccaattggcacaataactgagccagaaagatccttaaaaaggcagtgtactccaacttcctctgaagcttgtgtcctacctacagaattcccaaccactctgcttgaatgtctccaaagaggaaaaaatttagaagagaagacaaggaaaattaatcacaagataggcaatgaataggcaagtgaatgctgataatgccaagctgtgtttacagtccaaatttttgctgaagaccttcaactttgcactctccctgtgtggtatctcttgcccaagacagaacttcaaataaaatcacatagctgatgcaagaaaccgttaaaaa

SEQ ID NO: 416992 - DNA, 378 bp, Homo sapiens
atacttttgcttctggttctcctctggcagatcaagcaaatacaatccaagtgcgtgcagcccgttcccattcaaaatgtatccgtcataataacagcattctcgctgacgcattagactcaaggtggacttaatttggagatcacctatgaagacatctgtggaaggaatggcctcagcattgcagtcactttcgaagtcaagaggtattctagacagaccacacagcatgtatagaatgctgataatgccaagctgtgtttacagtccaaatttttgctgaagaccttcaactttgcactctccctgtgtggtatctcttgcccaagacagaacttcaaataaaatcacatagctgatgcaagaaaccgttaaaaa

SEQ ID NO: 416993 - DNA, 150 bp, Homo sapiens
gaagcgcgcagcggcgttctagaggatcccagcggggaacaatcacttcactattgtgaagtgatgttcagatttctagttttttttctagtttttaattttaacatcagaactgaaataaaaaattatggatacgtgttttgaattgca

SEQ ID NO: 416994 - DNA, 7298 bp, Homo sapiens
gtcacttttatttgggggtgtggacagctgctttcccaggggagtacttcttacagtgggatttcaagacaagatcggcctgaagaaaaattatatttgtatattttttaaaaagtgggaactttgaggctcagagacagagcagaagacagaacctggtcttctgattccctgtgttctgcttttttcattgttccactggacgctcatcagagggaagatctttttcctcaattgattccaacaatgtctcacccatcttggctgccacccaaaagcactggtgagcccctcggccatgtgcctgcacggatggagaccacccattcctttgggaaccccagcatttcagtgtctacacaacagccacccaaaaagtttgccccggtagttgctccaaaacctaagtacaacccatacaaacaacctggaggtgagggtgattttcttccacccccacctccacctctagatgattccagtgcccttccatctatctctggaaactttcctcctccaccacctcttgatgaagaggctttcaaagtacaggggaatcccggaggcaagacacttgaggagaggcgctccagcctggacgctgagattgactccttgaccagcatcttggctgaccttgagtgcagctccccctataagcctcggcctccacagagctccactggttcaacagcctctcctccagtttcgaccccagtcacaggacacaagagaatggtcatcccgaaccaaccccctctaacagcaaccaagaagtctacattgaaaccacagcctgcaccccaggctggacccatccctgtggctccaatcggaacactcaaaccccagcctcagccagtcccagcctcctacaccacggcctccacttcttcaaggcctacctttaatgtgcaggtgaagtcagcccagcccagccctcattatatggctgccccttcatcaggacaaatttatggctcagggccccagggctataacactcagccagttcctgtctctgggcagtgtccacctccttcaacacggggaggcatggattatgcctacattccaccaccaggacttcagccggagcctgggtatgggtatgcccccaaccagggacgctattatgaaggctactatgcagcagggccaggctatgggggcagaaatgactctgaccctacctatggtcaacaaggtcacccaaatacctggaaacgggaaccagggtacactcctcctggagcagggaaccagaaccctcctgggatgtatccagtcactggtcccaagaagacctatatcacagatcctgtttcagccccctgtgcgccaccattgcagccaaagggtggccattcagggcaactggggccttcgtcagttgccccttcattccgcccagaggatgagcttgagcacctgaccaaaaagatgctgtatgacatggaaaatccacctgctgacgaatactttggccgctgtgctcgctgtggagaaaacgtagttggggaaggtacaggatgcactgccatggatcaggtcttccacgtggattgttttacctgcatcatctgcaacaacaagctccgagggcagccattctatgctgtggaaaagaaagcatactgcgagccctgctacattaatactctggagcagtgcaatgtgtgttccaagcccatcatggagcggattctccgagccaccgggaaggcctatcatcctcactgtttcacctgcgtgatgtgccaccgcagcctggatgggatcccattcactgtggatgctggcgggctcattcactgcattgaggacttccacaagaaatttgccccgcgatgttctgtgtgcaaggagcctattatgccagccccgggccaggaggagactgtccgtattgtggctttggatcgagatttccatgttcactgctaccgatgcgaggattgcggtggtctcctgtctgaaggagataaccaaggctgctaccccttggatgggcacatcctctgcaagacctgcaactctgcccgcatcagggtgttgaccgccaaggcgagcactgacctttagattcagtcacctgttcagccggcactgagaagaacgaacacaagaaaaagataagaaatactagagtaaaggccatcaaactacgcgatagtctctgttcttcatctgctattaaccttgccttagaaacacataaattatgagatttttttttaaaagttgttaccaaatacacatttcacattgaatcatgtaggatcttgatgggcctttgttcccaaggacttccacatttttgcacagattatgctccatcccattcacttctgcattcctgtaacttttaatccctatgtttgtctcacttttcatctggttgaatggcttttcttagtgtggtatttgctgtcacatagtttttcctgggtgagtctgccaactcacaggtgcttttaggcttgaaatctccatcctatcatttccgttttgcctgtgactgtaaagagtagccattcttttcccatgtattgaagaggatattcttctcttgctttatactactcacgtccttggggagggaaatgcacaatttttttttgttaggctgtaaagaatttaagctgtaaattacataagttagaacaagcccaaatttaatttgcaaccatcagaattcagaatctatagtgaccagtgatcaaggctaattggaaaagagttatcggcccatagctaataagtagtgacagacaaccaagcttcaatatttttctaaagaaattacaggtgggatatgctagaaaaggcattttggggttatgtttaaaaaaacattattgtcccacaatattaccttaagatttttcttttccgcactacctgaacattgtaatacagacaaacttgatttcttctagaagataacattttcaatactgtcccacttctcatcttaaaaatattgtcatgtttattctaatatccaacacaactatcaaaattgcctttttctctagaggatgaaggctgtgaaaaaaccgttcaaattctcttctttttcttttttattaccaggtccattttgcctgacaattgcaaatcagagcatacaaaataaaactgtgcagttttgtttggtttactttcaaaagagtagaaagcttgaaaagattctgaaaccacagtttcattattctcataatccttctgcaactgaaattacatattgcaggagacattttcatatcatcaatgtgacatttacaccacactttcaaagacaatcactgaaacaaaaattgtctttatgagctaaaaatatgcagaatctctgcctagaatctttattcaaacttttattagccagtgaaacacttgcttgccaactgccaagccatacttattaagttcgaacatgtttcacttaaggagagacacctagcttagtcatggcaagttgccattttgtaaactaaggattttggactgagatttcttaaatctttcttcaaatctcccacaagtatatacttttaaattatggagtattttaagtctacaaaaaggtataaataataatataatgaattcctatatacctaatacccagtttaagacaccaaatataacaagtataattacatcctccaatgtaccgtttccttattccacagatatctttttcactattgtgaagtgatgttcagatttctagttttttttctagtttttaattttaacatcagaactgaaataaaaaattatggatacgtgttttgaattgcaaactattcctcaggaattccaattaaatttattttacttgaataggaatgatcataaaagtgattctttttttgtgactagaaattcttaagccgatggtcactatagctcatccttaatgtatggctcatttgcttttgtcactaaacggttttgtgttagaaccaccaaaattatagcttttaagagcttcctttgaccactgtctttttcttaccctacttctcttatctttgatcgtatatttctcataatgtgaaatatgatgagattcacttaggggcagcatgttagttttgggaggcaatgtcaactgtgtctctgaattcctgtcttccaaattgaagccagaccatgctgatgacctcaagtagcactgactatttgacaatagggctgataatgtaatcggcttgaattttgacttagtaactttttatgtaatactttcggagaaattctctttaggacaaagcagagagtccaatttattgagggatagattgtatctcttaaagtggtcatattattattaattttgccaaaagaagaagaatttattgaatatttatactataaaatgcagtaacattctacttgcttattacatttaaatccttgtgtaactgaatgtttacatgtcaagaggaaaagctgtaagaaaatgctgtcacagacccatccctgtggcatcgtcagcagaatactgcttgcttacaatctttattatgcattcttataacataacctcagagtatctttaccaaaggtttttaaagtaaatctctttttaagatagacttattcttttataataatgaatgtgcactcatacatatgtagaaacatttagatttagagttttttttttctttcacaaggtataataaggaaaggatcctacaatattttattctagggtttcttaaatatatgatttatattactgtcttttctattaatcatttgatttaaacaatgccaagtcactcttttttagttgcatgaaattttgcctgcaacagagagaaaaagattgtattactttaatgattataatcatactgtctgctgatataatatcataattgttgtggtttaaatacataaatagtagaaaaatcagagtctataacagaaagtttgtaaaaatatactgattttgaaaagtatcaggaatataaatatttggtaattctgtgtaacaagagagacatggaaaaggaaaaaaatccactatatcatgggctctgcagaacatatcaaaataggatttcttaaatttttcaacccccagaccatactgactcaacatggagtctcactggccaagaaaattgcctttaaaactcgaaaataaggccaggtgtggtgactcacacttgtaatcccagcaatttgggaggctgagacaggaggattgcctgaggccaggagtttgacaccagcctgggcaacatagtgagaccttgtctctacaaaaaataaaataaaataaaaaccaaattagccagacatggtggcatgcgcttgtttaaaaaaacaaataaataaataatcgactcaaaaataagtcatgtgtcccagcataaggcatcaggttgttagatgctggcatctctgcagctcaaagatgtgggttctttttcttgtcattaacacattgttatttctgtaggagcaacttctctgatcaaaattacttttctgggtatgtgctgattaagggggtggacttatcaacactataattgttccctatgaaagattccacagagatgtttatggtgaggtttaaaggatatgaaactctacatttaaacaagtattttatatttgggtacagaggaagaaagagagggctttttccatggggctatagtagagagttagtggaatatagacaggactctgaaaacacaacttccagccatttttttagttagtaaaaatcctattaatgtgaaccagccaggaataacagtgttatttctattggatatggtttgggcttctcttgtcaaatctgtgtcggctgccccctgatccttccattatcaagttttgaagggtgttggggaaattatggcagctgctagggagatcagggaaacactgatgtaacctcaaagcctctcaccattcctcttggcttggaaaggctttattttttcatatacatttctagaaatattgctattctaccttagtatttcacatttgtagttcaaacaagcgattgtccatctgttgcctagagctatagtacatgtgtgttatgaatgaaatatgacagcatgttccatacccctgctttagccatctgtgggaaaccagcaaactgaaaaagacacctctgcaaaatgtgcctcaagtccatttcttgggatcgctcgtttggtgcactctcgtgggagacaatcagagaacaacatatacttgtgccttattttcaaagaatctatttacactactatgaatattccactgaagagtcaatgatgtaaatgataaccaccaaatctcaaaaatatactcaccaaaaagtaaaaaagtaaaaaaaaaaaaaaaagaaagaaagaaaagaaagagagagaagtcaacttttcatcttaatatattctagtagtatttattttttccttgtcttggaagtatctcataggtctttaaatgagtaaaacatttttatgccagaaggtgatataatggatgttagtgttttttatttgattttacagtagttttagtcagataatgaggacagagacttcaacttgattctttaccaccattcagcatattttttaattgtcttcattgtatttgcttaatagtggtccagacaagttcaaaacttgttctcagtgaggcattaatatggtgcaaccatgaatatttcaggccaagttattcacttgacagataactagaatgaaacttttctcatgaggctgttgtttggttagcatagccttatttcaaaccttaaaaagttacctgactgaagctactatgacttggtaaggattcttcctctcttgctttcttcctcccttcctttcttcctcttccttcctcctcttcttattttctttcctactttccatcctacctattagtgttgctgtacttggattttttgtaaattaaatcaatgcattatgattttagggaattatgattatattcataaggggaaggctaccagaaaatatatgtggcatccataaaatcttcttttataggggcatattttttaggttgtatttattcgtaaagtgaaatgagataatagagtctttctgtaacatgttaatgaattttcatcagggactgaggtcatagattcttggaaaattcatttgtgactgatctagttttctcagctgtatgcaaagtaatctttcaaagactaggttaagattttttttttaagtctgaagcaatgtaaccccaaatctcaaaaatatactcaccaaaaagta

SEQ ID NO: 416995 - DNA, 6359 bp, Homo sapiens
gtcacttttatttgggggtgtggacagctgctttcccaggggagtacttcttacagtgggatttcaagacaagatcggcctgaagaaaaattatatttgtatattttttaaaaagtgggaactttgaggctcagagacagagcagaagacagaacctggtcttctgattccctgtgttctgcttttttcattgttccactggacgctcatcagagggaagatctttttcctcaattgattccaacaatgtctcacccatcttggctgccacccaaaagcactggtgagcccctcggccatgtgcctgcacggatggagaccacccattcctttgggaaccccagcatttcagtgtctacacaacagccacccaaaaagtttgccccggtagttgctccaaaacctaagtacaacccatacaaacaacctggaggtgagggtgattttcttccacccccacctccacctctagatgattccagtgcccttccatctatctctggaaactttcctcctccaccacctcttgatgaagaggctttcaaagtacaggggaatcccggaggcaagacacttgaggagaggcgctccagcctggacgctgagattgactccttgaccagcatcttggctgaccttgagtgcagctccccctataagcctcggcctccacagagctccactggttcaacagcctctcctccagtttcgaccccagtcacaggacacaagagaatggtcatcccgaaccaaccccctctaacagcaaccaagaagtctacattgaaaccacagcctgcaccccaggctggacccatccctgtggctccaatcggaacactcaaaccccagcctcagccagtcccagcctcctacaccacggcctccacttcttcaaggcctacctttaatgtgcaggtgaagtcagcccagcccagccctcattatatggctgccccttcatcaggacaaatttatggctcagggccccagggctataacactcagccagttcctgtctctgggcagtgtccacctccttcaacacggggaggcatggattatgcctacattccaccaccaggacttcagccggagcctgggtatgggtatgcccccaaccagggacgctattatgaaggctactatgcagcagggccaggctatgggggcagaaatgactctgaccctacctatggtcaacaaggtcacccaaatacctggaaacgggaaccagggtacactcctcctggagcagggaaccagaaccctcctgggatgtatccagtcactggtcccaagaagacctatatcacagatcctgtttcagccccctgtgcgccaccattgcagccaaagggtggccattcagggcaactggggccttcgtcagttgccccttcattccgcccagaggatgagcttgagcacctgaccaaaaagatgctgtatgacatggaaaatccacctgctgacgaatactttggccgctgtgctcgctgtggagaaaacgtagttggggaaggtacaggatgcactgccatggatcaggtcttccacgtggattgttttacctgcatcatctgcaacaacaagctccgagggcagccattctatgctgtggaaaagaaagcatactgcgagccctgctacattaatactctggagcagtgcaatgtgtgttccaagcccatcatggagcggattctccgagccaccgggaaggcctatcatcctcactgtttcacctgcgtgatgtgccaccgcagcctggatgggatcccattcactgtggatgctggcgggctcattcactgcattgaggacttccacaagaaatttgccccgcgatgttctgtgtgcaaggagcctattatgccagccccgggccaggaggagactgtccgtattgtggctttggatcgagatttccatgttcactgctaccgatgcgaggattgcggtggtctcctgtctgaaggagataaccaaggctgctaccccttggatgggcacatcctctgcaagacctgcaactctgcccgcatcagggtgttgaccgccaaggcgagcactgacctttagattcagtcacctgttcagccggcactgagaagaacgaacacaagaaaaagataagaaatactagagtaaaggccatcaaactacgcgatagtctctgttcttcatctgctattaaccttgccttagaaacacataaattatgagatttttttttaaaagttgttaccaaatacacatttcacattgaatcatgtaggatcttgatgggcctttgttcccaaggacttccacatttttgcacagattatgctccatcccattcacttctgcattcctgtaacttttaatccctatgtttgtctcacttttcatctggttgaatggcttttcttagtgtggtatttgctgtcacatagtttttcctgggtgagtctgccaactcacaggtgcttttaggcttgaaatctccatcctatcatttccgttttgcctgtgactgtaaagagtagccattcttttcccatgtattgaagaggatattcttctcttgctttatactactcacgtccttggggagggaaatgcacaatttttttttgttaggctgtaaagaatttaagctgtaaattacataagttagaacaagcccaaatttaatttgcaaccatcagaattcagaatctatagtgaccagtgatcaaggctaattggaaaagagttatcggcccatagctaataagtagtgacagacaaccaagcttcaatatttttctaaagaaattacaggtgggatatgctagaaaaggcattttggggttatgtttaaaaaaacattattgtcccacaatattaccttaagatttttcttttccgcactacctgaacattgtaatacagacaaacttgatttcttctagaagataacattttcaatactgtcccacttctcatcttaaaaatattgtcatgtttattctaatatccaacacaactatcaaaattgcctttttctctagaggatgaaggctgtgaaaaaaccgttcaaattctcttctttttcttttttattaccaggtccattttgcctgacaattgcaaatcagagcatacaaaataaaactgtgcagttttgtttggtttactttcaaaagagtagaaagcttgaaaagattctgaaaccacagtttcattattctcataatccttctgcaactgaaattacatattgcaggagacattttcatatcatcaatgtgacatttacaccacactttcaaagacaatcactgaaacaaaaattgtctttatgagctaaaaatatgcagaatctctgcctagaatctttattcaaacttttattagccagtgaaacacttgcttgccaactgccaagccatacttattaagttcgaacatgtttcacttaaggagagacacctagcttagtcatggcaagttgccattttgtaaactaaggattttggactgagatttcttaaatctttcttcaaatctcccacaagtatatacttttaaattatggagtattttaagtctacaaaaaggtataaataataatataatgaattcctatatacctaatacccagtttaagacaccaaatataacaagtataattacatcctccaatgtaccgtttccttattccacagatatctttttcactattgtgaagtgatgttcagatttctagttttttttctagtttttaattttaacatcagaactgaaataaaaaattatggatacgtgttttgaattgcaaactattcctcaggaattccaattaaatttattttacttgaataggaatgatcataaaagtgattctttttttgtgactagaaattcttaagccgatggtcactatagctcatccttaatgtatggctcatttgcttttgtcactaaacggttttgtgttagaaccaccaaaattatagcttttaagagcttcctttgaccactgtctttttcttaccctacttctcttatctttgatcgtatatttctcataatgtgaaatatgatgagattcacttaggggcagcatgttagttttgggaggcaatgtcaactgtgtctctgaattcctgtcttccaaattgaagccagaccatgctgatgacctcaagtagcactgactatttgacaatagggctgataatgtaatcggcttgaattttgacttagtaactttttatgtaatactttcggagaaattctctttaggacaaagcagagagtccaatttattgagggatagattgtatctcttaaagtggtcatattattattaattttgccaaaagaagaagaatttattgaatatttatactataaaatgcagtaacattctacttgcttattacatttaaatccttgtgtaactgaatgtttacatgtcaagaggaaaagctgtaagaaaatgctgtcacagacccatccctgtggcatcgtcagcagaatactgcttgcttacaatctttattatgcattcttataacataacctcagagtatctttaccaaaggtttttaaagtaaatctctttttaagatagacttattcttttataataatgaatgtgcactcatacatatgtagaaacatttagatttagagttttttttttctttcacaaggtataataaggaaaggatcctacaatattttattctagggtttcttaaatatatgatttatattactgtcttttctattaatcatttgatttaaacaatgccaagtcactcttttttagttgcatgaaattttgcctgcaacagagagaaaaagattgtattactttaatgattataatcatactgtctgctgatataatatcataattgttgtggtttaaatacataaatagtagaaaaatcagagtctataacagaaagtttgtaaaaatatactgattttgaaaagtatcaggaatataaatatttggtaattctgtgtaacaagagagacatggaaaaggaaaaaaatccactatatcatgggctctgcagaacatatcaaaataggatttcttaaatttttcaacccccagaccatactgactcaacatggagtctcactggccaagaaaattgcctttaaaactcgaaaataaggccaggtgtggtgactcacacttgtaatcccagcaatttgggaggctgagacaggaggattgcctgaggccaggagtttgacaccagcctgggcaacatagtgagaccttgtctctacaaaaaataaaataaaataaaaaccaaattagccagacatggtggcatgcgcttgtttaaaaaaacaaataaataaataatcgactcaaaaataagtcatgtgtcccagcataaggcatcaggttgttagatgctggcatctctgcagctcaaagatgtgggttctttttcttgtcattaacacattgttatttctgtaggagcaacttctctgatcaaaattacttttctgggtatgtgctgattaagggggtggacttatcaacactataattgttccctatgaaagattccacagagatgtttatggtgaggtttaaaggatatgaaactctacatttaaacaagtattttatatttgggtacagaggaagaaagagagggctttttccatggggctatagtagagagttagtggaatatagacaggactctgaaaacacaacttccagccatttttttagttagtaaaaatcctattaatgtgaaccagccaggaataacagtgttatttctattggatatggtttgggcttctcttgtcaaatctgtgtcggctgccccctgatccttccattatcaagttttgaagggtgttggggaaattatggcagctgctagggagatcagggaaacactgatgtaacctcaaagcctctcaccattcctcttggcttggaaaggctttattttttcatatacatttctagaaatattgctattctaccttagtatttcacatttgtagttcaaacaagcgattgtccatctgttgcctagagctatagtacatgtgtgttatgaatgaaatatgacagcatgttccatacccctgctttagccatctgtgggaaaccagcaaactgaaaaagacacctctgcaaaatgtgcctcaagtccatttcttgggatcgctcgtttggtgcactctcgtgggagacaatcagagaacaacatatacttgtgccttattttcaaagaatctatttacactactatgaatattccactgaagagtcaatgatgtaaatgataaccaccaaatctcaaaaatatactcaccaaaaagta

SEQ ID NO: 416996 - DNA, 6752 bp, Homo sapiens
agcgggtacaggagtttttcaaggctgaccacagtctaggcagaagaaattgcaattgtgaaaggaagatttgcgtgaaagaatggtgtttttggctgagtgaggaatttgaagtatctggaaaatggaagctccactggttcaacagcctctcctccagtttcgaccccagtcacaggacacaagagaatggtcatcccgaaccaaccccctctaacagcaaccaagaagtctacattgaaaccacagcctgcaccccaggctggacccatccctgtggctccaatcggaacactcaaaccccagcctcagccagtcccagcctcctacaccacggcctccacttcttcaaggcctacctttaatgtgcaggtgaagtcagcccagcccagccctcattatatggctgccccttcatcaggacaaatttatggctcagggccccagggctataacactcagccagttcctgtctctgggcagtgtccacctccttcaacacggggaggcatggattatgcctacattccaccaccaggacttcagccggagcctgggtatgggtatgcccccaaccagggacgctattatgaaggctactatgcagcagggccaggctatgggggcagaaatgactctgaccctacctatggtcaacaaggtcacccaaatacctggaaacgggaaccagggtacactcctcctggagcagggaaccagaaccctcctgggatgtatccagtcactggtcccaagaagacctatatcacagatcctgtttcagccccctgtgcgccaccattgcagccaaagggtggccattcagggcaactggggccttcgtcagttgccccttcattccgcccagaggatgagcttgagcacctgaccaaaaagatgctgtatgacatggaaaatccacctgctgacgaatactttggccgctgtgctcgctgtggagaaaacgtagttggggaaggtacaggatgcactgccatggatcaggtcttccacgtggattgttttacctgcatcatctgcaacaacaagctccgagggcagccattctatgctgtggaaaagaaagcatactgcgagccctgctacattaatactctggagcagtgcaatgtgtgttccaagcccatcatggagcggattctccgagccaccgggaaggcctatcatcctcactgtttcacctgcgtgatgtgccaccgcagcctggatgggatcccattcactgtggatgctggcgggctcattcactgcattgaggacttccacaagaaatttgccccgcgatgttctgtgtgcaaggagcctattatgccagccccgggccaggaggagactgtccgtattgtggctttggatcgagatttccatgttcactgctaccgatgcgaggattgcggtggtctcctgtctgaaggagataaccaaggctgctaccccttggatgggcacatcctctgcaagacctgcaactctgcccgcatcagggtgttgaccgccaaggcgagcactgacctttagattcagtcacctgttcagccggcactgagaagaacgaacacaagaaaaagataagaaatactagagtaaaggccatcaaactacgcgatagtctctgttcttcatctgctattaaccttgccttagaaacacataaattatgagatttttttttaaaagttgttaccaaatacacatttcacattgaatcatgtaggatcttgatgggcctttgttcccaaggacttccacatttttgcacagattatgctccatcccattcacttctgcattcctgtaacttttaatccctatgtttgtctcacttttcatctggttgaatggcttttcttagtgtggtatttgctgtcacatagtttttcctgggtgagtctgccaactcacaggtgcttttaggcttgaaatctccatcctatcatttccgttttgcctgtgactgtaaagagtagccattcttttcccatgtattgaagaggatattcttctcttgctttatactactcacgtccttggggagggaaatgcacaatttttttttgttaggctgtaaagaatttaagctgtaaattacataagttagaacaagcccaaatttaatttgcaaccatcagaattcagaatctatagtgaccagtgatcaaggctaattggaaaagagttatcggcccatagctaataagtagtgacagacaaccaagcttcaatatttttctaaagaaattacaggtgggatatgctagaaaaggcattttggggttatgtttaaaaaaacattattgtcccacaatattaccttaagatttttcttttccgcactacctgaacattgtaatacagacaaacttgatttcttctagaagataacattttcaatactgtcccacttctcatcttaaaaatattgtcatgtttattctaatatccaacacaactatcaaaattgcctttttctctagaggatgaaggctgtgaaaaaaccgttcaaattctcttctttttcttttttattaccaggtccattttgcctgacaattgcaaatcagagcatacaaaataaaactgtgcagttttgtttggtttactttcaaaagagtagaaagcttgaaaagattctgaaaccacagtttcattattctcataatccttctgcaactgaaattacatattgcaggagacattttcatatcatcaatgtgacatttacaccacactttcaaagacaatcactgaaacaaaaattgtctttatgagctaaaaatatgcagaatctctgcctagaatctttattcaaacttttattagccagtgaaacacttgcttgccaactgccaagccatacttattaagttcgaacatgtttcacttaaggagagacacctagcttagtcatggcaagttgccattttgtaaactaaggattttggactgagatttcttaaatctttcttcaaatctcccacaagtatatacttttaaattatggagtattttaagtctacaaaaaggtataaataataatataatgaattcctatatacctaatacccagtttaagacaccaaatataacaagtataattacatcctccaatgtaccgtttccttattccacagatatctttttcactattgtgaagtgatgttcagatttctagttttttttctagtttttaattttaacatcagaactgaaataaaaaattatggatacgtgttttgaattgcaaactattcctcaggaattccaattaaatttattttacttgaataggaatgatcataaaagtgattctttttttgtgactagaaattcttaagccgatggtcactatagctcatccttaatgtatggctcatttgcttttgtcactaaacggttttgtgttagaaccaccaaaattatagcttttaagagcttcctttgaccactgtctttttcttaccctacttctcttatctttgatcgtatatttctcataatgtgaaatatgatgagattcacttaggggcagcatgttagttttgggaggcaatgtcaactgtgtctctgaattcctgtcttccaaattgaagccagaccatgctgatgacctcaagtagcactgactatttgacaatagggctgataatgtaatcggcttgaattttgacttagtaactttttatgtaatactttcggagaaattctctttaggacaaagcagagagtccaatttattgagggatagattgtatctcttaaagtggtcatattattattaattttgccaaaagaagaagaatttattgaatatttatactataaaatgcagtaacattctacttgcttattacatttaaatccttgtgtaactgaatgtttacatgtcaagaggaaaagctgtaagaaaatgctgtcacagacccatccctgtggcatcgtcagcagaatactgcttgcttacaatctttattatgcattcttataacataacctcagagtatctttaccaaaggtttttaaagtaaatctctttttaagatagacttattcttttataataatgaatgtgcactcatacatatgtagaaacatttagatttagagttttttttttctttcacaaggtataataaggaaaggatcctacaatattttattctagggtttcttaaatatatgatttatattactgtcttttctattaatcatttgatttaaacaatgccaagtcactcttttttagttgcatgaaattttgcctgcaacagagagaaaaagattgtattactttaatgattataatcatactgtctgctgatataatatcataattgttgtggtttaaatacataaatagtagaaaaatcagagtctataacagaaagtttgtaaaaatatactgattttgaaaagtatcaggaatataaatatttggtaattctgtgtaacaagagagacatggaaaaggaaaaaaatccactatatcatgggctctgcagaacatatcaaaataggatttcttaaatttttcaacccccagaccatactgactcaacatggagtctcactggccaagaaaattgcctttaaaactcgaaaataaggccaggtgtggtgactcacacttgtaatcccagcaatttgggaggctgagacaggaggattgcctgaggccaggagtttgacaccagcctgggcaacatagtgagaccttgtctctacaaaaaataaaataaaataaaaaccaaattagccagacatggtggcatgcgcttgtttaaaaaaacaaataaataaataatcgactcaaaaataagtcatgtgtcccagcataaggcatcaggttgttagatgctggcatctctgcagctcaaagatgtgggttctttttcttgtcattaacacattgttatttctgtaggagcaacttctctgatcaaaattacttttctgggtatgtgctgattaagggggtggacttatcaacactataattgttccctatgaaagattccacagagatgtttatggtgaggtttaaaggatatgaaactctacatttaaacaagtattttatatttgggtacagaggaagaaagagagggctttttccatggggctatagtagagagttagtggaatatagacaggactctgaaaacacaacttccagccatttttttagttagtaaaaatcctattaatgtgaaccagccaggaataacagtgttatttctattggatatggtttgggcttctcttgtcaaatctgtgtcggctgccccctgatccttccattatcaagttttgaagggtgttggggaaattatggcagctgctagggagatcagggaaacactgatgtaacctcaaagcctctcaccattcctcttggcttggaaaggctttattttttcatatacatttctagaaatattgctattctaccttagtatttcacatttgtagttcaaacaagcgattgtccatctgttgcctagagctatagtacatgtgtgttatgaatgaaatatgacagcatgttccatacccctgctttagccatctgtgggaaaccagcaaactgaaaaagacacctctgcaaaatgtgcctcaagtccatttcttgggatcgctcgtttggtgcactctcgtgggagacaatcagagaacaacatatacttgtgccttattttcaaagaatctatttacactactatgaatattccactgaagagtcaatgatgtaaatgataaccaccaaatctcaaaaatatactcaccaaaaagtaaaaaagtaaaaaaaaaaaaaaaagaaagaaagaaaagaaagagagagaagtcaacttttcatcttaatatattctagtagtatttattttttccttgtcttggaagtatctcataggtctttaaatgagtaaaacatttttatgccagaaggtgatataatggatgttagtgttttttatttgattttacagtagttttagtcagataatgaggacagagacttcaacttgattctttaccaccattcagcatattttttaattgtcttcattgtatttgcttaatagtggtccagacaagttcaaaacttgttctcagtgaggcattaatatggtgcaaccatgaatatttcaggccaagttattcacttgacagataactagaatgaaacttttctcatgaggctgttgtttggttagcatagccttatttcaaaccttaaaaagttacctgactgaagctactatgacttggtaaggattcttcctctcttgctttcttcctcccttcctttcttcctcttccttcctcctcttcttattttctttcctactttccatcctacctattagtgttgctgtacttggattttttgtaaattaaatcaatgcattatgattttagggaattatgattatattcataaggggaaggctaccagaaaatatatgtggcatccataaaatcttcttttataggggcatattttttaggttgtatttattcgtaaagtgaaatgagataatagagtctttctgtaacatgttaatgaattttcatcagggactgaggtcatagattcttggaaaattcatttgtgactgatctagttttctcagctgtatgcaaagtaatctttcaaagactaggttaagattttttttttaagtctgaagcaatgtaaccccaaatctcaaaaatatactcaccaaaaagta

SEQ ID NO: 416997 - DNA, 7363 bp, Homo sapiens
cacgaggggtatttgctttcatttctaatgaaatttcaggcctctagggtaggatatcaaaattggtagatcatttgcaatttattttatcccaaacacctcactttacagtcagagaaactgaggcccagagaagtaaaatgagttgctcaaggtctcagagagcaagaaatagagatgggacttgagcacctagatctctggtattgctgtcctgtagttcatggagctggcagatggatacatctgtgacctgggatgatggagagactgctggacccttcagaggatctcatctcaagattccaacaatgtctcacccatcttggctgccacccaaaagcactggtgagcccctcggccatgtgcctgcacggatggagaccacccattcctttgggaaccccagcatttcagtgtctacacaacagccacccaaaaagtttgccccggtagttgctccaaaacctaagtacaacccatacaaacaacctggaggtgagggtgattttcttccacccccacctccacctctagatgattccagtgcccttccatctatctctggaaactttcctcctccaccacctcttgatgaagaggctttcaaagtacaggggaatcccggaggcaagacacttgaggagaggcgctccagcctggacgctgagattgactccttgaccagcatcttggctgaccttgagtgcagctccccctataagcctcggcctccacagagctccactggttcaacagcctctcctccagtttcgaccccagtcacaggacacaagagaatggtcatcccgaaccaaccccctctaacagcaaccaagaagtctacattgaaaccacagcctgcaccccaggctggacccatccctgtggctccaatcggaacactcaaaccccagcctcagccagtcccagcctcctacaccacggcctccacttcttcaaggcctacctttaatgtgcaggtgaagtcagcccagcccagccctcattatatggctgccccttcatcaggacaaatttatggctcagggccccagggctataacactcagccagttcctgtctctgggcagtgtccacctccttcaacacggggaggcatggattatgcctacattccaccaccaggacttcagccggagcctgggtatgggtatgcccccaaccagggacgctattatgaaggctactatgcagcagggccaggctatgggggcagaaatgactctgaccctacctatggtcaacaaggtcacccaaatacctggaaacgggaaccagggtacactcctcctggagcagggaaccagaaccctcctgggatgtatccagtcactggtcccaagaagacctatatcacagatcctgtttcagccccctgtgcgccaccattgcagccaaagggtggccattcagggcaactggggccttcgtcagttgccccttcattccgcccagaggatgagcttgagcacctgaccaaaaagatgctgtatgacatggaaaatccacctgctgacgaatactttggccgctgtgctcgctgtggagaaaacgtagttggggaaggtacaggatgcactgccatggatcaggtcttccacgtggattgttttacctgcatcatctgcaacaacaagctccgagggcagccattctatgctgtggaaaagaaagcatactgcgagccctgctacattaatactctggagcagtgcaatgtgtgttccaagcccatcatggagcggattctccgagccaccgggaaggcctatcatcctcactgtttcacctgcgtgatgtgccaccgcagcctggatgggatcccattcactgtggatgctggcgggctcattcactgcattgaggacttccacaagaaatttgccccgcgatgttctgtgtgcaaggagcctattatgccagccccgggccaggaggagactgtccgtattgtggctttggatcgagatttccatgttcactgctaccgatgcgaggattgcggtggtctcctgtctgaaggagataaccaaggctgctaccccttggatgggcacatcctctgcaagacctgcaactctgcccgcatcagggtgttgaccgccaaggcgagcactgacctttagattcagtcacctgttcagccggcactgagaagaacgaacacaagaaaaagataagaaatactagagtaaaggccatcaaactacgcgatagtctctgttcttcatctgctattaaccttgccttagaaacacataaattatgagatttttttttaaaagttgttaccaaatacacatttcacattgaatcatgtaggatcttgatgggcctttgttcccaaggacttccacatttttgcacagattatgctccatcccattcacttctgcattcctgtaacttttaatccctatgtttgtctcacttttcatctggttgaatggcttttcttagtgtggtatttgctgtcacatagtttttcctgggtgagtctgccaactcacaggtgcttttaggcttgaaatctccatcctatcatttccgttttgcctgtgactgtaaagagtagccattcttttcccatgtattgaagaggatattcttctcttgctttatactactcacgtccttggggagggaaatgcacaatttttttttgttaggctgtaaagaatttaagctgtaaattacataagttagaacaagcccaaatttaatttgcaaccatcagaattcagaatctatagtgaccagtgatcaaggctaattggaaaagagttatcggcccatagctaataagtagtgacagacaaccaagcttcaatatttttctaaagaaattacaggtgggatatgctagaaaaggcattttggggttatgtttaaaaaaacattattgtcccacaatattaccttaagatttttcttttccgcactacctgaacattgtaatacagacaaacttgatttcttctagaagataacattttcaatactgtcccacttctcatcttaaaaatattgtcatgtttattctaatatccaacacaactatcaaaattgcctttttctctagaggatgaaggctgtgaaaaaaccgttcaaattctcttctttttcttttttattaccaggtccattttgcctgacaattgcaaatcagagcatacaaaataaaactgtgcagttttgtttggtttactttcaaaagagtagaaagcttgaaaagattctgaaaccacagtttcattattctcataatccttctgcaactgaaattacatattgcaggagacattttcatatcatcaatgtgacatttacaccacactttcaaagacaatcactgaaacaaaaattgtctttatgagctaaaaatatgcagaatctctgcctagaatctttattcaaacttttattagccagtgaaacacttgcttgccaactgccaagccatacttattaagttcgaacatgtttcacttaaggagagacacctagcttagtcatggcaagttgccattttgtaaactaaggattttggactgagatttcttaaatctttcttcaaatctcccacaagtatatacttttaaattatggagtattttaagtctacaaaaaggtataaataataatataatgaattcctatatacctaatacccagtttaagacaccaaatataacaagtataattacatcctccaatgtaccgtttccttattccacagatatctttttcactattgtgaagtgatgttcagatttctagttttttttctagtttttaattttaacatcagaactgaaataaaaaattatggatacgtgttttgaattgcaaactattcctcaggaattccaattaaatttattttacttgaataggaatgatcataaaagtgattctttttttgtgactagaaattcttaagccgatggtcactatagctcatccttaatgtatggctcatttgcttttgtcactaaacggttttgtgttagaaccaccaaaattatagcttttaagagcttcctttgaccactgtctttttcttaccctacttctcttatctttgatcgtatatttctcataatgtgaaatatgatgagattcacttaggggcagcatgttagttttgggaggcaatgtcaactgtgtctctgaattcctgtcttccaaattgaagccagaccatgctgatgacctcaagtagcactgactatttgacaatagggctgataatgtaatcggcttgaattttgacttagtaactttttatgtaatactttcggagaaattctctttaggacaaagcagagagtccaatttattgagggatagattgtatctcttaaagtggtcatattattattaattttgccaaaagaagaagaatttattgaatatttatactataaaatgcagtaacattctacttgcttattacatttaaatccttgtgtaactgaatgtttacatgtcaagaggaaaagctgtaagaaaatgctgtcacagacccatccctgtggcatcgtcagcagaatactgcttgcttacaatctttattatgcattcttataacataacctcagagtatctttaccaaaggtttttaaagtaaatctctttttaagatagacttattcttttataataatgaatgtgcactcatacatatgtagaaacatttagatttagagttttttttttctttcacaaggtataataaggaaaggatcctacaatattttattctagggtttcttaaatatatgatttatattactgtcttttctattaatcatttgatttaaacaatgccaagtcactcttttttagttgcatgaaattttgcctgcaacagagagaaaaagattgtattactttaatgattataatcatactgtctgctgatataatatcataattgttgtggtttaaatacataaatagtagaaaaatcagagtctataacagaaagtttgtaaaaatatactgattttgaaaagtatcaggaatataaatatttggtaattctgtgtaacaagagagacatggaaaaggaaaaaaatccactatatcatgggctctgcagaacatatcaaaataggatttcttaaatttttcaacccccagaccatactgactcaacatggagtctcactggccaagaaaattgcctttaaaactcgaaaataaggccaggtgtggtgactcacacttgtaatcccagcaatttgggaggctgagacaggaggattgcctgaggccaggagtttgacaccagcctgggcaacatagtgagaccttgtctctacaaaaaataaaataaaataaaaaccaaattagccagacatggtggcatgcgcttgtttaaaaaaacaaataaataaataatcgactcaaaaataagtcatgtgtcccagcataaggcatcaggttgttagatgctggcatctctgcagctcaaagatgtgggttctttttcttgtcattaacacattgttatttctgtaggagcaacttctctgatcaaaattacttttctgggtatgtgctgattaagggggtggacttatcaacactataattgttccctatgaaagattccacagagatgtttatggtgaggtttaaaggatatgaaactctacatttaaacaagtattttatatttgggtacagaggaagaaagagagggctttttccatggggctatagtagagagttagtggaatatagacaggactctgaaaacacaacttccagccatttttttagttagtaaaaatcctattaatgtgaaccagccaggaataacagtgttatttctattggatatggtttgggcttctcttgtcaaatctgtgtcggctgccccctgatccttccattatcaagttttgaagggtgttggggaaattatggcagctgctagggagatcagggaaacactgatgtaacctcaaagcctctcaccattcctcttggcttggaaaggctttattttttcatatacatttctagaaatattgctattctaccttagtatttcacatttgtagttcaaacaagcgattgtccatctgttgcctagagctatagtacatgtgtgttatgaatgaaatatgacagcatgttccatacccctgctttagccatctgtgggaaaccagcaaactgaaaaagacacctctgcaaaatgtgcctcaagtccatttcttgggatcgctcgtttggtgcactctcgtgggagacaatcagagaacaacatatacttgtgccttattttcaaagaatctatttacactactatgaatattccactgaagagtcaatgatgtaaatgataaccaccaaatctcaaaaatatactcaccaaaaagtaaaaaagtaaaaaaaaaaaaaaaagaaagaaagaaaagaaagagagagaagtcaacttttcatcttaatatattctagtagtatttattttttccttgtcttggaagtatctcataggtctttaaatgagtaaaacatttttatgccagaaggtgatataatggatgttagtgttttttatttgattttacagtagttttagtcagataatgaggacagagacttcaacttgattctttaccaccattcagcatattttttaattgtcttcattgtatttgcttaatagtggtccagacaagttcaaaacttgttctcagtgaggcattaatatggtgcaaccatgaatatttcaggccaagttattcacttgacagataactagaatgaaacttttctcatgaggctgttgtttggttagcatagccttatttcaaaccttaaaaagttacctgactgaagctactatgacttggtaaggattcttcctctcttgctttcttcctcccttcctttcttcctcttccttcctcctcttcttattttctttcctactttccatcctacctattagtgttgctgtacttggattttttgtaaattaaatcaatgcattatgattttagggaattatgattatattcataaggggaaggctaccagaaaatatatgtggcatccataaaatcttcttttataggggcatattttttaggttgtatttattcgtaaagtgaaatgagataatagagtctttctgtaacatgttaatgaattttcatcagggactgaggtcatagattcttggaaaattcatttgtgactgatctagttttctcagctgtatgcaaagtaatctttcaaagactaggttaagattttttttttaagtctgaagcaatgtaaccccaaatctcaaaaatatactcaccaaaaagta

SEQ ID NO: 416998 - DNA, 7427 bp, Homo sapiens
cacgaggggtatttgctttcatttctaatgaaatttcaggcctctagggtaggatatcaaaattggtagatcatttgcaatttattttatcccaaacacctcactttacagtcagagaaactgaggcccagagaagtaaaatgagttgctcaaggtctcagagagcaagaaatagagatgggacttgagcacctagatctctggtattgctgtcctgtagttcatggagctggcagatggatacatctgtgacctgggatgatggagagactgctggacccttcagaggatctcatctcaagacactagcattgcagttggctgaaccttgtgtcaaccatccattccaggagccagctatctgagattccaacaatgtctcacccatcttggctgccacccaaaagcactggtgagcccctcggccatgtgcctgcacggatggagaccacccattcctttgggaaccccagcatttcagtgtctacacaacagccacccaaaaagtttgccccggtagttgctccaaaacctaagtacaacccatacaaacaacctggaggtgagggtgattttcttccacccccacctccacctctagatgattccagtgcccttccatctatctctggaaactttcctcctccaccacctcttgatgaagaggctttcaaagtacaggggaatcccggaggcaagacacttgaggagaggcgctccagcctggacgctgagattgactccttgaccagcatcttggctgaccttgagtgcagctccccctataagcctcggcctccacagagctccactggttcaacagcctctcctccagtttcgaccccagtcacaggacacaagagaatggtcatcccgaaccaaccccctctaacagcaaccaagaagtctacattgaaaccacagcctgcaccccaggctggacccatccctgtggctccaatcggaacactcaaaccccagcctcagccagtcccagcctcctacaccacggcctccacttcttcaaggcctacctttaatgtgcaggtgaagtcagcccagcccagccctcattatatggctgccccttcatcaggacaaatttatggctcagggccccagggctataacactcagccagttcctgtctctgggcagtgtccacctccttcaacacggggaggcatggattatgcctacattccaccaccaggacttcagccggagcctgggtatgggtatgcccccaaccagggacgctattatgaaggctactatgcagcagggccaggctatgggggcagaaatgactctgaccctacctatggtcaacaaggtcacccaaatacctggaaacgggaaccagggtacactcctcctggagcagggaaccagaaccctcctgggatgtatccagtcactggtcccaagaagacctatatcacagatcctgtttcagccccctgtgcgccaccattgcagccaaagggtggccattcagggcaactggggccttcgtcagttgccccttcattccgcccagaggatgagcttgagcacctgaccaaaaagatgctgtatgacatggaaaatccacctgctgacgaatactttggccgctgtgctcgctgtggagaaaacgtagttggggaaggtacaggatgcactgccatggatcaggtcttccacgtggattgttttacctgcatcatctgcaacaacaagctccgagggcagccattctatgctgtggaaaagaaagcatactgcgagccctgctacattaatactctggagcagtgcaatgtgtgttccaagcccatcatggagcggattctccgagccaccgggaaggcctatcatcctcactgtttcacctgcgtgatgtgccaccgcagcctggatgggatcccattcactgtggatgctggcgggctcattcactgcattgaggacttccacaagaaatttgccccgcgatgttctgtgtgcaaggagcctattatgccagccccgggccaggaggagactgtccgtattgtggctttggatcgagatttccatgttcactgctaccgatgcgaggattgcggtggtctcctgtctgaaggagataaccaaggctgctaccccttggatgggcacatcctctgcaagacctgcaactctgcccgcatcagggtgttgaccgccaaggcgagcactgacctttagattcagtcacctgttcagccggcactgagaagaacgaacacaagaaaaagataagaaatactagagtaaaggccatcaaactacgcgatagtctctgttcttcatctgctattaaccttgccttagaaacacataaattatgagatttttttttaaaagttgttaccaaatacacatttcacattgaatcatgtaggatcttgatgggcctttgttcccaaggacttccacatttttgcacagattatgctccatcccattcacttctgcattcctgtaacttttaatccctatgtttgtctcacttttcatctggttgaatggcttttcttagtgtggtatttgctgtcacatagtttttcctgggtgagtctgccaactcacaggtgcttttaggcttgaaatctccatcctatcatttccgttttgcctgtgactgtaaagagtagccattcttttcccatgtattgaagaggatattcttctcttgctttatactactcacgtccttggggagggaaatgcacaatttttttttgttaggctgtaaagaatttaagctgtaaattacataagttagaacaagcccaaatttaatttgcaaccatcagaattcagaatctatagtgaccagtgatcaaggctaattggaaaagagttatcggcccatagctaataagtagtgacagacaaccaagcttcaatatttttctaaagaaattacaggtgggatatgctagaaaaggcattttggggttatgtttaaaaaaacattattgtcccacaatattaccttaagatttttcttttccgcactacctgaacattgtaatacagacaaacttgatttcttctagaagataacattttcaatactgtcccacttctcatcttaaaaatattgtcatgtttattctaatatccaacacaactatcaaaattgcctttttctctagaggatgaaggctgtgaaaaaaccgttcaaattctcttctttttcttttttattaccaggtccattttgcctgacaattgcaaatcagagcatacaaaataaaactgtgcagttttgtttggtttactttcaaaagagtagaaagcttgaaaagattctgaaaccacagtttcattattctcataatccttctgcaactgaaattacatattgcaggagacattttcatatcatcaatgtgacatttacaccacactttcaaagacaatcactgaaacaaaaattgtctttatgagctaaaaatatgcagaatctctgcctagaatctttattcaaacttttattagccagtgaaacacttgcttgccaactgccaagccatacttattaagttcgaacatgtttcacttaaggagagacacctagcttagtcatggcaagttgccattttgtaaactaaggattttggactgagatttcttaaatctttcttcaaatctcccacaagtatatacttttaaattatggagtattttaagtctacaaaaaggtataaataataatataatgaattcctatatacctaatacccagtttaagacaccaaatataacaagtataattacatcctccaatgtaccgtttccttattccacagatatctttttcactattgtgaagtgatgttcagatttctagttttttttctagtttttaattttaacatcagaactgaaataaaaaattatggatacgtgttttgaattgcaaactattcctcaggaattccaattaaatttattttacttgaataggaatgatcataaaagtgattctttttttgtgactagaaattcttaagccgatggtcactatagctcatccttaatgtatggctcatttgcttttgtcactaaacggttttgtgttagaaccaccaaaattatagcttttaagagcttcctttgaccactgtctttttcttaccctacttctcttatctttgatcgtatatttctcataatgtgaaatatgatgagattcacttaggggcagcatgttagttttgggaggcaatgtcaactgtgtctctgaattcctgtcttccaaattgaagccagaccatgctgatgacctcaagtagcactgactatttgacaatagggctgataatgtaatcggcttgaattttgacttagtaactttttatgtaatactttcggagaaattctctttaggacaaagcagagagtccaatttattgagggatagattgtatctcttaaagtggtcatattattattaattttgccaaaagaagaagaatttattgaatatttatactataaaatgcagtaacattctacttgcttattacatttaaatccttgtgtaactgaatgtttacatgtcaagaggaaaagctgtaagaaaatgctgtcacagacccatccctgtggcatcgtcagcagaatactgcttgcttacaatctttattatgcattcttataacataacctcagagtatctttaccaaaggtttttaaagtaaatctctttttaagatagacttattcttttataataatgaatgtgcactcatacatatgtagaaacatttagatttagagttttttttttctttcacaaggtataataaggaaaggatcctacaatattttattctagggtttcttaaatatatgatttatattactgtcttttctattaatcatttgatttaaacaatgccaagtcactcttttttagttgcatgaaattttgcctgcaacagagagaaaaagattgtattactttaatgattataatcatactgtctgctgatataatatcataattgttgtggtttaaatacataaatagtagaaaaatcagagtctataacagaaagtttgtaaaaatatactgattttgaaaagtatcaggaatataaatatttggtaattctgtgtaacaagagagacatggaaaaggaaaaaaatccactatatcatgggctctgcagaacatatcaaaataggatttcttaaatttttcaacccccagaccatactgactcaacatggagtctcactggccaagaaaattgcctttaaaactcgaaaataaggccaggtgtggtgactcacacttgtaatcccagcaatttgggaggctgagacaggaggattgcctgaggccaggagtttgacaccagcctgggcaacatagtgagaccttgtctctacaaaaaataaaataaaataaaaaccaaattagccagacatggtggcatgcgcttgtttaaaaaaacaaataaataaataatcgactcaaaaataagtcatgtgtcccagcataaggcatcaggttgttagatgctggcatctctgcagctcaaagatgtgggttctttttcttgtcattaacacattgttatttctgtaggagcaacttctctgatcaaaattacttttctgggtatgtgctgattaagggggtggacttatcaacactataattgttccctatgaaagattccacagagatgtttatggtgaggtttaaaggatatgaaactctacatttaaacaagtattttatatttgggtacagaggaagaaagagagggctttttccatggggctatagtagagagttagtggaatatagacaggactctgaaaacacaacttccagccatttttttagttagtaaaaatcctattaatgtgaaccagccaggaataacagtgttatttctattggatatggtttgggcttctcttgtcaaatctgtgtcggctgccccctgatccttccattatcaagttttgaagggtgttggggaaattatggcagctgctagggagatcagggaaacactgatgtaacctcaaagcctctcaccattcctcttggcttggaaaggctttattttttcatatacatttctagaaatattgctattctaccttagtatttcacatttgtagttcaaacaagcgattgtccatctgttgcctagagctatagtacatgtgtgttatgaatgaaatatgacagcatgttccatacccctgctttagccatctgtgggaaaccagcaaactgaaaaagacacctctgcaaaatgtgcctcaagtccatttcttgggatcgctcgtttggtgcactctcgtgggagacaatcagagaacaacatatacttgtgccttattttcaaagaatctatttacactactatgaatattccactgaagagtcaatgatgtaaatgataaccaccaaatctcaaaaatatactcaccaaaaagtaaaaaagtaaaaaaaaaaaaaaaagaaagaaagaaaagaaagagagagaagtcaacttttcatcttaatatattctagtagtatttattttttccttgtcttggaagtatctcataggtctttaaatgagtaaaacatttttatgccagaaggtgatataatggatgttagtgttttttatttgattttacagtagttttagtcagataatgaggacagagacttcaacttgattctttaccaccattcagcatattttttaattgtcttcattgtatttgcttaatagtggtccagacaagttcaaaacttgttctcagtgaggcattaatatggtgcaaccatgaatatttcaggccaagttattcacttgacagataactagaatgaaacttttctcatgaggctgttgtttggttagcatagccttatttcaaaccttaaaaagttacctgactgaagctactatgacttggtaaggattcttcctctcttgctttcttcctcccttcctttcttcctcttccttcctcctcttcttattttctttcctactttccatcctacctattagtgttgctgtacttggattttttgtaaattaaatcaatgcattatgattttagggaattatgattatattcataaggggaaggctaccagaaaatatatgtggcatccataaaatcttcttttataggggcatattttttaggttgtatttattcgtaaagtgaaatgagataatagagtctttctgtaacatgttaatgaattttcatcagggactgaggtcatagattcttggaaaattcatttgtgactgatctagttttctcagctgtatgcaaagtaatctttcaaagactaggttaagattttttttttaagtctgaagcaatgtaaccccaaatctcaaaaatatactcaccaaaaagta

SEQ ID NO: 416999 - DNA, 7249 bp, Homo sapiens
ggccgccgccgccgccgccgccgccgccaccaccaccgccgctgccccggctgcctcctccctgaggaggaaacaaagaggcctccgacgggggtgttgacagaacctggtcttctgattccctgtgttctgcttttttcattgttccactggacgctcatcagagggaagatctttttcctcaattgattccaacaatgtctcacccatcttggctgccacccaaaagcactggtgagcccctcggccatgtgcctgcacggatggagaccacccattcctttgggaaccccagcatttcagtgtctacacaacagccacccaaaaagtttgccccggtagttgctccaaaacctaagtacaacccatacaaacaacctggaggtgagggtgattttcttccacccccacctccacctctagatgattccagtgcccttccatctatctctggaaactttcctcctccaccacctcttgatgaagaggctttcaaagtacaggggaatcccggaggcaagacacttgaggagaggcgctccagcctggacgctgagattgactccttgaccagcatcttggctgaccttgagtgcagctccccctataagcctcggcctccacagagctccactggttcaacagcctctcctccagtttcgaccccagtcacaggacacaagagaatggtcatcccgaaccaaccccctctaacagcaaccaagaagtctacattgaaaccacagcctgcaccccaggctggacccatccctgtggctccaatcggaacactcaaaccccagcctcagccagtcccagcctcctacaccacggcctccacttcttcaaggcctacctttaatgtgcaggtgaagtcagcccagcccagccctcattatatggctgccccttcatcaggacaaatttatggctcagggccccagggctataacactcagccagttcctgtctctgggcagtgtccacctccttcaacacggggaggcatggattatgcctacattccaccaccaggacttcagccggagcctgggtatgggtatgcccccaaccagggacgctattatgaaggctactatgcagcagggccaggctatgggggcagaaatgactctgaccctacctatggtcaacaaggtcacccaaatacctggaaacgggaaccagggtacactcctcctggagcagggaaccagaaccctcctgggatgtatccagtcactggtcccaagaagacctatatcacagatcctgtttcagccccctgtgcgccaccattgcagccaaagggtggccattcagggcaactggggccttcgtcagttgccccttcattccgcccagaggatgagcttgagcacctgaccaaaaagatgctgtatgacatggaaaatccacctgctgacgaatactttggccgctgtgctcgctgtggagaaaacgtagttggggaaggtacaggatgcactgccatggatcaggtcttccacgtggattgttttacctgcatcatctgcaacaacaagctccgagggcagccattctatgctgtggaaaagaaagcatactgcgagccctgctacattaatactctggagcagtgcaatgtgtgttccaagcccatcatggagcggattctccgagccaccgggaaggcctatcatcctcactgtttcacctgcgtgatgtgccaccgcagcctggatgggatcccattcactgtggatgctggcgggctcattcactgcattgaggacttccacaagaaatttgccccgcgatgttctgtgtgcaaggagcctattatgccagccccgggccaggaggagactgtccgtattgtggctttggatcgagatttccatgttcactgctaccgatgcgaggattgcggtggtctcctgtctgaaggagataaccaaggctgctaccccttggatgggcacatcctctgcaagacctgcaactctgcccgcatcagggtgttgaccgccaaggcgagcactgacctttagattcagtcacctgttcagccggcactgagaagaacgaacacaagaaaaagataagaaatactagagtaaaggccatcaaactacgcgatagtctctgttcttcatctgctattaaccttgccttagaaacacataaattatgagatttttttttaaaagttgttaccaaatacacatttcacattgaatcatgtaggatcttgatgggcctttgttcccaaggacttccacatttttgcacagattatgctccatcccattcacttctgcattcctgtaacttttaatccctatgtttgtctcacttttcatctggttgaatggcttttcttagtgtggtatttgctgtcacatagtttttcctgggtgagtctgccaactcacaggtgcttttaggcttgaaatctccatcctatcatttccgttttgcctgtgactgtaaagagtagccattcttttcccatgtattgaagaggatattcttctcttgctttatactactcacgtccttggggagggaaatgcacaatttttttttgttaggctgtaaagaatttaagctgtaaattacataagttagaacaagcccaaatttaatttgcaaccatcagaattcagaatctatagtgaccagtgatcaaggctaattggaaaagagttatcggcccatagctaataagtagtgacagacaaccaagcttcaatatttttctaaagaaattacaggtgggatatgctagaaaaggcattttggggttatgtttaaaaaaacattattgtcccacaatattaccttaagatttttcttttccgcactacctgaacattgtaatacagacaaacttgatttcttctagaagataacattttcaatactgtcccacttctcatcttaaaaatattgtcatgtttattctaatatccaacacaactatcaaaattgcctttttctctagaggatgaaggctgtgaaaaaaccgttcaaattctcttctttttcttttttattaccaggtccattttgcctgacaattgcaaatcagagcatacaaaataaaactgtgcagttttgtttggtttactttcaaaagagtagaaagcttgaaaagattctgaaaccacagtttcattattctcataatccttctgcaactgaaattacatattgcaggagacattttcatatcatcaatgtgacatttacaccacactttcaaagacaatcactgaaacaaaaattgtctttatgagctaaaaatatgcagaatctctgcctagaatctttattcaaacttttattagccagtgaaacacttgcttgccaactgccaagccatacttattaagttcgaacatgtttcacttaaggagagacacctagcttagtcatggcaagttgccattttgtaaactaaggattttggactgagatttcttaaatctttcttcaaatctcccacaagtatatacttttaaattatggagtattttaagtctacaaaaaggtataaataataatataatgaattcctatatacctaatacccagtttaagacaccaaatataacaagtataattacatcctccaatgtaccgtttccttattccacagatatctttttcactattgtgaagtgatgttcagatttctagttttttttctagtttttaattttaacatcagaactgaaataaaaaattatggatacgtgttttgaattgcaaactattcctcaggaattccaattaaatttattttacttgaataggaatgatcataaaagtgattctttttttgtgactagaaattcttaagccgatggtcactatagctcatccttaatgtatggctcatttgcttttgtcactaaacggttttgtgttagaaccaccaaaattatagcttttaagagcttcctttgaccactgtctttttcttaccctacttctcttatctttgatcgtatatttctcataatgtgaaatatgatgagattcacttaggggcagcatgttagttttgggaggcaatgtcaactgtgtctctgaattcctgtcttccaaattgaagccagaccatgctgatgacctcaagtagcactgactatttgacaatagggctgataatgtaatcggcttgaattttgacttagtaactttttatgtaatactttcggagaaattctctttaggacaaagcagagagtccaatttattgagggatagattgtatctcttaaagtggtcatattattattaattttgccaaaagaagaagaatttattgaatatttatactataaaatgcagtaacattctacttgcttattacatttaaatccttgtgtaactgaatgtttacatgtcaagaggaaaagctgtaagaaaatgctgtcacagacccatccctgtggcatcgtcagcagaatactgcttgcttacaatctttattatgcattcttataacataacctcagagtatctttaccaaaggtttttaaagtaaatctctttttaagatagacttattcttttataataatgaatgtgcactcatacatatgtagaaacatttagatttagagttttttttttctttcacaaggtataataaggaaaggatcctacaatattttattctagggtttcttaaatatatgatttatattactgtcttttctattaatcatttgatttaaacaatgccaagtcactcttttttagttgcatgaaattttgcctgcaacagagagaaaaagattgtattactttaatgattataatcatactgtctgctgatataatatcataattgttgtggtttaaatacataaatagtagaaaaatcagagtctataacagaaagtttgtaaaaatatactgattttgaaaagtatcaggaatataaatatttggtaattctgtgtaacaagagagacatggaaaaggaaaaaaatccactatatcatgggctctgcagaacatatcaaaataggatttcttaaatttttcaacccccagaccatactgactcaacatggagtctcactggccaagaaaattgcctttaaaactcgaaaataaggccaggtgtggtgactcacacttgtaatcccagcaatttgggaggctgagacaggaggattgcctgaggccaggagtttgacaccagcctgggcaacatagtgagaccttgtctctacaaaaaataaaataaaataaaaaccaaattagccagacatggtggcatgcgcttgtttaaaaaaacaaataaataaataatcgactcaaaaataagtcatgtgtcccagcataaggcatcaggttgttagatgctggcatctctgcagctcaaagatgtgggttctttttcttgtcattaacacattgttatttctgtaggagcaacttctctgatcaaaattacttttctgggtatgtgctgattaagggggtggacttatcaacactataattgttccctatgaaagattccacagagatgtttatggtgaggtttaaaggatatgaaactctacatttaaacaagtattttatatttgggtacagaggaagaaagagagggctttttccatggggctatagtagagagttagtggaatatagacaggactctgaaaacacaacttccagccatttttttagttagtaaaaatcctattaatgtgaaccagccaggaataacagtgttatttctattggatatggtttgggcttctcttgtcaaatctgtgtcggctgccccctgatccttccattatcaagttttgaagggtgttggggaaattatggcagctgctagggagatcagggaaacactgatgtaacctcaaagcctctcaccattcctcttggcttggaaaggctttattttttcatatacatttctagaaatattgctattctaccttagtatttcacatttgtagttcaaacaagcgattgtccatctgttgcctagagctatagtacatgtgtgttatgaatgaaatatgacagcatgttccatacccctgctttagccatctgtgggaaaccagcaaactgaaaaagacacctctgcaaaatgtgcctcaagtccatttcttgggatcgctcgtttggtgcactctcgtgggagacaatcagagaacaacatatacttgtgccttattttcaaagaatctatttacactactatgaatattccactgaagagtcaatgatgtaaatgataaccaccaaatctcaaaaatatactcaccaaaaagtaaaaaagtaaaaaaaaaaaaaaaagaaagaaagaaaagaaagagagagaagtcaacttttcatcttaatatattctagtagtatttattttttccttgtcttggaagtatctcataggtctttaaatgagtaaaacatttttatgccagaaggtgatataatggatgttagtgttttttatttgattttacagtagttttagtcagataatgaggacagagacttcaacttgattctttaccaccattcagcatattttttaattgtcttcattgtatttgcttaatagtggtccagacaagttcaaaacttgttctcagtgaggcattaatatggtgcaaccatgaatatttcaggccaagttattcacttgacagataactagaatgaaacttttctcatgaggctgttgtttggttagcatagccttatttcaaaccttaaaaagttacctgactgaagctactatgacttggtaaggattcttcctctcttgctttcttcctcccttcctttcttcctcttccttcctcctcttcttattttctttcctactttccatcctacctattagtgttgctgtacttggattttttgtaaattaaatcaatgcattatgattttagggaattatgattatattcataaggggaaggctaccagaaaatatatgtggcatccataaaatcttcttttataggggcatattttttaggttgtatttattcgtaaagtgaaatgagataatagagtctttctgtaacatgttaatgaattttcatcagggactgaggtcatagattcttggaaaattcatttgtgactgatctagttttctcagctgtatgcaaagtaatctttcaaagactaggttaagattttttttttaagtctgaagcaatgtaaccccaaatctcaaaaatatactcaccaaaaagta

SEQ ID NO: 417000 - DNA, 6910 bp, Homo sapiens
accgacgggtcgtcatgaggtcgcaaccatacaaacaacctggaggtgagggtgattttcttccacccccacctccacctctagatgattccagtgcccttccatctatctctggaaactttcctcctccaccacctcttgatgaagaggctttcaaagtacaggggaatcccggaggcaagacacttgaggagaggcgctccagcctggacgctgagattgactccttgaccagcatcttggctgaccttgagtgcagctccccctataagcctcggcctccacagagctccactggttcaacagcctctcctccagtttcgaccccagtcacaggacacaagagaatggtcatcccgaaccaaccccctctaacagcaaccaagaagtctacattgaaaccacagcctgcaccccaggctggacccatccctgtggctccaatcggaacactcaaaccccagcctcagccagtcccagcctcctacaccacggcctccacttcttcaaggcctacctttaatgtgcaggtgaagtcagcccagcccagccctcattatatggctgccccttcatcaggacaaatttatggctcagggccccagggctataacactcagccagttcctgtctctgggcagtgtccacctccttcaacacggggaggcatggattatgcctacattccaccaccaggacttcagccggagcctgggtatgggtatgcccccaaccagggacgctattatgaaggctactatgcagcagggccaggctatgggggcagaaatgactctgaccctacctatggtcaacaaggtcacccaaatacctggaaacgggaaccagggtacactcctcctggagcagggaaccagaaccctcctgggatgtatccagtcactggtcccaagaagacctatatcacagatcctgtttcagccccctgtgcgccaccattgcagccaaagggtggccattcagggcaactggggccttcgtcagttgccccttcattccgcccagaggatgagcttgagcacctgaccaaaaagatgctgtatgacatggaaaatccacctgctgacgaatactttggccgctgtgctcgctgtggagaaaacgtagttggggaaggtacaggatgcactgccatggatcaggtcttccacgtggattgttttacctgcatcatctgcaacaacaagctccgagggcagccattctatgctgtggaaaagaaagcatactgcgagccctgctacattaatactctggagcagtgcaatgtgtgttccaagcccatcatggagcggattctccgagccaccgggaaggcctatcatcctcactgtttcacctgcgtgatgtgccaccgcagcctggatgggatcccattcactgtggatgctggcgggctcattcactgcattgaggacttccacaagaaatttgccccgcgatgttctgtgtgcaaggagcctattatgccagccccgggccaggaggagactgtccgtattgtggctttggatcgagatttccatgttcactgctaccgatgcgaggattgcggtggtctcctgtctgaaggagataaccaaggctgctaccccttggatgggcacatcctctgcaagacctgcaactctgcccgcatcagggtgttgaccgccaaggcgagcactgacctttagattcagtcacctgttcagccggcactgagaagaacgaacacaagaaaaagataagaaatactagagtaaaggccatcaaactacgcgatagtctctgttcttcatctgctattaaccttgccttagaaacacataaattatgagatttttttttaaaagttgttaccaaatacacatttcacattgaatcatgtaggatcttgatgggcctttgttcccaaggacttccacatttttgcacagattatgctccatcccattcacttctgcattcctgtaacttttaatccctatgtttgtctcacttttcatctggttgaatggcttttcttagtgtggtatttgctgtcacatagtttttcctgggtgagtctgccaactcacaggtgcttttaggcttgaaatctccatcctatcatttccgttttgcctgtgactgtaaagagtagccattcttttcccatgtattgaagaggatattcttctcttgctttatactactcacgtccttggggagggaaatgcacaatttttttttgttaggctgtaaagaatttaagctgtaaattacataagttagaacaagcccaaatttaatttgcaaccatcagaattcagaatctatagtgaccagtgatcaaggctaattggaaaagagttatcggcccatagctaataagtagtgacagacaaccaagcttcaatatttttctaaagaaattacaggtgggatatgctagaaaaggcattttggggttatgtttaaaaaaacattattgtcccacaatattaccttaagatttttcttttccgcactacctgaacattgtaatacagacaaacttgatttcttctagaagataacattttcaatactgtcccacttctcatcttaaaaatattgtcatgtttattctaatatccaacacaactatcaaaattgcctttttctctagaggatgaaggctgtgaaaaaaccgttcaaattctcttctttttcttttttattaccaggtccattttgcctgacaattgcaaatcagagcatacaaaataaaactgtgcagttttgtttggtttactttcaaaagagtagaaagcttgaaaagattctgaaaccacagtttcattattctcataatccttctgcaactgaaattacatattgcaggagacattttcatatcatcaatgtgacatttacaccacactttcaaagacaatcactgaaacaaaaattgtctttatgagctaaaaatatgcagaatctctgcctagaatctttattcaaacttttattagccagtgaaacacttgcttgccaactgccaagccatacttattaagttcgaacatgtttcacttaaggagagacacctagcttagtcatggcaagttgccattttgtaaactaaggattttggactgagatttcttaaatctttcttcaaatctcccacaagtatatacttttaaattatggagtattttaagtctacaaaaaggtataaataataatataatgaattcctatatacctaatacccagtttaagacaccaaatataacaagtataattacatcctccaatgtaccgtttccttattccacagatatctttttcactattgtgaagtgatgttcagatttctagttttttttctagtttttaattttaacatcagaactgaaataaaaaattatggatacgtgttttgaattgcaaactattcctcaggaattccaattaaatttattttacttgaataggaatgatcataaaagtgattctttttttgtgactagaaattcttaagccgatggtcactatagctcatccttaatgtatggctcatttgcttttgtcactaaacggttttgtgttagaaccaccaaaattatagcttttaagagcttcctttgaccactgtctttttcttaccctacttctcttatctttgatcgtatatttctcataatgtgaaatatgatgagattcacttaggggcagcatgttagttttgggaggcaatgtcaactgtgtctctgaattcctgtcttccaaattgaagccagaccatgctgatgacctcaagtagcactgactatttgacaatagggctgataatgtaatcggcttgaattttgacttagtaactttttatgtaatactttcggagaaattctctttaggacaaagcagagagtccaatttattgagggatagattgtatctcttaaagtggtcatattattattaattttgccaaaagaagaagaatttattgaatatttatactataaaatgcagtaacattctacttgcttattacatttaaatccttgtgtaactgaatgtttacatgtcaagaggaaaagctgtaagaaaatgctgtcacagacccatccctgtggcatcgtcagcagaatactgcttgcttacaatctttattatgcattcttataacataacctcagagtatctttaccaaaggtttttaaagtaaatctctttttaagatagacttattcttttataataatgaatgtgcactcatacatatgtagaaacatttagatttagagttttttttttctttcacaaggtataataaggaaaggatcctacaatattttattctagggtttcttaaatatatgatttatattactgtcttttctattaatcatttgatttaaacaatgccaagtcactcttttttagttgcatgaaattttgcctgcaacagagagaaaaagattgtattactttaatgattataatcatactgtctgctgatataatatcataattgttgtggtttaaatacataaatagtagaaaaatcagagtctataacagaaagtttgtaaaaatatactgattttgaaaagtatcaggaatataaatatttggtaattctgtgtaacaagagagacatggaaaaggaaaaaaatccactatatcatgggctctgcagaacatatcaaaataggatttcttaaatttttcaacccccagaccatactgactcaacatggagtctcactggccaagaaaattgcctttaaaactcgaaaataaggccaggtgtggtgactcacacttgtaatcccagcaatttgggaggctgagacaggaggattgcctgaggccaggagtttgacaccagcctgggcaacatagtgagaccttgtctctacaaaaaataaaataaaataaaaaccaaattagccagacatggtggcatgcgcttgtttaaaaaaacaaataaataaataatcgactcaaaaataagtcatgtgtcccagcataaggcatcaggttgttagatgctggcatctctgcagctcaaagatgtgggttctttttcttgtcattaacacattgttatttctgtaggagcaacttctctgatcaaaattacttttctgggtatgtgctgattaagggggtggacttatcaacactataattgttccctatgaaagattccacagagatgtttatggtgaggtttaaaggatatgaaactctacatttaaacaagtattttatatttgggtacagaggaagaaagagagggctttttccatggggctatagtagagagttagtggaatatagacaggactctgaaaacacaacttccagccatttttttagttagtaaaaatcctattaatgtgaaccagccaggaataacagtgttatttctattggatatggtttgggcttctcttgtcaaatctgtgtcggctgccccctgatccttccattatcaagttttgaagggtgttggggaaattatggcagctgctagggagatcagggaaacactgatgtaacctcaaagcctctcaccattcctcttggcttggaaaggctttattttttcatatacatttctagaaatattgctattctaccttagtatttcacatttgtagttcaaacaagcgattgtccatctgttgcctagagctatagtacatgtgtgttatgaatgaaatatgacagcatgttccatacccctgctttagccatctgtgggaaaccagcaaactgaaaaagacacctctgcaaaatgtgcctcaagtccatttcttgggatcgctcgtttggtgcactctcgtgggagacaatcagagaacaacatatacttgtgccttattttcaaagaatctatttacactactatgaatattccactgaagagtcaatgatgtaaatgataaccaccaaatctcaaaaatatactcaccaaaaagtaaaaaagtaaaaaaaaaaaaaaaagaaagaaagaaaagaaagagagagaagtcaacttttcatcttaatatattctagtagtatttattttttccttgtcttggaagtatctcataggtctttaaatgagtaaaacatttttatgccagaaggtgatataatggatgttagtgttttttatttgattttacagtagttttagtcagataatgaggacagagacttcaacttgattctttaccaccattcagcatattttttaattgtcttcattgtatttgcttaatagtggtccagacaagttcaaaacttgttctcagtgaggcattaatatggtgcaaccatgaatatttcaggccaagttattcacttgacagataactagaatgaaacttttctcatgaggctgttgtttggttagcatagccttatttcaaaccttaaaaagttacctgactgaagctactatgacttggtaaggattcttcctctcttgctttcttcctcccttcctttcttcctcttccttcctcctcttcttattttctttcctactttccatcctacctattagtgttgctgtacttggattttttgtaaattaaatcaatgcattatgattttagggaattatgattatattcataaggggaaggctaccagaaaatatatgtggcatccataaaatcttcttttataggggcatattttttaggttgtatttattcgtaaagtgaaatgagataatagagtctttctgtaacatgttaatgaattttcatcagggactgaggtcatagattcttggaaaattcatttgtgactgatctagttttctcagctgtatgcaaagtaatctttcaaagactaggttaagattttttttttaagtctgaagcaatgtaaccccaaatctcaaaaatatactcaccaaaaagta

SEQ ID NO: 417001 - DNA, 5983 bp, Homo sapiens
agagcggtgcgggtcgtgctggagaactaagcgcggcagacctcggtggccattcagggcaactggggccttcgtcagttgccccttcattccgcccagaggatgagcttgagcacctgaccaaaaagatgctgtatgacatggaaaatccacctgctgacgaatactttggccgctgtgctcgctgtggagaaaacgtagttggggaaggtacaggatgcactgccatggatcaggtcttccacgtggattgttttacctgcatcatctgcaacaacaagctccgagggcagccattctatgctgtggaaaagaaagcatactgcgagccctgctacattaatactctggagcagtgcaatgtgtgttccaagcccatcatggagcggattctccgagccaccgggaaggcctatcatcctcactgtttcacctgcgtgatgtgccaccgcagcctggatgggatcccattcactgtggatgctggcgggctcattcactgcattgaggacttccacaagaaatttgccccgcgatgttctgtgtgcaaggagcctattatgccagccccgggccaggaggagactgtccgtattgtggctttggatcgagatttccatgttcactgctaccgatgcgaggattgcggtggtctcctgtctgaaggagataaccaaggctgctaccccttggatgggcacatcctctgcaagacctgcaactctgcccgcatcagggtgttgaccgccaaggcgagcactgacctttagattcagtcacctgttcagccggcactgagaagaacgaacacaagaaaaagataagaaatactagagtaaaggccatcaaactacgcgatagtctctgttcttcatctgctattaaccttgccttagaaacacataaattatgagatttttttttaaaagttgttaccaaatacacatttcacattgaatcatgtaggatcttgatgggcctttgttcccaaggacttccacatttttgcacagattatgctccatcccattcacttctgcattcctgtaacttttaatccctatgtttgtctcacttttcatctggttgaatggcttttcttagtgtggtatttgctgtcacatagtttttcctgggtgagtctgccaactcacaggtgcttttaggcttgaaatctccatcctatcatttccgttttgcctgtgactgtaaagagtagccattcttttcccatgtattgaagaggatattcttctcttgctttatactactcacgtccttggggagggaaatgcacaatttttttttgttaggctgtaaagaatttaagctgtaaattacataagttagaacaagcccaaatttaatttgcaaccatcagaattcagaatctatagtgaccagtgatcaaggctaattggaaaagagttatcggcccatagctaataagtagtgacagacaaccaagcttcaatatttttctaaagaaattacaggtgggatatgctagaaaaggcattttggggttatgtttaaaaaaacattattgtcccacaatattaccttaagatttttcttttccgcactacctgaacattgtaatacagacaaacttgatttcttctagaagataacattttcaatactgtcccacttctcatcttaaaaatattgtcatgtttattctaatatccaacacaactatcaaaattgcctttttctctagaggatgaaggctgtgaaaaaaccgttcaaattctcttctttttcttttttattaccaggtccattttgcctgacaattgcaaatcagagcatacaaaataaaactgtgcagttttgtttggtttactttcaaaagagtagaaagcttgaaaagattctgaaaccacagtttcattattctcataatccttctgcaactgaaattacatattgcaggagacattttcatatcatcaatgtgacatttacaccacactttcaaagacaatcactgaaacaaaaattgtctttatgagctaaaaatatgcagaatctctgcctagaatctttattcaaacttttattagccagtgaaacacttgcttgccaactgccaagccatacttattaagttcgaacatgtttcacttaaggagagacacctagcttagtcatggcaagttgccattttgtaaactaaggattttggactgagatttcttaaatctttcttcaaatctcccacaagtatatacttttaaattatggagtattttaagtctacaaaaaggtataaataataatataatgaattcctatatacctaatacccagtttaagacaccaaatataacaagtataattacatcctccaatgtaccgtttccttattccacagatatctttttcactattgtgaagtgatgttcagatttctagttttttttctagtttttaattttaacatcagaactgaaataaaaaattatggatacgtgttttgaattgcaaactattcctcaggaattccaattaaatttattttacttgaataggaatgatcataaaagtgattctttttttgtgactagaaattcttaagccgatggtcactatagctcatccttaatgtatggctcatttgcttttgtcactaaacggttttgtgttagaaccaccaaaattatagcttttaagagcttcctttgaccactgtctttttcttaccctacttctcttatctttgatcgtatatttctcataatgtgaaatatgatgagattcacttaggggcagcatgttagttttgggaggcaatgtcaactgtgtctctgaattcctgtcttccaaattgaagccagaccatgctgatgacctcaagtagcactgactatttgacaatagggctgataatgtaatcggcttgaattttgacttagtaactttttatgtaatactttcggagaaattctctttaggacaaagcagagagtccaatttattgagggatagattgtatctcttaaagtggtcatattattattaattttgccaaaagaagaagaatttattgaatatttatactataaaatgcagtaacattctacttgcttattacatttaaatccttgtgtaactgaatgtttacatgtcaagaggaaaagctgtaagaaaatgctgtcacagacccatccctgtggcatcgtcagcagaatactgcttgcttacaatctttattatgcattcttataacataacctcagagtatctttaccaaaggtttttaaagtaaatctctttttaagatagacttattcttttataataatgaatgtgcactcatacatatgtagaaacatttagatttagagttttttttttctttcacaaggtataataaggaaaggatcctacaatattttattctagggtttcttaaatatatgatttatattactgtcttttctattaatcatttgatttaaacaatgccaagtcactcttttttagttgcatgaaattttgcctgcaacagagagaaaaagattgtattactttaatgattataatcatactgtctgctgatataatatcataattgttgtggtttaaatacataaatagtagaaaaatcagagtctataacagaaagtttgtaaaaatatactgattttgaaaagtatcaggaatataaatatttggtaattctgtgtaacaagagagacatggaaaaggaaaaaaatccactatatcatgggctctgcagaacatatcaaaataggatttcttaaatttttcaacccccagaccatactgactcaacatggagtctcactggccaagaaaattgcctttaaaactcgaaaataaggccaggtgtggtgactcacacttgtaatcccagcaatttgggaggctgagacaggaggattgcctgaggccaggagtttgacaccagcctgggcaacatagtgagaccttgtctctacaaaaaataaaataaaataaaaaccaaattagccagacatggtggcatgcgcttgtttaaaaaaacaaataaataaataatcgactcaaaaataagtcatgtgtcccagcataaggcatcaggttgttagatgctggcatctctgcagctcaaagatgtgggttctttttcttgtcattaacacattgttatttctgtaggagcaacttctctgatcaaaattacttttctgggtatgtgctgattaagggggtggacttatcaacactataattgttccctatgaaagattccacagagatgtttatggtgaggtttaaaggatatgaaactctacatttaaacaagtattttatatttgggtacagaggaagaaagagagggctttttccatggggctatagtagagagttagtggaatatagacaggactctgaaaacacaacttccagccatttttttagttagtaaaaatcctattaatgtgaaccagccaggaataacagtgttatttctattggatatggtttgggcttctcttgtcaaatctgtgtcggctgccccctgatccttccattatcaagttttgaagggtgttggggaaattatggcagctgctagggagatcagggaaacactgatgtaacctcaaagcctctcaccattcctcttggcttggaaaggctttattttttcatatacatttctagaaatattgctattctaccttagtatttcacatttgtagttcaaacaagcgattgtccatctgttgcctagagctatagtacatgtgtgttatgaatgaaatatgacagcatgttccatacccctgctttagccatctgtgggaaaccagcaaactgaaaaagacacctctgcaaaatgtgcctcaagtccatttcttgggatcgctcgtttggtgcactctcgtgggagacaatcagagaacaacatatacttgtgccttattttcaaagaatctatttacactactatgaatattccactgaagagtcaatgatgtaaatgataaccaccaaatctcaaaaatatactcaccaaaaagtaaaaaagtaaaaaaaaaaaaaaaagaaagaaagaaaagaaagagagagaagtcaacttttcatcttaatatattctagtagtatttattttttccttgtcttggaagtatctcataggtctttaaatgagtaaaacatttttatgccagaaggtgatataatggatgttagtgttttttatttgattttacagtagttttagtcagataatgaggacagagacttcaacttgattctttaccaccattcagcatattttttaattgtcttcattgtatttgcttaatagtggtccagacaagttcaaaacttgttctcagtgaggcattaatatggtgcaaccatgaatatttcaggccaagttattcacttgacagataactagaatgaaacttttctcatgaggctgttgtttggttagcatagccttatttcaaaccttaaaaagttacctgactgaagctactatgacttggtaaggattcttcctctcttgctttcttcctcccttcctttcttcctcttccttcctcctcttcttattttctttcctactttccatcctacctattagtgttgctgtacttggattttttgtaaattaaatcaatgcattatgattttagggaattatgattatattcataaggggaaggctaccagaaaatatatgtggcatccataaaatcttcttttataggggcatattttttaggttgtatttattcgtaaagtgaaatgagataatagagtctttctgtaacatgttaatgaattttcatcagggactgaggtcatagattcttggaaaattcatttgtgactgatctagttttctcagctgtatgcaaagtaatctttcaaagactaggttaagattttttttttaagtctgaagcaatgtaaccccaaatctcaaaaatatactcaccaaaaagta

SEQ ID NO: 417002 - DNA, 6074 bp, Homo sapiens
ctgaaacctgatgtccatatgtaggccagatgccacattaatcaatttaagaatgctggagcttcgcagaatactgcatgaacaacgagaaccgtggccctgaaagactcaaaaccctacagtatatgaaactattgcaggatgtgtggatgttcaaaggaataacagacttggaagcaatgcttactgaattttgatgtattaaaggatgtcaagtccaagagagagataaggtctcagaagacagaactagaaccatggggccgctgtgctcgctgtggagaaaacgtagttggggaaggtacaggatgcactgccatggatcaggtcttccacgtggattgttttacctgcatcatctgcaacaacaagctccgagggcagccattctatgctgtggaaaagaaagcatactgcgagccctgctacattaatactctggagcagtgcaatgtgtgttccaagcccatcatggagcggattctccgagccaccgggaaggcctatcatcctcactgtttcacctgcgtgatgtgccaccgcagcctggatgggatcccattcactgtggatgctggcgggctcattcactgcattgaggacttccacaagaaatttgccccgcgatgttctgtgtgcaaggagcctattatgccagccccgggccaggaggagactgtccgtattgtggctttggatcgagatttccatgttcactgctaccgatgcgaggattgcggtggtctcctgtctgaaggagataaccaaggctgctaccccttggatgggcacatcctctgcaagacctgcaactctgcccgcatcagggtgttgaccgccaaggcgagcactgacctttagattcagtcacctgttcagccggcactgagaagaacgaacacaagaaaaagataagaaatactagagtaaaggccatcaaactacgcgatagtctctgttcttcatctgctattaaccttgccttagaaacacataaattatgagatttttttttaaaagttgttaccaaatacacatttcacattgaatcatgtaggatcttgatgggcctttgttcccaaggacttccacatttttgcacagattatgctccatcccattcacttctgcattcctgtaacttttaatccctatgtttgtctcacttttcatctggttgaatggcttttcttagtgtggtatttgctgtcacatagtttttcctgggtgagtctgccaactcacaggtgcttttaggcttgaaatctccatcctatcatttccgttttgcctgtgactgtaaagagtagccattcttttcccatgtattgaagaggatattcttctcttgctttatactactcacgtccttggggagggaaatgcacaatttttttttgttaggctgtaaagaatttaagctgtaaattacataagttagaacaagcccaaatttaatttgcaaccatcagaattcagaatctatagtgaccagtgatcaaggctaattggaaaagagttatcggcccatagctaataagtagtgacagacaaccaagcttcaatatttttctaaagaaattacaggtgggatatgctagaaaaggcattttggggttatgtttaaaaaaacattattgtcccacaatattaccttaagatttttcttttccgcactacctgaacattgtaatacagacaaacttgatttcttctagaagataacattttcaatactgtcccacttctcatcttaaaaatattgtcatgtttattctaatatccaacacaactatcaaaattgcctttttctctagaggatgaaggctgtgaaaaaaccgttcaaattctcttctttttcttttttattaccaggtccattttgcctgacaattgcaaatcagagcatacaaaataaaactgtgcagttttgtttggtttactttcaaaagagtagaaagcttgaaaagattctgaaaccacagtttcattattctcataatccttctgcaactgaaattacatattgcaggagacattttcatatcatcaatgtgacatttacaccacactttcaaagacaatcactgaaacaaaaattgtctttatgagctaaaaatatgcagaatctctgcctagaatctttattcaaacttttattagccagtgaaacacttgcttgccaactgccaagccatacttattaagttcgaacatgtttcacttaaggagagacacctagcttagtcatggcaagttgccattttgtaaactaaggattttggactgagatttcttaaatctttcttcaaatctcccacaagtatatacttttaaattatggagtattttaagtctacaaaaaggtataaataataatataatgaattcctatatacctaatacccagtttaagacaccaaatataacaagtataattacatcctccaatgtaccgtttccttattccacagatatctttttcactattgtgaagtgatgttcagatttctagttttttttctagtttttaattttaacatcagaactgaaataaaaaattatggatacgtgttttgaattgcaaactattcctcaggaattccaattaaatttattttacttgaataggaatgatcataaaagtgattctttttttgtgactagaaattcttaagccgatggtcactatagctcatccttaatgtatggctcatttgcttttgtcactaaacggttttgtgttagaaccaccaaaattatagcttttaagagcttcctttgaccactgtctttttcttaccctacttctcttatctttgatcgtatatttctcataatgtgaaatatgatgagattcacttaggggcagcatgttagttttgggaggcaatgtcaactgtgtctctgaattcctgtcttccaaattgaagccagaccatgctgatgacctcaagtagcactgactatttgacaatagggctgataatgtaatcggcttgaattttgacttagtaactttttatgtaatactttcggagaaattctctttaggacaaagcagagagtccaatttattgagggatagattgtatctcttaaagtggtcatattattattaattttgccaaaagaagaagaatttattgaatatttatactataaaatgcagtaacattctacttgcttattacatttaaatccttgtgtaactgaatgtttacatgtcaagaggaaaagctgtaagaaaatgctgtcacagacccatccctgtggcatcgtcagcagaatactgcttgcttacaatctttattatgcattcttataacataacctcagagtatctttaccaaaggtttttaaagtaaatctctttttaagatagacttattcttttataataatgaatgtgcactcatacatatgtagaaacatttagatttagagttttttttttctttcacaaggtataataaggaaaggatcctacaatattttattctagggtttcttaaatatatgatttatattactgtcttttctattaatcatttgatttaaacaatgccaagtcactcttttttagttgcatgaaattttgcctgcaacagagagaaaaagattgtattactttaatgattataatcatactgtctgctgatataatatcataattgttgtggtttaaatacataaatagtagaaaaatcagagtctataacagaaagtttgtaaaaatatactgattttgaaaagtatcaggaatataaatatttggtaattctgtgtaacaagagagacatggaaaaggaaaaaaatccactatatcatgggctctgcagaacatatcaaaataggatttcttaaatttttcaacccccagaccatactgactcaacatggagtctcactggccaagaaaattgcctttaaaactcgaaaataaggccaggtgtggtgactcacacttgtaatcccagcaatttgggaggctgagacaggaggattgcctgaggccaggagtttgacaccagcctgggcaacatagtgagaccttgtctctacaaaaaataaaataaaataaaaaccaaattagccagacatggtggcatgcgcttgtttaaaaaaacaaataaataaataatcgactcaaaaataagtcatgtgtcccagcataaggcatcaggttgttagatgctggcatctctgcagctcaaagatgtgggttctttttcttgtcattaacacattgttatttctgtaggagcaacttctctgatcaaaattacttttctgggtatgtgctgattaagggggtggacttatcaacactataattgttccctatgaaagattccacagagatgtttatggtgaggtttaaaggatatgaaactctacatttaaacaagtattttatatttgggtacagaggaagaaagagagggctttttccatggggctatagtagagagttagtggaatatagacaggactctgaaaacacaacttccagccatttttttagttagtaaaaatcctattaatgtgaaccagccaggaataacagtgttatttctattggatatggtttgggcttctcttgtcaaatctgtgtcggctgccccctgatccttccattatcaagttttgaagggtgttggggaaattatggcagctgctagggagatcagggaaacactgatgtaacctcaaagcctctcaccattcctcttggcttggaaaggctttattttttcatatacatttctagaaatattgctattctaccttagtatttcacatttgtagttcaaacaagcgattgtccatctgttgcctagagctatagtacatgtgtgttatgaatgaaatatgacagcatgttccatacccctgctttagccatctgtgggaaaccagcaaactgaaaaagacacctctgcaaaatgtgcctcaagtccatttcttgggatcgctcgtttggtgcactctcgtgggagacaatcagagaacaacatatacttgtgccttattttcaaagaatctatttacactactatgaatattccactgaagagtcaatgatgtaaatgataaccaccaaatctcaaaaatatactcaccaaaaagtaaaaaagtaaaaaaaaaaaaaaaagaaagaaagaaaagaaagagagagaagtcaacttttcatcttaatatattctagtagtatttattttttccttgtcttggaagtatctcataggtctttaaatgagtaaaacatttttatgccagaaggtgatataatggatgttagtgttttttatttgattttacagtagttttagtcagataatgaggacagagacttcaacttgattctttaccaccattcagcatattttttaattgtcttcattgtatttgcttaatagtggtccagacaagttcaaaacttgttctcagtgaggcattaatatggtgcaaccatgaatatttcaggccaagttattcacttgacagataactagaatgaaacttttctcatgaggctgttgtttggttagcatagccttatttcaaaccttaaaaagttacctgactgaagctactatgacttggtaaggattcttcctctcttgctttcttcctcccttcctttcttcctcttccttcctcctcttcttattttctttcctactttccatcctacctattagtgttgctgtacttggattttttgtaaattaaatcaatgcattatgattttagggaattatgattatattcataaggggaaggctaccagaaaatatatgtggcatccataaaatcttcttttataggggcatattttttaggttgtatttattcgtaaagtgaaatgagataatagagtctttctgtaacatgttaatgaattttcatcagggactgaggtcatagattcttggaaaattcatttgtgactgatctagttttctcagctgtatgcaaagtaatctttcaaagactaggttaagattttttttttaagtctgaagcaatgtaaccccaaatctcaaaaatatactcaccaaaaagta

SEQ ID NO: 417003 - DNA, 3638 bp, Homo sapiens
gaagcgcgcagcggcgttctagaggatcccagcggggaacaatcacttcactattgtgaagtgatgttcagatttctagttttttttctagtttttaattttaacatcagaactgaaataaaaaattatggatacgtgttttgaattgcaaactattcctcaggaattccaattaaatttattttacttgaataggaatgatcataaaagtgattctttttttgtgactagaaattcttaagccgatggtcactatagctcatccttaatgtatggctcatttgcttttgtcactaaacggttttgtgttagaaccaccaaaattatagcttttaagagcttcctttgaccactgtctttttcttaccctacttctcttatctttgatcgtatatttctcataatgtgaaatatgatgagattcacttaggggcagcatgttagttttgggaggcaatgtcaactgtgtctctgaattcctgtcttccaaattgaagccagaccatgctgatgacctcaagtagcactgactatttgacaatagggctgataatgtaatcggcttgaattttgacttagtaactttttatgtaatactttcggagaaattctctttaggacaaagcagagagtccaatttattgagggatagattgtatctcttaaagtggtcatattattattaattttgccaaaagaagaagaatttattgaatatttatactataaaatgcagtaacattctacttgcttattacatttaaatccttgtgtaactgaatgtttacatgtcaagaggaaaagctgtaagaaaatgctgtcacagacccatccctgtggcatcgtcagcagaatactgcttgcttacaatctttattatgcattcttataacataacctcagagtatctttaccaaaggtttttaaagtaaatctctttttaagatagacttattcttttataataatgaatgtgcactcatacatatgtagaaacatttagatttagagttttttttttctttcacaaggtataataaggaaaggatcctacaatattttattctagggtttcttaaatatatgatttatattactgtcttttctattaatcatttgatttaaacaatgccaagtcactcttttttagttgcatgaaattttgcctgcaacagagagaaaaagattgtattactttaatgattataatcatactgtctgctgatataatatcataattgttgtggtttaaatacataaatagtagaaaaatcagagtctataacagaaagtttgtaaaaatatactgattttgaaaagtatcaggaatataaatatttggtaattctgtgtaacaagagagacatggaaaaggaaaaaaatccactatatcatgggctctgcagaacatatcaaaataggatttcttaaatttttcaacccccagaccatactgactcaacatggagtctcactggccaagaaaattgcctttaaaactcgaaaataaggccaggtgtggtgactcacacttgtaatcccagcaatttgggaggctgagacaggaggattgcctgaggccaggagtttgacaccagcctgggcaacatagtgagaccttgtctctacaaaaaataaaataaaataaaaaccaaattagccagacatggtggcatgcgcttgtttaaaaaaacaaataaataaataatcgactcaaaaataagtcatgtgtcccagcataaggcatcaggttgttagatgctggcatctctgcagctcaaagatgtgggttctttttcttgtcattaacacattgttatttctgtaggagcaacttctctgatcaaaattacttttctgggtatgtgctgattaagggggtggacttatcaacactataattgttccctatgaaagattccacagagatgtttatggtgaggtttaaaggatatgaaactctacatttaaacaagtattttatatttgggtacagaggaagaaagagagggctttttccatggggctatagtagagagttagtggaatatagacaggactctgaaaacacaacttccagccatttttttagttagtaaaaatcctattaatgtgaaccagccaggaataacagtgttatttctattggatatggtttgggcttctcttgtcaaatctgtgtcggctgccccctgatccttccattatcaagttttgaagggtgttggggaaattatggcagctgctagggagatcagggaaacactgatgtaacctcaaagcctctcaccattcctcttggcttggaaaggctttattttttcatatacatttctagaaatattgctattctaccttagtatttcacatttgtagttcaaacaagcgattgtccatctgttgcctagagctatagtacatgtgtgttatgaatgaaatatgacagcatgttccatacccctgctttagccatctgtgggaaaccagcaaactgaaaaagacacctctgcaaaatgtgcctcaagtccatttcttgggatcgctcgtttggtgcactctcgtgggagacaatcagagaacaacatatacttgtgccttattttcaaagaatctatttacactactatgaatattccactgaagagtcaatgatgtaaatgataaccaccaaatctcaaaaatatactcaccaaaaagtaaaaaagtaaaaaaaaaaaaaaaagaaagaaagaaaagaaagagagagaagtcaacttttcatcttaatatattctagtagtatttattttttccttgtcttggaagtatctcataggtctttaaatgagtaaaacatttttatgccagaaggtgatataatggatgttagtgttttttatttgattttacagtagttttagtcagataatgaggacagagacttcaacttgattctttaccaccattcagcatattttttaattgtcttcattgtatttgcttaatagtggtccagacaagttcaaaacttgttctcagtgaggcattaatatggtgcaaccatgaatatttcaggccaagttattcacttgacagataactagaatgaaacttttctcatgaggctgttgtttggttagcatagccttatttcaaaccttaaaaagttacctgactgaagctactatgacttggtaaggattcttcctctcttgctttcttcctcccttcctttcttcctcttccttcctcctcttcttattttctttcctactttccatcctacctattagtgttgctgtacttggattttttgtaaattaaatcaatgcattatgattttagggaattatgattatattcataaggggaaggctaccagaaaatatatgtggcatccataaaatcttcttttataggggcatattttttaggttgtatttattcgtaaagtgaaatgagataatagagtctttctgtaacatgttaatgaattttcatcagggactgaggtcatagattcttggaaaattcatttgtgactgatctagttttctcagctgtatgcaaagtaatctttcaaagactaggttaagattttttttttaagtctgaagcaatgtaaccccaaatctcaaaaatatactcaccaaaaagta

SEQ ID NO: 417004 - DNA, 2944 bp, Homo sapiens
tgtaactgaatgtttacacaaggatttaaatgtaataagcaagtagaatgttactgcattttatatttaaatccttgtgtaactgaatgtttacatgtcaagaggaaaagctgtaagaaaatgctgtcacagacccatccctgtggcatcgtcagcagaatactgcttgcttacaatctttattatgcattcttataacataacctcagagtatctttaccaaaggtttttaaagtaaatctctttttaagatagacttattcttttataataatgaatgtgcactcatacatatgtagaaacatttagatttagagttttttttttctttcacaaggtataataaggaaaggatcctacaatattttattctagggtttcttaaatatatgatttatattactgtcttttctattaatcatttgatttaaacaatgccaagtcactcttttttagttgcatgaaattttgcctgcaacagagagaaaaagattgtattactttaatgattataatcatactgtctgctgatataatatcataattgttgtggtttaaatacataaatagtagaaaaatcagagtctataacagaaagtttgtaaaaatatactgattttgaaaagtatcaggaatataaatatttggtaattctgtgtaacaagagagacatggaaaaggaaaaaaatccactatatcatgggctctgcagaacatatcaaaataggatttcttaaatttttcaacccccagaccatactgactcaacatggagtctcactggccaagaaaattgcctttaaaactcgaaaataaggccaggtgtggtgactcacacttgtaatcccagcaatttgggaggctgagacaggaggattgcctgaggccaggagtttgacaccagcctgggcaacatagtgagaccttgtctctacaaaaaataaaataaaataaaaaccaaattagccagacatggtggcatgcgcttgtttaaaaaaacaaataaataaataatcgactcaaaaataagtcatgtgtcccagcataaggcatcaggttgttagatgctggcatctctgcagctcaaagatgtgggttctttttcttgtcattaacacattgttatttctgtaggagcaacttctctgatcaaaattacttttctgggtatgtgctgattaagggggtggacttatcaacactataattgttccctatgaaagattccacagagatgtttatggtgaggtttaaaggatatgaaactctacatttaaacaagtattttatatttgggtacagaggaagaaagagagggctttttccatggggctatagtagagagttagtggaatatagacaggactctgaaaacacaacttccagccatttttttagttagtaaaaatcctattaatgtgaaccagccaggaataacagtgttatttctattggatatggtttgggcttctcttgtcaaatctgtgtcggctgccccctgatccttccattatcaagttttgaagggtgttggggaaattatggcagctgctagggagatcagggaaacactgatgtaacctcaaagcctctcaccattcctcttggcttggaaaggctttattttttcatatacatttctagaaatattgctattctaccttagtatttcacatttgtagttcaaacaagcgattgtccatctgttgcctagagctatagtacatgtgtgttatgaatgaaatatgacagcatgttccatacccctgctttagccatctgtgggaaaccagcaaactgaaaaagacacctctgcaaaatgtgcctcaagtccatttcttgggatcgctcgtttggtgcactctcgtgggagacaatcagagaacaacatatacttgtgccttattttcaaagaatctatttacactactatgaatattccactgaagagtcaatgatgtaaatgataaccaccaaatctcaaaaatatactcaccaaaaagtaaaaaagtaaaaaaaaaaaaaaaagaaagaaagaaaagaaagagagagaagtcaacttttcatcttaatatattctagtagtatttattttttccttgtcttggaagtatctcataggtctttaaatgagtaaaacatttttatgccagaaggtgatataatggatgttagtgttttttatttgattttacagtagttttagtcagataatgaggacagagacttcaacttgattctttaccaccattcagcatattttttaattgtcttcattgtatttgcttaatagtggtccagacaagttcaaaacttgttctcagtgaggcattaatatggtgcaaccatgaatatttcaggccaagttattcacttgacagataactagaatgaaacttttctcatgaggctgttgtttggttagcatagccttatttcaaaccttaaaaagttacctgactgaagctactatgacttggtaaggattcttcctctcttgctttcttcctcccttcctttcttcctcttccttcctcctcttcttattttctttcctactttccatcctacctattagtgttgctgtacttggattttttgtaaattaaatcaatgcattatgattttagggaattatgattatattcataaggggaaggctaccagaaaatatatgtggcatccataaaatcttcttttataggggcatattttttaggttgtatttattcgtaaagtgaaatgagataatagagtctttctgtaacatgttaatgaattttcatcagggactgaggtcatagattcttggaaaattcatttgtgactgatctagttttctcagctgtatgcaaagtaatctttcaaagactaggttaagattttttttttaagtctgaagcaatgtaaccccaaatctcaaaaatatactcaccaaaaagta

SEQ ID NO: 417005 - DNA, 3362 bp, Homo sapiens
agcgggtacaggagtttttcaaggctgaccacagtctaggcagaagaaattgcaattgtgaaaggaagatttgcgtgaaagaatggtgtttttggctgagtgaggaatttgaagtatctggaaaatggaagctccactggttcaacagcctctcctccagtttcgaccccagtcacaggacacaagagaatggtcatcccgaaccaaccccctctaacagcaaccaagaagtctacattgaaaccacagcctgcaccccaggctggacccatccctgtggctccaatcggaacactcaaaccccagcctcagccagtcccagcctcctacaccacggcctccacttcttcaaggcctacctttaatgtgcaggtgaagtcagcccagcccagccctcattatatggctgccccttcatcaggacaaatttatggctcagggccccagggctataacactcagccagttcctgtctctgggcagtgtccacctccttcaacacggggaggcatggattatgcctacattccaccaccaggacttcagccggagcctgggtatgggtatgcccccaaccagggacgctattatgaaggctactatgcagcagggccaggctatgggggcagaaatgactctgaccctacctatggtcaacaaggtcacccaaatacctggaaacgggaaccagggtacactcctcctggagcagggaaccagaaccctcctgggatgtatccagtcactggtcccaagaagacctatatcacagatcctgtttcagccccctgtgcgccaccattgcagccaaagggtggccattcagggcaactggggccttcgtcagttgccccttcattccgcccagaggatgagcttgagcacctgaccaaaaagatgctgtatgacatggaaaatccacctgctgacgaatactttggccgctgtgctcgctgtggagaaaacgtagttggggaaggtacaggatgcactgccatggatcaggtcttccacgtggattgttttacctgcatcatctgcaacaacaagctccgagggcagccattctatgctgtggaaaagaaagcatactgcgagccctgctacattaatactctggagcagtgcaatgtgtgttccaagcccatcatggagcggattctccgagccaccgggaaggcctatcatcctcactgtttcacctgcgtgatgtgccaccgcagcctggatgggatcccattcactgtggatgctggcgggctcattcactgcattgaggacttccacaagaaatttgccccgcgatgttctgtgtgcaaggagcctattatgccagccccgggccaggaggagactgtccgtattgtggctttggatcgagatttccatgttcactgctaccgatgcgaggattgcggtggtctcctgtctgaaggagataaccaaggctgctaccccttggatgggcacatcctctgcaagacctgcaactctgcccgcatcagggtgttgaccgccaaggcgagcactgacctttagattcagtcacctgttcagccggcactgagaagaacgaacacaagaaaaagataagaaatactagagtaaaggccatcaaactacgcgatagtctctgttcttcatctgctattaaccttgccttagaaacacataaattatgagatttttttttaaaagttgttaccaaatacacatttcacattgaatcatgtaggatcttgatgggcctttgttcccaaggacttccacatttttgcacagattatgctccatcccattcacttctgcattcctgtaacttttaatccctatgtttgtctcacttttcatctggttgaatggcttttcttagtgtggtatttgctgtcacatagtttttcctgggtgagtctgccaactcacaggtgcttttaggcttgaaatctccatcctatcatttccgttttgcctgtgactgtaaagagtagccattcttttcccatgtattgaagaggatattcttctcttgctttatactactcacgtccttggggagggaaatgcacaatttttttttgttaggctgtaaagaatttaagctgtaaattacataagttagaacaagcccaaatttaatttgcaaccatcagaattcagaatctatagtgaccagtgatcaaggctaattggaaaagagttatcggcccatagctaataagtagtgacagacaaccaagcttcaatatttttctaaagaaattacaggtgggatatgctagaaaaggcattttggggttatgtttaaaaaaacattattgtcccacaatattaccttaagatttttcttttccgcactacctgaacattgtaatacagacaaacttgatttcttctagaagataacattttcaatactgtcccacttctcatcttaaaaatattgtcatgtttattctaatatccaacacaactatcaaaattgcctttttctctagaggatgaaggctgtgaaaaaaccgttcaaattctcttctttttcttttttattaccaggtccattttgcctgacaattgcaaatcagagcatacaaaataaaactgtgcagttttgtttggtttactttcaaaagagtagaaagcttgaaaagattctgaaaccacagtttcattattctcataatccttctgcaactgaaattacatattgcaggagacattttcatatcatcaatgtgacatttacaccacactttcaaagacaatcactgaaacaaaaattgtctttatgagctaaaaatatgcagaatctctgcctagaatctttattcaaacttttattagccagtgaaacacttgcttgccaactgccaagccatacttattaagttcgaacatgtttcacttaaggagagacacctagcttagtcatggcaagttgccattttgtaaactaaggattttggactgagatttcttaaatctttcttcaaatctcccacaagtatatacttttaaattatggagtattttaagtctacaaaaaggtataaataataatataatgaattcctatatacctaatacccagtttaagacaccaaatataacaagtataattacatcctccaatgtaccgtttccttattccacagatatctttttcactattgtgaagtgatgttcagatttctagttttttttctagtttttaattttaacatcagaactgaaataaaaaattatggatacgtgttttgaattgcaaactattcctcaggaattccaattaaatttattttacttgaataggaatgatcataaaagtgatggttccccgctatacatggacggcgcccagcgag

SEQ ID NO: 417006 - DNA, 1081 bp, Homo sapiens
agcgggtacaggagtttttcaaggctgaccacagtctaggcagaagaaattgcaattgtgaaaggaagatttgcgtgaaagaatggtgtttttggctgagtgaggaatttgaagtatctggaaaatggaagctccactggttcaacagcctctcctccagtttcgaccccagtcacaggacacaagagaatggtcatcccgaaccaaccccctctaacagcaaccaagaagtctacattgaaaccacagcctgcaccccaggctggacccatccctgtggctccaatcggaacactcaaaccccagcctcagccagtcccagcctcctacaccacggcctccacttcttcaaggcctacctttaatgtgcaggtgaagtcagcccagcccagccctcattatatggctgccccttcatcaggacaaatttatggctcagggccccagggctataacactcagccagttcctgtctctgggcagtgtccacctccttcaacacggggaggcatggattatgcctacattccaccaccaggacttcagccggagcctgggtatgggtatgcccccaaccagggacgctattatgaaggctactatgcagcagggccaggctatgggggcagaaatgactctgaccctacctatggtcaacaaggtcacccaaatacctggaaacgggaaccagggtacactcctcctggagcagggaaccagaaccctcctgggatgtatccagtcactggtcccaagaagacctatatcacagatcctgtttcagccccctgtgcgccaccattgcagccaaagggtggccattcagggcaactggggccttcgtcagttgccccttcattccgcccagaggatgagcttgagcacctgaccaaaaagatgctgtatgacatggaaaatccacctgctgacgaatactttgaatgctgataatgccaagctgtgtttacagtccaaatttttgctgaagaccttcaactttgcactctccctgtgtggtatctcttgcccaagacagaacttcaaataaaatcacatagctgatgcaagaaaccgttaaaaa

SEQ ID NO: 417007 - DNA, 1117 bp, Homo sapiens
  misc_feature (1117)..(1117): n is a, c, g, or t
cacgaggggtatttgctttcatttctaatgaaatttcaggcctctagggtaggatatcaaaattggtagatcatttgcaatttattttatcccaaacacctcactttacagtcagagaaactgaggcccagagaagtaaaatgagttgctcaaggtctcagagagcaagaaatagagatgggacttgagcacctagatctctggtattgctgtcctgtagttcatggagctggcagatggatacatctgtgacctgggatgatggagagactgctggacccttcagaggatctcatctcaagattccaacaatgtctcacccatcttggctgccacccaaaagcactggtgagcccctcggccatgtgcctgcacggatggagaccacccattcctttgggaaccccagcatttcagtgtctacacaacagccacccaaaaagtttgccccggtagttgctccaaaacctaagtacaacccatacaaacaacctggaggtgagggtgattttcttccacccccacctccacctctagatgattccagtgcccttccatctatctctggaaactttcctcctccaccacctcttgatgaagaggctttcaaagtacaggggaatcccggaggcaagacacttgaggagaggcgctccagcctggacgctgagattgactccttgaccagcatcttggctgaccttgagtgcagctccccctataagcctcggcctccacagaggaaagcagctaaacaggatgttggctggtaacaccagcaaagtggaatcaacctcaaaggagatggtgtcagagtggtgttcaatgcctgagcttctaccgagtgagtcacttgtgtgaaaatgtcttgacacagatagaattgaggtgcccacactatatctgatcacagaaatgttaatgcagaatagcaaactggctttcatcttcatgggattgcaggctgggggataaaagggggtgcatttttaaaggtcatctctattgcttatgagaaaacaatgtatcacatcccatgcatctgtgggactgtgtatcaagaatcagaaataaatcatggcctcgttggcatcagcggtggagctgttcggccagn

SEQ ID NO: 417008 - DNA, 884 bp, Homo sapiens
cacgaggggtatttgctttcatttctaatgaaatttcaggcctctagggtaggatatcaaaattggtagatcatttgcaatttattttatcccaaacacctcactttacagtcagagaaactgaggcccagagaagtaaaatgagttgctcaaggtctcagagagcaagaaatagagatgggacttgagcacctagatctctggtattgctgtcctgtagttcatggagctggcagatggatacatctgtgacctgggatgatggagagactgctggacccttcagaggatctcatctcaagattccaacaatgtctcacccatcttggctgccacccaaaagcactggtgagcccctcggccatgtgcctgcacggatggagaccacccattcctttgggaaccccagcatttcagtgtctacacaacagccacccaaaaagtttgccccggtagttgctccaaaacctaagtacaacccatacaaacaacctggaggtgagggtgattttcttccacccccacctccacctctagatgattccagtgcccttccatctatctctggaaactttcctcctccaccacctcttgatgaagaggctttcaaagtacaggtaagagctgaagttaaagtcatgttaggtaagagctgaagttaaagtcatgtttataagccatcctagggagctcatgaatttcatgagtgtttctgtgctggataaacatttatccagagcctattgagagctttacaacttatgaagatctaaggtactttaatgcaacatacccaactcaagcttcccagagttctgctggcttaccctctgaagccctcaaaatacttttgcctactaattttgtttcagatcccaaagcca

SEQ ID NO: 417009 - DNA, 208 bp, Homo sapiens
agggactgaggtcatagattcttggaaaattcatttgtgactgatctagttttctcagctgtatgcaaagtaatctttcaaagactaggttaagattttttttttaagtctgaagcaatgtaaccccaaaaaattataattttaatgatggcattttattttattccattgcagcttgataactttccttatagcaaaggaataacta

SEQ ID NO: 417010 - DNA, 374 bp, Homo sapiens
tctctagtagcccttaatcattgtaccatctctctctaatgcctataagggaactgtttaaatatagtccatatgggaaaagtaacctcaacatgttgtaacagggggcagaaaaacacgctgaatagatgaaaggaacaatctacaggttaattagtagtatggccacaaatatgtgcacagttttgtttcagaaataaagcaagctgtatttgttgtaactatctcttctttgaacttaacagaatgctgataatgccaagctgtgtttacagtccaaatttttgctgaagaccttcaactttgcactctccctgtgtggtatctcttgcccaagacagaacttcaaataaaatcacatagctgatgcaaga

SEQ ID NO: 417011 - DNA, 3264 bp, Homo sapiens
agcgggtacaggagtttttcaaggctgaccacagtctaggcagaagaaattgcaattgtgaaaggaagatttgcgtgaaagaatggtgtttttggctgagtgaggaatttgaagtatctggaaaatggaagctccactggttcaacagcctctcctccagtttcgaccccagtcacaggacacaagagaatggtcatcccgaaccaaccccctctaacagcaaccaagaagtctacattgaaaccacagcctgcaccccaggctggacccatccctgtggctccaatcggaacactcaaaccccagcctcagccagtcccagcctcctacaccacggcctccacttcttcaaggcctacctttaatgtgcaggtgaagtcagcccagcccagccctcattatatggctgccccttcatcaggacaaatttatggctcagggccccagggctataacactcagccagttcctgtctctgggcagtgtccacctccttcaacacggggaggcatggattatgcctacattccaccaccaggacttcagccggagcctgggtatgggtatgcccccaaccagggacgctattatgaaggctactatgcagcagggccaggctatgggggcagaaatgactctgaccctacctatggtcaacaaggtcacccaaatacctggaaacgggaaccagggtacactcctcctggagcagggaaccagaaccctcctgggatgtatccagtcactggtcccaagaagacctatatcacagatcctgtttcagccccctgtgcgccaccattgcagccaaagggtggccattcagggcaactggggccttcgtcagttgccccttcattccgcccagaggatgagcttgagcacctgaccaaaaagatgctgtatgacatggaaaatccacctgctgacgaatactttggccgctgtgctcgctgtggagaaaacgtagttggggaaggtacaggatgcactgccatggatcaggtcttccacgtggattgttttacctgcatcatctgcaacaacaagctccgagggcagccattctatgctgtggaaaagaaagcatactgcgagccctgctacattaatactctggagcagtgcaatgtgtgttccaagcccatcatggagcggattctccgagccaccgggaaggcctatcatcctcactgtttcacctgcgtgatgtgccaccgcagcctggatgggatcccattcactgtggatgctggcgggctcattcactgcattgaggacttccacaagaaatttgccccgcgatgttctgtgtgcaaggagcctattatgccagccccgggccaggaggagactgtccgtattgtggctttggatcgagatttccatgttcactgctaccgatgcgaggattgcggtggtctcctgtctgaaggagataaccaaggctgctaccccttggatgggcacatcctctgcaagacctgcaactctgcccgcatcagggtgttgaccgccaaggcgagcactgacctttagattcagtcacctgttcagccggcactgagaagaacgaacacaagaaaaagataagaaatactagagtaaaggccatcaaactacgcgatagtctctgttcttcatctgctattaaccttgccttagaaacacataaattatgagatttttttttaaaagttgttaccaaatacacatttcacattgaatcatgtaggatcttgatgggcctttgttcccaaggacttccacatttttgcacagattatgctccatcccattcacttctgcattcctgtaacttttaatccctatgtttgtctcacttttcatctggttgaatggcttttcttagtgtggtatttgctgtcacatagtttttcctgggtgagtctgccaactcacaggtgcttttaggcttgaaatctccatcctatcatttccgttttgcctgtgactgtaaagagtagccattcttttcccatgtattgaagaggatattcttctcttgctttatactactcacgtccttggggagggaaatgcacaatttttttttgttaggctgtaaagaatttaagctgtaaattacataagttagaacaagcccaaatttaatttgcaaccatcagaattcagaatctatagtgaccagtgatcaaggctaattggaaaagagttatcggcccatagctaataagtagtgacagacaaccaagcttcaatatttttctaaagaaattacaggtgggatatgctagaaaaggcattttggggttatgtttaaaaaaacattattgtcccacaatattaccttaagatttttcttttccgcactacctgaacattgtaatacagacaaacttgatttcttctagaagataacattttcaatactgtcccacttctcatcttaaaaatattgtcatgtttattctaatatccaacacaactatcaaaattgcctttttctctagaggatgaaggctgtgaaaaaaccgttcaaattctcttctttttcttttttattaccaggtccattttgcctgacaattgcaaatcagagcatacaaaataaaactgtgcagttttgtttggtttactttcaaaagagtagaaagcttgaaaagattctgaaaccacagtttcattattctcataatccttctgcaactgaaattacatattgcaggagacattttcatatcatcaatgtgacatttacaccacactttcaaagacaatcactgaaacaaaaattgtctttatgagctaaaaatatgcagaatctctgcctagaatctttattcaaacttttattagccagtgaaacacttgcttgccaactgccaagccatacttattaagttcgaacatgtttcacttaaggagagacacctagcttagtcatggcaagttgccattttgtaaactaaggattttggactgagatttcttaaatctttcttcaaatctcccacaagtatatacttttaaattatggagtattttaagtctacaaaaaggtataaataataatataatgaattcctatatacctaatacccagtttaagacaccaaatataacaagtataattacatcctccaatgtaccgtttccttattccacagatatctttttcactattgtgaagtgatgttcagatttctagttttttttctagtttttaattttaacatcagaactgaaataaaaaattatggatacgtgttttgaattgca

SEQ ID NO: 417012 - DNA, 1622 bp, Homo sapiens
agcgggtacaggagtttttcaaggctgaccacagtctaggcagaagaaattgcaattgtgaaaggaagatttgcgtgaaagaatggtgtttttggctgagtgaggaatttgaagtatctggaaaatggaagctccactggttcaacagcctctcctccagtttcgaccccagtcacaggacacaagagaatggtcatcccgaaccaaccccctctaacagcaaccaagaagtctacattgaaaccacagcctgcaccccaggctggacccatccctgtggctccaatcggaacactcaaaccccagcctcagccagtcccagcctcctacaccacggcctccacttcttcaaggcctacctttaatgtgcaggtgaagtcagcccagcccagccctcattatatggctgccccttcatcaggacaaatttatggctcagggccccagggctataacactcagccagttcctgtctctgggcagtgtccacctccttcaacacggggaggcatggattatgcctacattccaccaccaggacttcagccggagcctgggtatgggtatgcccccaaccagggacgctattatgaaggctactatgcagcagggccaggctatgggggcagaaatgactctgaccctacctatggtcaacaaggtcacccaaatacctggaaacgggaaccagggtacactcctcctggagcagggaaccagaaccctcctgggatgtatccagtcactggtcccaagaagacctatatcacagatcctgtttcagccccctgtgcgccaccattgcagccaaagggtggccattcagggcaactggggccttcgtcagttgccccttcattccgcccagaggatgagcttgagcacctgaccaaaaagatgctgtatgacatggaaaatccacctgctgacgaatactttggccgctgtgctcgctgtggagaaaacgtagttggggaaggtacaggatgcactgccatggatcaggtcttccacgtggattgttttacctgcatcatctgcaacaacaagctccgagggcagccattctatgctgtggaaaagaaagcatactgcgagccctgctacattaatactctggagcagtgcaatgtgtgttccaagcccatcatggagcggattctccgagccaccgggaaggcctatcatcctcactgtttcacctgcgtgatgtgccaccgcagcctggatgggatcccattcactgtggatgctggcgggctcattcactgcattgaggacttccacaagaaatttgccccgcgatgttctgtgtgcaaggagcctattatgccagccccgggccaggaggagactgtccgtattgtggctttggatcgagatttccatgttcactgctaccgatgcgaggattgcggtggtctcctgtctgaaggagataaccaaggctgctaccccttggatgggcacatcctctgcaagacctgcaactctgcccgcatcagggtgttgaccgccaaggcgagcactgacctttagattcagtcacctgttcagccggcactgagaagaacgaacacaagaaaaagataagaaatactagagtaaaggccatcaaacta

SEQ ID NO: 417013 - DNA, 1053 bp, Homo sapiens
agcgggtacaggagtttttcaaggctgaccacagtctaggcagaagaaattgcaattgtgaaaggaagatttgcgtgaaagaatggtgtttttggctgagtgaggaatttgaagtatctggaaaatggaagctccactggttcaacagcctctcctccagtttcgaccccagtcacaggacacaagagaatggtcatcccgaaccaaccccctctaacagcaaccaagaagtctacattgaaaccacagcctgcaccccaggctggacccatccctgtggctccaatcggaacactcaaaccccagcctcagccagtcccagcctcctacaccacggcctccacttcttcaaggcctacctttaatgtgcaggtgaagtcagcccagcccagccctcattatatggctgccccttcatcaggacaaatttatggctcagggccccagggctataacactcagccagttcctgtctctgggcagtgtccacctccttcaacacggggaggcatggattatgcctacattccaccaccaggacttcagccggagcctgggtatgggtatgcccccaaccagggacgctattatgaaggctactatgcagcagggccaggctatgggggcagaaatgactctgaccctacctatggtcaacaaggtcacccaaatacctggaaacgggaaccagggtacactcctcctggagcagggaaccagaaccctcctgggatgtatccagtcactggtcccaagaagacctatatcacagatcctgtttcagccccctgtgcgccaccattgcagccaaagcttcttctcagcctgttgataaccatgttagcccatcttccttcttgggccagacaccagcatctccagccagatactccccagtttctaaagcagtacttggagatgatgaaattacaagggaacctagaaaagttgttcttcatcgtggctcaacggaccttggtttcaacattgtaggaggagaagatggagaaggaatattatttccttatcttagcaaggagctcacagagctgg

SEQ ID NO: 417014 - DNA, 2488 bp, Homo sapiens
ttcaagggacgtcattcatttcccccagtgaccttgacaagtcagaagcttgaaagcagggaaatccggatgtctcggttatgaagtggagcagtgagtgtgagcctcaacatagttccagaactctccatccggactagttattgagcatctgcctctcatatcaccagtggccatctgaggtgtttccctggctctgaaggggtaggcacgatggccaggtgcttcagcctggtgttgcttctcacttccatctggaccacgaggctcctggtccaaggctctttgcgtgcagaagagctttccatccaggtgtcatgcagaattatggggatcacccttgtgagcaaaaaggcgaaccagcagctgaatttcacagaagctaaggaggcctgtaggctgctgggactaagtttggccggcaaggaccaagttgaaacagccttgaaagctagctttgaaacttgcagctatggctgggttggagatggattcgtggtcatctctaggattagcccaaaccccaagtgtgggaaaaatggggtgggtgtcctgatttggaaggttccagtgagccgacagtttgcagcctattgttacaactcatctgatacttggactaactcgtgcattccagaaattatcaccaccaaagatcccatattcaacactcaaactgcaacacaaacaacagaatttattgtcagtgacagtacctactcggtggcatccccttactctacaatacctgcccctactactactcctcctgctccagcttccacttctattccacggagaaaaaaattgatttgtgtcacagaagtttttatggaaactagcaccatgtctacagaaactgaaccatttgttgaaaataaagcagcattcaagaatgaagctgctgggtttggaggtgtccccacggctctgctagtgcttgctctcctcttctttggtgctgcagctggtcttggattttgctatgtcaaaaggtatgtgaaggccttcccttttacaaacaagaatcagcagaaggaaatgatcgaaaccaaagtagtaaaggaggagaaggccaatgatagcaaccctaatgaggaatcaaagaaaactgataaaaacccagaagagtccaagagtccaagcaaaactaccgtgcgatgcctggaagctgaagtttagatgagacagaaatgaggagacacacctgaggctggtttctttcatgctccttaccctgccccagctggggaaatcaaaagggccaaagaaccaaagaagaaagtccacccttggttcctaactggaatcagctcaggactgccattggactatggagtgcaccaaagagaatgcccttctccttattgtaaccctgtctggatcctatcctcctacctccaaagcttcccacggcctttctagcctggctatgtcctaataatatcccactgggagaaaggagttttgcaaagtgcaaggacctaaaacatctcatcagtatccagtggtaaaaaggcctcctggctgtctgaggctaggtgggttgaaagccaaggagtcactgagaccaaggctttctctactgattccgcagctcagaccctttcttcagctctgaaagagaaacacgtatcccacctgacatgtccttctgagcccggtaagagcaaaagaatggcagaaaagtttagcccctgaaagccatggagattctcataacttgagacctaatctctgtaaagctaaaataaagaaatagaacaaggctgaggatacgacagtacactgtcagcagggactgtaaacacagacagggtcaaagtgttttctctgaacacattgagttggaatcactgtttagaacacacacacttactttttctggtctctaccactgctgatattttctctaggaaatatacttttacaagtaacaaaaataaaaactcttataaatttctatttttatctgagttacagaaatgattactaaggaagattactcagtaatttgtttaaaaagtaataaaattcaacaaacatttgctgaatagctactatatgtcaagtgctgtgcaaggtattacactctgtaattgaatattattcctcaaaaaattgcacatagtagaacgctatctgggaagctatttttttcagttttgatatttctagcttatctacttccaaactaatttttatttttgctgagactaatcttattcattttctctaatatggcaaccattataaccttaatttattattaacatacctaagaagtacattgttacctctatataccaaagcacattttaaaagtgccattaacaaatgtatcactagccctcctttttccaacaagaagggactgagagatgcagaaatatttgtgacaaaaaattaaagcatttagaaaacttctttgctttcttatttacgtagatgcattatacctttcatgtaaaattaaagtgaggaccag

SEQ ID NO: 417015 - DNA, 2432 bp, Homo sapiens
  misc_feature (300)..(300): n is a, c, g, or t
  misc_feature (315)..(316): n is a, c, g, or t
  misc_feature (337)..(338): n is a, c, g, or t
  misc_feature (363)..(364): n is a, c, g, or t
  misc_feature (370)..(370): n is a, c, g, or t
  misc_feature (404)..(404): n is a, c, g, or t
  misc_feature (411)..(412): n is a, c, g, or t
  misc_feature (432)..(432): n is a, c, g, or t
  misc_feature (435)..(435): n is a, c, g, or t
ttcaagggacgtcattcatttcccccagtgaccttgacaagtcagaagcttgaaagcagggaaatccggatgtctcggttatgaagtggagcagtgagtgtgagcctcaacatagttccagaactctccatccggactagttattgagcatctgcctctcatatcaccagtggccatctgaggtgtttccctggctctgaaggggtaggcacgatggccaggtgcttcagcctggtgttgcttctcacttccatctggaccacgaggctcctggtccaaggctctttgcgtgcagaagtnttttttcttttcttnnttttttttgcagatttttttnngattatttttttttttttttaattnntttttnttttttttttttttttttttatttttttgttttnttttttnnttgtttttgttttttttttnttngtttttgtttattttttatttgccttgaaagctagctttgaaacttgcctatggctgggttggagatggattcgtggtcatctctaggattagcccaaaccccaagtgtgggaaaaatggggtgggtgtcctgatttggaaggttccagtgagccgacagtttgcagcctattgttacaactcatctgatacttggactaactcgtgcattccagaaattatcaccaccaaagatcccatattcaacactcaaactgcaacacaaacaacagaatttattgtcagtgacagtacctactcggtggcatccccttactctacaatacctgcccctactactactcctcctgctccagcttccacttctattccacggagaaaaaaattgatttgtgtcacagaagtttttatggaaactagcaccatgtctacagaaactgaaccatttgttgaaaataaagcagcattcaagaatgaagctgctgggtttggaggtgtccccacggctctgctagtgcttgctctcctcttctttggtgctgcagctggtcttggattttgctatgtcaaaaggtatgtgaaggccttcccttttacaaacaagaatcagcagaaggaaatgatcgaaaccaaagtagtaaaggaggagaaggccaatgatagcaaccctaatgaggaatcaaagaaaactgataaaaacccagaagagtccaagagtccaagcaaaactaccgtgcgatgcctggaagctgaagtttagatgagacagaaatgaggagacacacctgaggctggtttctttcatgctccttaccctgccccagctggggaaatcaaaagggccaaagaaccaaagaagaaagtccacccttggttcctaactggaatcagctcaggactgccattggactatggagtgcaccaaagagaatgcccttctccttattgtaaccctgtctggatcctatcctcctacctccaaagcttcccacggcctttctagcctggctatgtcctaataatatcccactgggagaaaggagttttgcaaagtgcaaggacctaaaacatctcatcagtatccagtggtaaaaaggcctcctggctgtctgaggctaggtgggttgaaagccaaggagtcactgagaccaaggctttctctactgattccgcagctcagaccctttcttcagctctgaaagagaaacacgtatcccacctgacatgtccttctgagcccggtaagagcaaaagaatggcagaaaagtttagcccctgaaagccatggagattctcataacttgagacctaatctctgtaaagctaaaataaagaaatagaacaaggctgaggatacgacagtacactgtcagcagggactgtaaacacagacagggtcaaagtgttttctctgaacacattgagttggaatcactgtttagaacacacacacttactttttctggtctctaccactgctgatattttctctaggaaatatacttttacaagtaacaaaaataaaaactcttataaatttctatttttatctgagttacagaaatgattactaaggaagattactcagtaatttgtttaaaaagtaataaaattcaacaaacatttgctgaatagctactatatgtcaagtgctgtgcaaggtattacactctgtaattgaatattattcctcaaaaaattgcacatagtagaacgctatctgggaagctatttttttcagttttgatatttctagcttatctacttccaaactaatttttatttttgctgagactaatcttattcattttctctaatatggcaaccattataaccttaatttattattaacatacctaagaagtacattgttacctctatataccaaagcacattttaaaagtgccattaacaaatgtatcactagccctcctttttccaacaagaagggactgagagatgcagaaatatttgtgacaaaaaattaaagcatttag

SEQ ID NO: 417016 - DNA, 1413 bp, Homo sapiens
ttcaagggacgtcattcatttcccccagtgaccttgacaagtcagaagcttgaaagcagggaaatccggatgtctcggttatgaagtggagcagtgagtgtgagcctcaacatagttccagaactctccatccggactagttattgagcatctgcctctcatatcaccagtggccatctgaggtgtttccctggctctgaaggggtaggcacgatggccaggtgcttcagcctggtgttgcttctcacttccatctggaccacgaggctcctggtccaaggctctttgcgtgcagaagagctttccatccaggtgtcatgcagaattatggggatcacccttgtgagcaaaaaggcgaaccagcagctgaatttcacagaagctaaggagttttgcaaagtgcaaggacctaaaacatctcatcagtatccagtggtaaaaaggcctcctggctgtctgaggctaggtgggttgaaagccaaggagtcactgagaccaaggctttctctactgattccgcagctcagaccctttcttcagctctgaaagagaaacacgtatcccacctgacatgtccttctgagcccggtaagagcaaaagaatggcagaaaagtttagcccctgaaagccatggagattctcataacttgagacctaatctctgtaaagctaaaataaagaaatagaacaaggctgaggatacgacagtacactgtcagcagggactgtaaacacagacagggtcaaagtgttttctctgaacacattgagttggaatcactgtttagaacacacacacttactttttctggtctctaccactgctgatattttctctaggaaatatacttttacaagtaacaaaaataaaaactcttataaatttctatttttatctgagttacagaaatgattactaaggaagattactcagtaatttgtttaaaaagtaataaaattcaacaaacatttgctgaatagctactatatgtcaagtgctgtgcaaggtattacactctgtaattgaatattattcctcaaaaaattgcacatagtagaacgctatctgggaagctatttttttcagttttgatatttctagcttatctacttccaaactaatttttatttttgctgagactaatcttattcattttctctaatatggcaaccattataaccttaatttattattaacatacctaagaagtacattgttacctctatataccaaagcacattttaaaagtgccattaacaaatgtatcactagccctcctttttccaacaagaagggactgagagatgcagaaatatttgtgacaaaaaattaaagcatttagaaaacttctttgctttcttatttacgtagatgcattatacctttcatgtaaaattaaagtgaggaccag

SEQ ID NO: 417017 - DNA, 423 bp, Homo sapiens
gatgtaagataaagtgtatcaaggaatttcaagtaatttcagtatggcaggggcaatgagagaaaaagagcagatgaggctggcatgttagcaggggccaaatcacagaaggccttgtaggccatacaacaaagatagccactgaaggcttctaaggaagaaagtgatatggttagatttgctttttaaagaccattccagctgcggtataaggggtttggaggtagtaagactagaggcaagaagaacagttaggaggctgttgcaatacttttattccatgtttccctatcccaacagatacttggactaactcgtgcattccagaaattatcaccaccaaagatcccatattcaacactcaaactgcaacacaaacaacagaatttattgtcagtgacagtacctactcggtggcatccc

SEQ ID NO: 417018 - DNA, 639 bp, Homo sapiens
gtagggttgttggtgcactgctagtcttgtaatctttgtcatgtttctatcctgtgctttttcagggtcactgttggcattttgctgatcaaaatggagatagcagtcctctgatataaatttctccctcatctcatctctttcccttcagcccaatcttttctatttcaggacatgcatgtcgtccagccatcagtcaatgactgtcctttgaaaatcaagaaattaaaaaaaattgacatctggggaaaatttatatgctttatttgatttttggttctttgtttttgttggaagagttatgtggtcagcctaaagtctggcctgcaaacatattgtccaatttaaatgaatccattaaggtggtgatgtcttaatgtattagagcatgcatgtgctggcatcactctgaaataaaggtatccagtgtactgtgccaatatgtaccatggccaaaaagtgttatctatcgttatgtgtgagagtctctcactttaatttcatgtttctgcctaaaggtatgtgaaggccttcccttttacaaacaagaatcagcagaaggaaatgatcgaaaccaaagtagtaaaggaggagaaggccaatgatagcaaccctaatgaggaatcaaagaaaactgat

SEQ ID NO: 417019 - DNA, 2419 bp, Homo sapiens
ttcaagggacgtcattcatttcccccagtgaccttgacaagtcagaagcttgaaagcagggaaatccggatgtctcggttatgaagtggagcagtgagtgtgagcctcaacatagttccagaactctccatccggactagttattgagcatctgcctctcatatcaccagtggccatctgaggtgtttccctggctctgaaggggtaggcacgatggccaggtgcttcagcctggtgttgcttctcacttccatctggaccacgaggctcctggtccaaggctctttgcgtgcagaagagctttccatccaggtgtcatgcagaattatggggatcacccttgtgagcaaaaaggcgaaccagcagctgaatttcacagaagctaaggaggcctgtaggctgctgggactaagtttggccggcaaggaccaagttgaaacagccttgaaagctagctttgaaacttgcagctatggctgggttggagatggattcgtggtcatctctaggattagcccaaaccccaagtgtgggaaaaatggggtgggtgtcctgatttggaaggttccagtgagccgacagtttgcagcctattgttacaactcatctgatacttggactaactcgtgcattccagaaattatcaccaccaaagatcccatattcaacactcaaactgcaacacaaacaacagaatttattgtcagtgacagtacctactcggtggcatccccttactctacaatacctgcccctactactactcctcctgctccagcttccacttctattccacggagaaaaaaattgatttgtgtcacagaagtttttatggaaactagcaccatgtctacagaaactgaaccatttgttgaaaataaagcagcattcaagaatgaagctgctgggtttggaggtgtccccacggctctgctagtgcttgctctcctcttctttggtgctgcagctggtcttggattttgctatgtcaaaaggtatgtgaaggccttcccttttacaaacaagaatcagcagaaggaaatgatcgaaaccaaagtagtaaaggaggagaaggccaatgatagcaaccctaatgaggaatcaaagaaaactgataaaaacccagaagagtccaagagtccaagcaaaactaccgtgcgatgcctggaagctgaagtttagatgagacagaaatgaggagacacacctgaggctggtttctttcatgctccttaccctgccccagctggggaaatcaaaagggccaaagaaccaaagaagaaagtccacccttggttcctaactggaatcagctcaggactgccattggactatggagtgcaccaaagagaatgcccttctccttattgtaaccctgtctggatcctatcctcctacctccaaagcttcccacggcctttctagcctggctatgtcctaataatatcccactgggagaaaggagttttgcaaagtgcaaggacctaaaacatctcatcagtatccagtggtaaaaaggcctcctggctgtctgaggctaggtgggttgaaagccaaggagtcactgagaccaaggctttctctactgattccgcagctcagaccctttcttcagctctgaaagagaaacacgtatcccacctgacatgtccttctgagcccggtaagagcaaaagaatggcagaaaagtttagcccctgaaagccatggagattctcataacttgagacctaatctctgtaaagctaaaataaagaaatagaacaaggctgaggatacgacagtacactgtcagcagggactgtaaacacagacagggtcaaagtgttttctctgaacacattgagttggaatcactgtttagaacacacacacttactttttctggtctctaccactgctgatattttctctaggaaatatacttttacaagtaacaaaaataaaaactcttataaatttctatttttatctgagttacagaaatgattactaaggaagattactcagtaatttgtttaaaaagtaataaaattcaacaaacatttgctgaatagctactatatgtcaagtgctgtgcaaggtattacactctgtaattgaatattattcctcaaaaaattgcacatagtagaacgctatctgggaagctatttttttcagttttgatatttctagcttatctacttccaaactaatttttatttttgctgagactaatcttattcattttctctaatatggcaaccattataaccttaatttattattaacatacctaagaagtacattgttacctctatataccaaagcacattttaaaagtgccattaacaaatgtatcactagccctcctttttccaacaagaagggactgagagatgcagaaatatttgtgacaaaaaattaaagcatttag

SEQ ID NO: 417020 - DNA, 464 bp, Homo sapiens
aaaagcccattctttcccccactgaattgcctaggcaaccctgttgaaaaccaactggtcacagacttatggatttatttctagactcctaattctatttcattgttctaaatgtctgtctgtatccacactgtcttgattattgcagctatgtactaagttgtaaaattaggaggtctgagtcatctgcctttgtcctttttaaagacaaagttttggctgttcttcatccttttcatttccatatgaatgttatgatcagcttgccaatttctttcaaaaacaaagctgagatttttaacagggattgcattgaatctgtatatgaatttagatgtattgccatctgtattagctttctatgacttttgtaacaaattagtaccaatgaagtggcttaaaacaacaaattttatcttataatattgtaggtcagaagtcccacatgggtcttaacagcatcc

SEQ ID NO: 417021 - DNA, 929 bp, Homo sapiens
  misc_feature (898)..(898): n is a, c, g, or t
  misc_feature (912)..(912): n is a, c, g, or t
  misc_feature (922)..(922): n is a, c, g, or t
  misc_feature (927)..(927): n is a, c, g, or t
tgggtaacattttatgcagtttaaatgaatggaatattttcctcttctttagttgtatctgtttgtatttttctttgatgaatgattggtcatgaggcctcttgccacactccagaaatacgtgtgcggctgcttttaagaactatgtgtctggtcacttatttctctaaaattatctcattgcctggcaatcagtcttctcttgtatacttgtcctagcacattatgtacatgggaaatgtaaacaaatgtgaaggaggaccagaaaaattagttaatatttaaaaaactgtattgtgcattttggcttcacatgtttaactttttttaagaaaaaagttgcatgaatggaaaaaaaatctgtatacagtatctgtaaaaactgtcttatctgtttcaattccttgctcatatcccatataatctagaactaaatatggtgcgtggccatatttaaacacctgagagtcaagcagttcagactttgatttgaagcacctcatccttctttcaatgcgaacactatcatatggcattcttactgaggattttgtctaaccatatgttgccatgaattaactctgccgcctttcttaaggatcaaaaccagtttgatttgggaatcttcccctttccaaatgaaatagagatgcagtacttactttccttggtgtttgtagatattgccttgtgtattccacttaaaaccgtaatctagtttgtaaaagagatggtgacgcatgtaaataaagcatcagtgacactctaaaaaaaaaaaaaaaaaaaaaaaaaaaaaaactagttctcctccaataatgtccaaattgtaatgtgccttgcttcaagataaagtgtatttgggaataatattataaacccttacaaattttatgcatgnatctactgcatccntcaactctcnctagnaa

SEQ ID NO: 417022 - DNA, 266 bp, Homo sapiens
ggcagaggttgcagtgagccgagatcccgccactgcactccagcgtgggtgacagagcgagactgtctcaaaaaaaaaaaaaagaaagaaattaatgttggtatattccatagagcttacttagacttcaccagttctatgtgcactcatgtgtgtttatttgcatagctctatgcaattttatcacaggtagcctcgcaaaaccaccaccaaaatcaagatactcacctgtaccatgactgcaagatttcctcatgttacccctt

SEQ ID NO: 417023 - DNA, 590 bp, Homo sapiens
tgccgccgcggccctctggctctaggccatggcgaggctctgccggcgtgtcccctgcaccctgcttctcggcctggccgtggtgctgctgaaagcgcggctggtccccgcggccgccagagcggaactcagccgctccgacctcagcctcatccaacagcagcagcagcagcagcaacaacaacaacaacaacagcaaaagcagctggaggaggctgaggaggagaggacagaggtgcctggggcaacctccaccttgacggttccaggtaggtcctggctgcccagcccggtctttcagtctcggccggcgatctcttagggcctcgccggcttcctcgccccttccctatccattcctatcctcgttcgttcctgtcaccatccctcccgatctctctccccagactggctgcccagcctttggtcccttgatctggtgtcgggaatctgccctccgggtaatgagctttctgagcagctcagagcactgcggtgggttggagaggggtcgggaaggctgggggtgggtgactgcctggattgatctttttcttttccctcccttcttcctgaattctaccctctgc

SEQ ID NO: 417024 - DNA, 896 bp, Homo sapiens
tgccgccgcggccctctggctctaggccatggcgaggctctgccggcgtgtcccctgcaccctgcttctcggcctggccgtggtgctgctgaaagcgcggctggtccccgcggccgccagagcggaactcagccgctccgacctcagcctcatccaacagcagcagcagcagcagcaacaacaacaacaacaacagcaaaagcagctggaggaggctgaggaggagaggacagaggtgcctggggcaacctccaccttgacggttccagtgtctgtatttatgttgaaagtccaggtgaatgacatcatcagtcgtcagtacctgagccaagcagttgtagaagtgtttgtaaactacacgaagacaaattccacagtaactaaaagcaatggagcagtgctgataaaagtaccctacaaattaggacttagtttaactattattgcttacaaagatggctacgtgttgacccctctgccttggaaaaccagaagaatgccaatatattcatcagttacactttcactgttcccgcaaagccaagcaaatatatggctatttgaagacactgttttaattactggaaaattagctgatgccaagtctcaaccaagtgttcagttttcaaaagccttaattaaacttcctgacaaccatcatattagcaacgttactggctatcttacagttctacaacagtttttgaaagtggacaattttctgcatacaactggaattactctcaataaaccaggttttgaaaacattgaattgactcctcttgctgcaatatgtgtgaaaatatattctggaggaaaagaactaaaggtcaatggctctattcaagtttctcttcctcttctacgtctgaatgatataagtgcaggggatcgca

SEQ ID NO: 417025 - DNA, 401 bp, Homo sapiens
ggatactttattcaattatatttaaaggagggacctaaactgaaagccagaaacaacagaaaatgttgtagaatctttcacagaggagccaagtgaagtttttccataccctgattttctccctcctacggagcttcagtaccctggacttgcacagatgaggccctcacaaaatctgaaaattggaaagcaacaggggaaccttcagaaagctctattattggaaatggaaagattacaacatatgactatacaaaaagagaggtcaaagttacaaactactttctgtaccccagcagttactgaatgactttcttcctccaaagctatactgagagtgggacagccaaaactttctgattcactgagtcttcagacatctcgtgtagataaaagttgag

SEQ ID NO: 417026 - DNA, 290 bp, Homo sapiens
cctactgaagatacctgggacatgagggagatgcagccaggaggagaaagcacagagtgaattcagagggtccagagtgctgtctgtccctgtgtcttctgcaccctctccctggccctgtggcaccagatgagctccaatcctgcagattaagcatctccgcctgactcttctgtggcctttttgttccccggggtctgcagatggagggcacatagtacagccagcctttatgggggcagcaaagagttaaagcagctccctgagcgccagacaacagcctcatcagc

SEQ ID NO: 417027 - DNA, 234 bp, Homo sapiens
ggaaggcctttctctgttgtttcaaagagaaagagggaagtggcctgggagcagcgtgctggggacctctctagtcttgacaataaaaatgtctccagacattgcctaatgtctccaaggggcaaaattatccctgcctgagaaccactaagagagagagtatataaaaattaaccctctgtcttctatgctaatgcctttaaaatcccaattttaaatgtttattttagtatc

SEQ ID NO: 417028 - DNA, 2408 bp, Homo sapiens
  misc_feature (142)..(142): n is a, c, g, or t
  misc_feature (441)..(441): n is a, c, g, or t
  misc_feature (460)..(460): n is a, c, g, or t
  misc_feature (791)..(791): n is a, c, g, or t
  misc_feature (1023)..(1023): n is a, c, g, or t
  misc_feature (1637)..(1637): n is a, c, g, or t
  misc_feature (2070)..(2070): n is a, c, g, or t
  misc_feature (2112)..(2112): n is a, c, g, or t
  misc_feature (2131)..(2131): n is a, c, g, or t
  misc_feature (2171)..(2171): n is a, c, g, or t
  misc_feature (2207)..(2207): n is a, c, g, or t
  misc_feature (2311)..(2311): n is a, c, g, or t
  misc_feature (2321)..(2321): n is a, c, g, or t
  misc_feature (2327)..(2327): n is a, c, g, or t
  misc_feature (2375)..(2375): n is a, c, g, or t
cattattcacagcagtaacatgcaaatgtatttaaaaatgtttgtgatggagccaggcatggtggctactcgggatgttgaggtgggagcattgctcgagcccaggagttcaagttcatcctaaacgacatagcaagacccngtgcctgaaaaatgtcagtgttggagtatacatgtattagatgtctaccattgagttcatctctttaacattctgtgatgaaataggaaatacatagaaagcatttctcatactgaagtactgtggtttgtctcaagggaaaaaaaagcccttgtatgattgaattttgagatgaacttttccccacttttagaaagagtgactcattgactgtgtgcctgtcaagattccctctggttttctggctagaaagctcacccatttccagtttctaagagtcagttcagtggcagagccancagggacaagtaagactcntgggggtgctttgaccctgcctacctgggagcacacttttcccttccctgatgacctgggatggtggccaggccgtgcccttgctgtcgctgggcagtgtccttttggaaagggagctgccccagggtttagtgcagctgccaaccctgttaggcccggcctctcgaggcctcttccgacttcaagggtcacacacccccaaagatcctctcacccatggtagttgctgtgcatggttctgtctgtccgtgcacctatgcacacacaccaccccaccaccctactctgaaattggcgagtgagttgagagccagctctgtggggtcatccngcagccatggttgtgcctgtccttcatggtggtctttcaggttatcttggcaacatgtacattgcttttctttttttttcttattgtacagtcagtactataaaatttctctttgagttttatacctttgtagcattttagatgacattgtgtttgtactttgttgtgtagagtggaagaattgtgttgaataaacccaagattggaatgcaaaaaaaaaaagagtgactcnttgacaaactggttatttgggtctagctactggcaggaattctctcaaatgaaccaaagaaaacaactgactatattttttgtcagtgataaaattcagggtttcaaataaaaattagattgagaaacttgtaataccactgtgagcgcaatagctttttttcataatgttatgtaatgaatttgatatataagtttcaacacttacatctatataacttagtaaaccactatttccaaagggccattgcatgatgccatataacatgcatgggtacaaattcatttgcgttgaagacattctaatggatttaaagtcacagcacaaaatgttcacgttcatggttatggcttcagttgcacatcgcaccttatctttaagcatcacacagtaaagtgttagagtaggtttcggcagagacaaaaacttacagagatagtcataataatgtcatatgtatgggaaggcagctaccaagtgccttcaatagtggcagaggtaaaagaggatattttatgtgggctttgatggatgcctaagaacttactagaaagaatgggaagaaggatgttttaggtaagggagcagtatgtgtgtgaaagtgtgaaaatacntggcacagggtacttgaatggctatattgccgtgccagagtgttgaggaagactgtaaagatcgattgattcacataggactgacatgatcaaatctgtattttatggttgatataaaaataccctctagacatacagctggtaataattgaaggtaagatttagtgtaaccgtgtgctgtaatcagaagttagattttgatggcttgggtttctgtggcattttaatctaccagttctactggtaactctacgggtttaatctattagctctctcaacttgggtaagttgactatcctctgtgccttttttttttcctgataagtacaatgaagctaagactagcacccactataaatgttctaactccctaacagtgttgcagggaatactacaaactctcagatgttggcagtgaatagaagtgagtttnttcctaggagttgttactccctcagccttcttcctggaagtntggcacactcttgccgctnttcattttactcctgaccttttatattgatggcaaaaatnttaacctgtttatgacaaaatataaaattatttccntaagtggcattaacatgatatatattcacatacttttgagaactactttggattatgcttttgtataagcttacaaagtagctttgctttccttttgtgttttntaaatttttnttaacncaaacttcaacattaaaaaaaaaatctatcgacctttagtgttataanagtgtcctgtctctttaaaaatgaaaaaaaaaa

SEQ ID NO: 417029 - DNA, 1393 bp, Homo sapiens
catatctcctggtaaatgcagtcatacatgatatggctcaatgcctggactgcctgccttgtaaataaccgatggcactcttaataaatgggaaaatgtttttccttagatttcatccacattttatagctaccatagcaaacacactgagtatttcaaaatagcactttgcctttttcctgaatgtgtgctccatgtcatcaagttcatcttactggaaagtttaagtggtgaaattagatggaacatactttgataatgcattgcatgtcaggttataaatatgaactggatttaatatttggccaagatagtcctcacaagtgcgtttggaaacatttgtcaaatgctgaacttagatttctggcctctcctgggagtcatctagatataggaaggcatcttagatgctcacctatacagtctcagtgctaataaaatggaatggcgtgggtgctgggtggtttataatgtgatgcctgtgggtggagaagtaactcacggatcttggccttttcactcttcacagaaactgcgccaaggccaagtcatcacattatacgggcattatgtgctgggggggttggggtgggttgcaggatgggagccttgatgatgaggatgggcagtgatgctgcctccaccagccatcagccaaccacaaccacaatgtacatcctctttgtctgcccttagctttgggactgggtagcagggagagggaaaactataagagcatttcaaagaaggagggaagttaataccttgaaaggagaactgacgtagaagcactccattgtccttacctcaatctggaatgggagattcccatctgtcagatcaggaaggataatgagctttgaaaagcactgaaaggctgggcgtgagccaccacgcctgtaatcccagcactttgggaggccaagatgggaggatcactagagcccaggagttcaagagcagcctgggcaacacggcgaaatcctgtctctacaaaaaatatgaaaaaattagcccggtgtggtggcaggtgcctgtaatcccagatactcaggaggctgatgtgggaggatcatctgagcccaggaggttgaggctgcactgagccatgatcacaccattgcattccagcatgggcaacagagtgagaccctacctaagaaaagaaagaaaagaaaagaaaagcattgggaaaggaagagggtatggtttagaaggcaataagaaatcttaggaagagtggagggtggtaggcacaagggatggtattaataaaggcagagggaaggatacagaggagagggggggaaacacaaggaggatgtgggccgtctggccagaccaccttggtgccacagtggtgaccaaagtaaagaggtgggagaagctgctt

SEQ ID NO: 417030 - DNA, 952 bp, Homo sapiens
catatctcctggtaaatgcagtcatacatgatatggctcaatgcctggactgcctgccttgtaaataaccgatggcactcttaataaatgggaaaatgtttttccttagatttcatccacattttatagctaccatagcaaacacactgagtatttcaaaatagcactttgcctttttcctgaatgtgtgctccatgtcatcaagttcatcttactggaaagtttaagtggtgaaattagatggaacatactttgataatgcattgcatgtcaggttataaatatgaactggatttaatatttggccaagatagtcctcacaagtgcgtttggaaacatttgtcaaatgctgaacttagatttctggcctctcctgggagtcatctagatataggaaggcatcttagatgctcacctatacagtctcagtgctaataaaatggaatggcgtgggtgctgggtggtttataatgtgatgcctgtgggtggagaagtaactcacggatcttggccttttcactcttcacagaaactgcgccaaggccaagtcatcacattatacgggcattatgtgctgggggggttggggtgggttgcaggatgggagccttgatgatgaggatgggcagtgatgctgcctccaccagccatcagccaaccacaaccacaatgtacatcctctttgtctgcccttagctttgggactgggtagcagggagagggaaaactataagagcatttcaaagaaggagggaagttaataccttgaaaggagaactgacgtagaagcactccattgtccttacctcaatctggaatgggagattcccatctgtcagatcaggaaggataatgagctttgaaaagcactgtttggactggcactgtttggactctgggcactgtttggactctgggcactgtttggactctgggcactgtttggactctg

SEQ ID NO: 417031 - DNA, 272 bp, Homo sapiens
cgagctcggtaccctgctccaccgctccaccctacctaagaaaagaaagaaaagaaaagaaaagcattgggaaaggaagagggtatggtttagaaggcaataagaaatcttaggaagagtggagggtggtaggcacaagggatggtattaataaaggcagagggaaggatacagaggagagggggggaaacacaaggaggatgtgggccgtctggccagaccaccttggtgccacagtggtgaccaaagtaaagaggtgggagaagctgctt

SEQ ID NO: 417032 - DNA, 513 bp, Homo sapiens
ctccgttcccccctcctcccccctcccctcagcggtggctcccaagaagtccgagacacgcggtgaggcggcgacgggctccggttgatctcccttttgtgaggtggtttttaagtgaatcattaaagagcaaaggagaagttttcccgtggctcccacgctgctattcaaaacttcctggatgaaatctttagcatcagttgggctcattagcacctctactaagagaagcaagcacagaatggaagggagagcaaatcataactttttaaaaagttatttctccttagttaaaagtttggaagagaagcaagttgaaactgtaggctgattatgtaaaagtttaagttatcagctctcttatatgtaatgcaggttgattataagtttctgggctgttgtgacaacaagaaaattatgtttattattaaaaacttgtttatactgcatatatgtgaagggcattatactgtgacaaagctaacaataaaacatacattttaatatttcaga

SEQ ID NO: 417033 - DNA, 3261 bp, Homo sapiens
tgcgtgcggtgttctagaggatcccgagtagcccacctgactgatccatccacaaattgatggctcattcatatcaatccacaatccatcaaacttcaagctcttctctggctctcgagggttgcatagagctcttctctaaactggattactctggtattgctcttctgattatgggaagttttgttccttggctttattattctttctactgtaatccacaaccttgcttcatctacttgattgtcatctgtgtgctgggcattgcagccattatagtctcccagtgggacatgtttgccacccctcagtatcggggagtaagagcaggagtgtttttgggcctaggcctgagtggaatcattcctaccttgcactatgtcatctcggaggggttccttaaggccgccaccatagggcagataggctggttgatgctgatggccagcctctacatcacaggagctgccctgtatgctgcccggatccccgaacgctttttccctggcaaatgtgacatctggtttcactctcatcagctgtttcatatctttgtggttgctggagcttttgttcacttccatggtgtctcaaacctccaggagtttcgtttcatgatcggcgggggctgcagtgaagaggatgcactgtgatacctaccagtctccagggactatgaccctaaaccagggcctgcggcacttgcgggcctccctgctggctactgatgccagtaccagaggagccccaaaactttgacagcctcgtgggctttgtgacggcccaggggctctgcgtggtacatgactgagaagagaaaaacaaaaataaatcatacctcaaaggatggagtgcatcaattgggagaaaaggagacatagcccaaaccctggcttattcttgggatctactgattgcgggctctgcaagacccttggcaaactggcttctgatccatatcatatttatttgtagaagatggcgaaacagtttagctggtggttctttcttctccctttctctctctctatgacaataatacaaaccaatttaagtgaacatttatatccgataaggggtgggagtgtgattttaaatgctcttttgggagaacaaagaaattaatgtaaataagatttctaactgtttaaataagactttatataaatgtttaaaacataggggtaagggagggagggagaatttttgtatagaatgaaacatgcaagtaccacacactgtttgaattttgcacaaaaagtgactgtaggatcaggtgatagccccggaatgtacagtgtcttggtgcaccaagatgccttctaaaggctgacataccttggaccctaatggggcagagagtatagccctagcccagtggtgacatgaccactccctttgggaggcctgaggtagaggggagtggtatgtgttttctcagtggaagcagcacatgagtgggtgacaggatgttagataaaggctctagttagggtgtcattgtcatttgagagactgacacactcctagcagctggtaaaggggtgctggaggccatggaggagctctagaaacattagcatgggctgatctgattacttcctggcatcccgctcacttttatgggaagtcttattagagggatgggacagttttccatatccttgctgtggagctctggaacactctctaaatttccctctattaaaaatcactgccctaactacacttcctccttgagggaatagaaatggacctttctctgacatagttcttggcatgggagccagccacaaatgagattctgacgtgtccaggtttctcctgagctcatctacatagattggtagacccttcctttggattaggaaagatgagttttacctctggtacactgtcttggtaagcctggatgtgacagacacctcggctctccttgaataagaaagccagcagaactcttaaagccagttgtagtacggagttgtcagcactcactgaacctcactttacagggataagagtggtgtggcattttaaatacaatggtatgttattgccagggagtgaggtacaagacgatggctcatgtcacaggcctacctgatacggtgtcagagaaagtggtggggaaaggatctggttcatggaattctgatcttggcccataggtgaaccaccaaaatagtgctcgagtcttaggttactgtcatcaaagacttgggatgactccattatatcctggggttgtgggtattagaactaaatatggaggtcctgagcatggggactggtgtcctcagtaggtgtttgggaatatgggaagggtctcctatttattcaatagagttttctcagttattttcctcccttgcccttgcaatctccagcaaaaggtgggatctaggaagaaagaatccagtgtagaagttgagaagaacttgaacgttttggttctggataaggtcactgtcctaggtgctaggtggaccgagcaaaagactcagtggatgaactggtgcagtgcctgacagaataaagaacagtattaatccctttgagaaagcatagtccagcaggacagtggccatttggacagaagcccacttagtttcttgggagcaacagcacgtatcagaagccagacttgctcttcggtcatgcactttgggatacagcgtataggtgcagccctgtcacaacaccaacagaagtagcagcctctgggtgcagtcacccacaccccaaagctggaaggatctggttcaacatagcacaaacccttaggaaaaatgaaattaacatcactgatgtgtaatccagtaaaatctccctttttcgggtgtgtatgtgggcatgtgcccatttctatgtgtgtgtctacgtgcagctcactaccaacagcctcatgtgcacttgacctgacagtgctcgctgagaactctcaccaggttggcgcctgaatgccttactctcagcagtcagaggcttgcttgctctgtgcagatttttaattttcttttttggccctaggctggttgggacctctacagcttcattctttcaccattaaatagtggcctttttcagtattttccctcttcccctttataaattatgctaaagccacaaagcacatttttggggatcatagaaggttggggttccagaaaggcatctgtgtgatggttccattgatgtgggatttccctacttgctgtattctcagtttctaataaaaagaaccaaatgaaatatgac

SEQ ID NO: 417034 - DNA, 3075 bp, Homo sapiens
ctccgttcccccctcctcccccctcccctcagcggtggctcccaagaagtccgagacacgcggtgaggcggcgacgggctccgggatcaactcactatcctgaaggtccattctcccaagaagaggggacagaaagacagatctatttgtaagaaaggcttgggtatcccatgaacgagccaacagaaaaccgattggggtgcagcaggactccagagccagatataaggctcagaaaagggcaccaactggatggtacacgaagaggtgataatgacagccaccaaggagatttggagcccattttagaggcatctgttctatcttcccatcataaatttcactctcatcagctgtttcatatctttgtggttgctggagcttttgttcacttccatggtgtctcaaacctccaggagtttcgtttcatgatcggcgggggctgcagtgaagaggatgcactgtgatacctaccagtctccagggactatgaccctaaaccagggcctgcggcacttgcgggcctccctgctggctactgatgccagtaccagaggagccccaaaactttgacagcctcgtgggctttgtgacggcccaggggctctgcgtggtacatgactgagaagagaaaaacaaaaataaatcatacctcaaaggatggagtgcatcaattgggagaaaaggagacatagcccaaaccctggcttattcttgggatctactgattgcgggctctgcaagacccttggcaaactggcttctgatccatatcatatttatttgtagaagatggcgaaacagtttagctggtggttctttcttctccctttctctctctctatgacaataatacaaaccaatttaagtgaacatttatatccgataaggggtgggagtgtgattttaaatgctcttttgggagaacaaagaaattaatgtaaataagatttctaactgtttaaataagactttatataaatgtttaaaacataggggtaagggagggagggagaatttttgtatagaatgaaacatgcaagtaccacacactgtttgaattttgcacaaaaagtgactgtaggatcaggtgatagccccggaatgtacagtgtcttggtgcaccaagatgccttctaaaggctgacataccttggaccctaatggggcagagagtatagccctagcccagtggtgacatgaccactccctttgggaggcctgaggtagaggggagtggtatgtgttttctcagtggaagcagcacatgagtgggtgacaggatgttagataaaggctctagttagggtgtcattgtcatttgagagactgacacactcctagcagctggtaaaggggtgctggaggccatggaggagctctagaaacattagcatgggctgatctgattacttcctggcatcccgctcacttttatgggaagtcttattagagggatgggacagttttccatatccttgctgtggagctctggaacactctctaaatttccctctattaaaaatcactgccctaactacacttcctccttgagggaatagaaatggacctttctctgacatagttcttggcatgggagccagccacaaatgagattctgacgtgtccaggtttctcctgagctcatctacatagattggtagacccttcctttggattaggaaagatgagttttacctctggtacactgtcttggtaagcctggatgtgacagacacctcggctctccttgaataagaaagccagcagaactcttaaagccagttgtagtacggagttgtcagcactcactgaacctcactttacagggataagagtggtgtggcattttaaatacaatggtatgttattgccagggagtgaggtacaagacgatggctcatgtcacaggcctacctgatacggtgtcagagaaagtggtggggaaaggatctggttcatggaattctgatcttggcccataggtgaaccaccaaaatagtgctcgagtcttaggttactgtcatcaaagacttgggatgactccattatatcctggggttgtgggtattagaactaaatatggaggtcctgagcatggggactggtgtcctcagtaggtgtttgggaatatgggaagggtctcctatttattcaatagagttttctcagttattttcctcccttgcccttgcaatctccagcaaaaggtgggatctaggaagaaagaatccagtgtagaagttgagaagaacttgaacgttttggttctggataaggtcactgtcctaggtgctaggtggaccgagcaaaagactcagtggatgaactggtgcagtgcctgacagaataaagaacagtattaatccctttgagaaagcatagtccagcaggacagtggccatttggacagaagcccacttagtttcttgggagcaacagcacgtatcagaagccagacttgctcttcggtcatgcactttgggatacagcgtataggtgcagccctgtcacaacaccaacagaagtagcagcctctgggtgcagtcacccacaccccaaagctggaaggatctggttcaacatagcacaaacccttaggaaaaatgaaattaacatcactgatgtgtaatccagtaaaatctccctttttcgggtgtgtatgtgggcatgtgcccatttctatgtgtgtgtctacgtgcagctcactaccaacagcctcatgtgcacttgacctgacagtgctcgctgagaactctcaccaggttggcgcctgaatgccttactctcagcagtcagaggcttgcttgctctgtgcagatttttaattttcttttttggccctaggctggttgggacctctacagcttcattctttcaccattaaatagtggcctttttcagtattttccctcttcccctttataaattatgctaaagccacaaagcacatttttggggatcatagaaggttggggttccagaaaggcatctgtgtgatggttccattgatgtgggatttccctacttgctgtattctcagtttctaataaaaagaaccaaatgaaatatgac

SEQ ID NO: 417035 - DNA, 2087 bp, Homo sapiens
ccttacggctaggtacgaggccgggtgttaaatcggccgaaatgaaacatgcaagtaccacacactgtttgaattttgcacaaaaagtgactgtaggatcaggtgatagccccggaatgtacagtgtcttggtgcaccaagatgccttctaaaggctgacataccttggaccctaatggggcagagagtatagccctagcccagtggtgacatgaccactccctttgggaggcctgaggtagaggggagtggtatgtgttttctcagtggaagcagcacatgagtgggtgacaggatgttagataaaggctctagttagggtgtcattgtcatttgagagactgacacactcctagcagctggtaaaggggtgctggaggccatggaggagctctagaaacattagcatgggctgatctgattacttcctggcatcccgctcacttttatgggaagtcttattagagggatgggacagttttccatatccttgctgtggagctctggaacactctctaaatttccctctattaaaaatcactgccctaactacacttcctccttgagggaatagaaatggacctttctctgacatagttcttggcatgggagccagccacaaatgagattctgacgtgtccaggtttctcctgagctcatctacatagattggtagacccttcctttggattaggaaagatgagttttacctctggtacactgtcttggtaagcctggatgtgacagacacctcggctctccttgaataagaaagccagcagaactcttaaagccagttgtagtacggagttgtcagcactcactgaacctcactttacagggataagagtggtgtggcattttaaatacaatggtatgttattgccagggagtgaggtacaagacgatggctcatgtcacaggcctacctgatacggtgtcagagaaagtggtggggaaaggatctggttcatggaattctgatcttggcccataggtgaaccaccaaaatagtgctcgagtcttaggttactgtcatcaaagacttgggatgactccattatatcctggggttgtgggtattagaactaaatatggaggtcctgagcatggggactggtgtcctcagtaggtgtttgggaatatgggaagggtctcctatttattcaatagagttttctcagttattttcctcccttgcccttgcaatctccagcaaaaggtgggatctaggaagaaagaatccagtgtagaagttgagaagaacttgaacgttttggttctggataaggtcactgtcctaggtgctaggtggaccgagcaaaagactcagtggatgaactggtgcagtgcctgacagaataaagaacagtattaatccctttgagaaagcatagtccagcaggacagtggccatttggacagaagcccacttagtttcttgggagcaacagcacgtatcagaagccagacttgctcttcggtcatgcactttgggatacagcgtataggtgcagccctgtcacaacaccaacagaagtagcagcctctgggtgcagtcacccacaccccaaagctggaaggatctggttcaacatagcacaaacccttaggaaaaatgaaattaacatcactgatgtgtaatccagtaaaatctccctttttcgggtgtgtatgtgggcatgtgcccatttctatgtgtgtgtctacgtgcagctcactaccaacagcctcatgtgcacttgacctgacagtgctcgctgagaactctcaccaggttggcgcctgaatgccttactctcagcagtcagaggcttgcttgctctgtgcagatttttaattttcttttttggccctaggctggttgggacctctacagcttcattctttcaccattaaatagtggcctttttcagtattttccctcttcccctttataaattatgctaaagccacaaagcacatttttggggatcatagaaggttggggttccagaaaggcatctgtgtgatggttccattgatgtgggatttccctacttgctgtattctcagtttctaataaaaagaaccaaatgaaatatgac

SEQ ID NO: 417036 - DNA, 2078 bp, Homo sapiens
  misc_feature (29)..(29): n is a, c, g, or t
agtaatgtcataaggtacgaggccgggtngtaatgaaacatgcaagtaccacacactgtttgaattttgcacaaaaagtgactgtaggatcaggtgatagccccggaatgtacagtgtcttggtgcaccaagatgccttctaaaggctgacataccttggaccctaatggggcagagagtatagccctagcccagtggtgacatgaccactccctttgggaggcctgaggtagaggggagtggtatgtgttttctcagtggaagcagcacatgagtgggtgacaggatgttagataaaggctctagttagggtgtcattgtcatttgagagactgacacactcctagcagctggtaaaggggtgctggaggccatggaggagctctagaaacattagcatgggctgatctgattacttcctggcatcccgctcacttttatgggaagtcttattagagggatgggacagttttccatatccttgctgtggagctctggaacactctctaaatttccctctattaaaaatcactgccctaactacacttcctccttgagggaatagaaatggacctttctctgacatagttcttggcatgggagccagccacaaatgagattctgacgtgtccaggtttctcctgagctcatctacatagattggtagacccttcctttggattaggaaagatgagttttacctctggtacactgtcttggtaagcctggatgtgacagacacctcggctctccttgaataagaaagccagcagaactcttaaagccagttgtagtacggagttgtcagcactcactgaacctcactttacagggataagagtggtgtggcattttaaatacaatggtatgttattgccagggagtgaggtacaagacgatggctcatgtcacaggcctacctgatacggtgtcagagaaagtggtggggaaaggatctggttcatggaattctgatcttggcccataggtgaaccaccaaaatagtgctcgagtcttaggttactgtcatcaaagacttgggatgactccattatatcctggggttgtgggtattagaactaaatatggaggtcctgagcatggggactggtgtcctcagtaggtgtttgggaatatgggaagggtctcctatttattcaatagagttttctcagttattttcctcccttgcccttgcaatctccagcaaaaggtgggatctaggaagaaagaatccagtgtagaagttgagaagaacttgaacgttttggttctggataaggtcactgtcctaggtgctaggtggaccgagcaaaagactcagtggatgaactggtgcagtgcctgacagaataaagaacagtattaatccctttgagaaagcatagtccagcaggacagtggccatttggacagaagcccacttagtttcttgggagcaacagcacgtatcagaagccagacttgctcttcggtcatgcactttgggatacagcgtataggtgcagccctgtcacaacaccaacagaagtagcagcctctgggtgcagtcacccacaccccaaagctggaaggatctggttcaacatagcacaaacccttaggaaaaatgaaattaacatcactgatgtgtaatccagtaaaatctccctttttcgggtgtgtatgtgggcatgtgcccatttctatgtgtgtgtctacgtgcagctcactaccaacagcctcatgtgcacttgacctgacagtgctcgctgagaactctcaccaggttggcgcctgaatgccttactctcagcagtcagaggcttgcttgctctgtgcagatttttaattttcttttttggccctaggctggttgggacctctacagcttcattctttcaccattaaatagtggcctttttcagtattttccctcttcccctttataaattatgctaaagccacaaagcacatttttggggatcatagaaggttggggttccagaaaggcatctgtgtgatggttccattgatgtgggatttccctacttgctgtattctcagtttctaataaaaagaaccaaatgaaatatgac

SEQ ID NO: 417037 - DNA, 1651 bp, Homo sapiens
ccttacggctaggtacgaggccgggtgttaaatcggccgaagttttccatatccttgctgtggagctctggaacactctctaaatttccctctattaaaaatcactgccctaactacacttcctccttgagggaatagaaatggacctttctctgacatagttcttggcatgggagccagccacaaatgagattctgacgtgtccaggtttctcctgagctcatctacatagattggtagacccttcctttggattaggaaagatgagttttacctctggtacactgtcttggtaagcctggatgtgacagacacctcggctctccttgaataagaaagccagcagaactcttaaagccagttgtagtacggagttgtcagcactcactgaacctcactttacagggataagagtggtgtggcattttaaatacaatggtatgttattgccagggagtgaggtacaagacgatggctcatgtcacaggcctacctgatacggtgtcagagaaagtggtggggaaaggatctggttcatggaattctgatcttggcccataggtgaaccaccaaaatagtgctcgagtcttaggttactgtcatcaaagacttgggatgactccattatatcctggggttgtgggtattagaactaaatatggaggtcctgagcatggggactggtgtcctcagtaggtgtttgggaatatgggaagggtctcctatttattcaatagagttttctcagttattttcctcccttgcccttgcaatctccagcaaaaggtgggatctaggaagaaagaatccagtgtagaagttgagaagaacttgaacgttttggttctggataaggtcactgtcctaggtgctaggtggaccgagcaaaagactcagtggatgaactggtgcagtgcctgacagaataaagaacagtattaatccctttgagaaagcatagtccagcaggacagtggccatttggacagaagcccacttagtttcttgggagcaacagcacgtatcagaagccagacttgctcttcggtcatgcactttgggatacagcgtataggtgcagccctgtcacaacaccaacagaagtagcagcctctgggtgcagtcacccacaccccaaagctggaaggatctggttcaacatagcacaaacccttaggaaaaatgaaattaacatcactgatgtgtaatccagtaaaatctccctttttcgggtgtgtatgtgggcatgtgcccatttctatgtgtgtgtctacgtgcagctcactaccaacagcctcatgtgcacttgacctgacagtgctcgctgagaactctcaccaggttggcgcctgaatgccttactctcagcagtcagaggcttgcttgctctgtgcagatttttaattttcttttttggccctaggctggttgggacctctacagcttcattctttcaccattaaatagtggcctttttcagtattttccctcttcccctttataaattatgctaaagccacaaagcacatttttggggatcatagaaggttggggttccagaaaggcatctgtgtgatggttccattgatgtgggatttccctacttgctgtattctcagtttctaataaaaagaaccaaatgaaatatgac

SEQ ID NO: 417038 - DNA, 1345 bp, Homo sapiens
ccttacggctaggtacgaggccgggtgttaaatcggccgaaactcttaaagccagttgtagtacggagttgtcagcactcactgaacctcactttacagggataagagtggtgtggcattttaaatacaatggtatgttattgccagggagtgaggtacaagacgatggctcatgtcacaggcctacctgatacggtgtcagagaaagtggtggggaaaggatctggttcatggaattctgatcttggcccataggtgaaccaccaaaatagtgctcgagtcttaggttactgtcatcaaagacttgggatgactccattatatcctggggttgtgggtattagaactaaatatggaggtcctgagcatggggactggtgtcctcagtaggtgtttgggaatatgggaagggtctcctatttattcaatagagttttctcagttattttcctcccttgcccttgcaatctccagcaaaaggtgggatctaggaagaaagaatccagtgtagaagttgagaagaacttgaacgttttggttctggataaggtcactgtcctaggtgctaggtggaccgagcaaaagactcagtggatgaactggtgcagtgcctgacagaataaagaacagtattaatccctttgagaaagcatagtccagcaggacagtggccatttggacagaagcccacttagtttcttgggagcaacagcacgtatcagaagccagacttgctcttcggtcatgcactttgggatacagcgtataggtgcagccctgtcacaacaccaacagaagtagcagcctctgggtgcagtcacccacaccccaaagctggaaggatctggttcaacatagcacaaacccttaggaaaaatgaaattaacatcactgatgtgtaatccagtaaaatctccctttttcgggtgtgtatgtgggcatgtgcccatttctatgtgtgtgtctacgtgcagctcactaccaacagcctcatgtgcacttgacctgacagtgctcgctgagaactctcaccaggttggcgcctgaatgccttactctcagcagtcagaggcttgcttgctctgtgcagatttttaattttcttttttggccctaggctggttgggacctctacagcttcattctttcaccattaaatagtggcctttttcagtattttccctcttcccctttataaattatgctaaagccacaaagcacatttttggggatcatagaaggttggggttccagaaaggcatctgtgtgatggttccattgatgtgggatttccctacttgctgtattctcagtttctaataaaaagaaccaaatgaaatatgac

SEQ ID NO: 417039 - DNA, 1140 bp, Homo sapiens
aactaacggctaaggtagcgaggctgggtggtgctgatcttggcccataggtgaaccaccaaaatagtgctcgagtcttaggttactgtcatcaaagacttgggatgactccattatatcctggggttgtgggtattagaactaaatatggaggtcctgagcatggggactggtgtcctcagtaggtgtttgggaatatgggaagggtctcctatttattcaatagagttttctcagttattttcctcccttgcccttgcaatctccagcaaaaggtgggatctaggaagaaagaatccagtgtagaagttgagaagaacttgaacgttttggttctggataaggtcactgtcctaggtgctaggtggaccgagcaaaagactcagtggatgaactggtgcagtgcctgacagaataaagaacagtattaatccctttgagaaagcatagtccagcaggacagtggccatttggacagaagcccacttagtttcttgggagcaacagcacgtatcagaagccagacttgctcttcggtcatgcactttgggatacagcgtataggtgcagccctgtcacaacaccaacagaagtagcagcctctgggtgcagtcacccacaccccaaagctggaaggatctggttcaacatagcacaaacccttaggaaaaatgaaattaacatcactgatgtgtaatccagtaaaatctccctttttcgggtgtgtatgtgggcatgtgcccatttctatgtgtgtgtctacgtgcagctcactaccaacagcctcatgtgcacttgacctgacagtgctcgctgagaactctcaccaggttggcgcctgaatgccttactctcagcagtcagaggcttgcttgctctgtgcagatttttaattttcttttttggccctaggctggttgggacctctacagcttcattctttcaccattaaatagtggcctttttcagtattttccctcttcccctttataaattatgctaaagccacaaagcacatttttggggatcatagaaggttggggttccagaaaggcatctgtgtgatggttccattgatgtgggatttccctacttgctgtattctcagtttctaataaaaagaaccaaatgaaatatgac

SEQ ID NO: 417040 - DNA, 1067 bp, Homo sapiens
  misc_feature (8)..(8): n is a, c, g, or t
  misc_feature (14)..(14): n is a, c, g, or t
  misc_feature (35)..(35): n is a, c, g, or t
  misc_feature (67)..(67): n is a, c, g, or t
  misc_feature (79)..(79): n is a, c, g, or t
  misc_feature (96)..(96): n is a, c, g, or t
ctttgggnttgccncccaataaaaatccctggggnttgtggggtaataaagaccctaaaatattggnggtcccttgaancattgggggcctggttntccctcaagtaaggttgtgtttgggaatatgggaagggtctcctatttattcaatagagttttctcagttattttcctcccttgcccttgcaatctccagcaaaaggtgggatctaggaagaaagaatccagtgtagaagttgagaagaacttgaacgttttggttctggataaggtcactgtcctaggtgctaggtggaccgagcaaaagactcagtggatgaactggtgcagtgcctgacagaataaagaacagtattaatccctttgagaaagcatagtccagcaggacagtggccatttggacagaagcccacttagtttcttgggagcaacagcacgtatcagaagccagacttgctcttcggtcatgcactttgggatacagcgtataggtgcagccctgtcacaacaccaacagaagtagcagcctctgggtgcagtcacccacaccccaaagctggaaggatctggttcaacatagcacaaacccttaggaaaaatgaaattaacatcactgatgtgtaatccagtaaaatctccctttttcgggtgtgtatgtgggcatgtgcccatttctatgtgtgtgtctacgtgcagctcactaccaacagcctcatgtgcacttgacctgacagtgctcgctgagaactctcaccaggttggcgcctgaatgccttactctcagcagtcagaggcttgcttgctctgtgcagatttttaattttcttttttggccctaggctggttgggacctctacagcttcattctttcaccattaaatagtggcctttttcagtattttccctcttcccctttataaattatgctaaagccacaaagcacatttttggggatcatagaaggttggggttccagaaaggcatctgtgtgatggttccattgatgtgggatttccctacttgctgtattctcagtttctaataaaaagaaccaaatgaaatatgac

SEQ ID NO: 417041 - DNA, 1276 bp, Homo sapiens
  misc_feature (341)..(341): n is a, c, g, or t
  misc_feature (363)..(363): n is a, c, g, or t
cccctaacatgtcgcggctccggcacagggtctcttctgaggctgtggccaagatgtcagtggggctgtgggcatcaaaggcatgaccgcccctagaggatgcactctgagaaagcttgttcatgtggctggcaagttcgcactagctgctggcaggaaacaacaaatccctgccatgtagatctctccacagggttgcttgagtatcctcgcagcatggcaactggcttctccagagcaaataattccagagagggcaaggtggaagcctcattgtcttttttatttttgagatggagtctcactgtgtcgcccaggctggagtgcagtggcgtaatatnggctcactgcaacctccgcctnccaggttcaattattttcctcccttgcccttgcaatctccagcaaaaggtgggatctaggaagaaagaatccagtgtagaagttgagaagaacttgaacgttttggttctggataaggtcactgtcctaggtgctaggtggaccgagcaaaagactcagtggatgaactggtgcagtgcctgacagaataaagaacagtattaatccctttgagaaagcatagtccagcaggacagtggccatttggacagaagcccacttagtttcttgggagcaacagcacgtatcagaagccagacttgctcttcggtcatgcactttgggatacagcgtataggtgcagccctgtcacaacaccaacagaagtagcagcctctgggtgcagtcacccacaccccaaagctggaaggatctggttcaacatagcacaaacccttaggaaaaatgaaattaacatcactgatgtgtaatccagtaaaatctccctttttcgggtgtgtatgtgggcatgtgcccatttctatgtgtgtgtctacgtgcagctcactaccaacagcctcatgtgcacttgacctgacagtgctcgctgagaactctcaccaggttggcgcctgaatgccttactctcagcagtcagaggcttgcttgctctgtgcagatttttaattttcttttttggccctaggctggttgggacctctacagcttcattctttcaccattaaatagtggcctttttcagtattttccctcttcccctttataaattatgctaaagccacaaagcacatttttggggatcatagaaggttggggttccagaaaggcatctgtgtgatggttccattgatgtgggatttccctacttgctgtattctcagtttctaataaaaagaaccaaatgaaatatgac

SEQ ID NO: 417042 - DNA, 344 bp, Homo sapiens
agataggctggttgatgctgatggccagcctctacatcacaggagctgccctgtatgctgcccggatccccgaacgctttttccctggcaaatgtgacatctgggtaagtatgtcggggtgactgagtgtgtaggtatctgctcatgagttattggcatcctgcagagtgatgcaatagaaaaagttttagacacaaagtcaggagagttgtatcctggtcctaactccctattgagctttctctggacaataagtacaataataactaacatttagtgagcacttccttggtgctcagcatggtacagagtgctttgcacggattacctcattacatacatta

SEQ ID NO: 417043 - DNA, 3936 bp, Homo sapiens
ctccgttcccccctcctcccccctcccctcagcggtggctcccaagaagtccgagacacgcggtgaggcggcgacgggctccgggatcaactcactatcctgaaggtccattctcccaagaagaggggacagaaagacagatctatttgtaagaaaggcttgggtatcccatgaacgagccaacagaaaaccgattggggtgcagcaggactccagagccagatataaggctcagaaaagggcaccaactggatggtacacgaagaggtgataatgacagccaccaaggagatttggagcccattttagaggcatctgttctatcttcccatcataaaagctctgaggaacatgaatacagtgatgaagctcctcaggaagatgagggctttatgggcatgtcccctctcttacaagcccatcatgctatggaaaaaatggaagaatttgtttgtaaggtatgggaaggtcggtggcgagtgatccctcatgatgtactaccagactggctcaaggataatgacttcctcttgcatggacaccggcctcctatgccttctttccgggcctgttttaagagcattttcagaatacacacagaaacaggcaacatttggacacatctcttaggttgtgtatccttcctgtgcctggggatcttttatatgtttcgcccaaatatctcctttgtggcccctctgcaagagaaggtggtctttggattatttttcttaggagccattctctgcctttctttttcatggctcttccacacagtctactgccactcagagggggtctctcggctcttctctaaactggattactctggtattgctcttctgattatgggaagttttgttccttggctttattattctttctactgtaatccacaaccttgcttcatctacttgattgtcatctgtgtgctgggcattgcagccattatagtctcccagtgggacatgtttgccacccctcagtatcggggagtaagagcaggagtgtttttgggcctaggcctgagtggaatcattcctaccttgcactatgtcatctcggaggggttccttaaggccgccaccatagggcagataggctggttgatgctgatggccagcctctacatcacaggagctgccctgtatgctgcccggatccccgaacgctttttccctggcaaatgtgacatctggtttcactctcatcagctgtttcatatctttgtggttgctggagcttttgttcacttccatggtgtctcaaacctccaggagtttcgtttcatgatcggcgggggctgcagtgaagaggatgcactgtgatacctaccagtctccagggactatgaccctaaaccagggcctgcggcacttgcgggcctccctgctggctactgatgccagtaccagaggagccccaaaactttgacagcctcgtgggctttgtgacggcccaggggctctgcgtggtacatgactgagaagagaaaaacaaaaataaatcatacctcaaaggatggagtgcatcaattgggagaaaaggagacatagcccaaaccctggcttattcttgggatctactgattgcgggctctgcaagacccttggcaaactggcttctgatccatatcatatttatttgtagaagatggcgaaacagtttagctggtggttctttcttctccctttctctctctctatgacaataatacaaaccaatttaagtgaacatttatatccgataaggggtgggagtgtgattttaaatgctcttttgggagaacaaagaaattaatgtaaataagatttctaactgtttaaataagactttatataaatgtttaaaacataggggtaagggagggagggagaatttttgtatagaatgaaacatgcaagtaccacacactgtttgaattttgcacaaaaagtgactgtaggatcaggtgatagccccggaatgtacagtgtcttggtgcaccaagatgccttctaaaggctgacataccttggaccctaatggggcagagagtatagccctagcccagtggtgacatgaccactccctttgggaggcctgaggtagaggggagtggtatgtgttttctcagtggaagcagcacatgagtgggtgacaggatgttagataaaggctctagttagggtgtcattgtcatttgagagactgacacactcctagcagctggtaaaggggtgctggaggccatggaggagctctagaaacattagcatgggctgatctgattacttcctggcatcccgctcacttttatgggaagtcttattagagggatgggacagttttccatatccttgctgtggagctctggaacactctctaaatttccctctattaaaaatcactgccctaactacacttcctccttgagggaatagaaatggacctttctctgacatagttcttggcatgggagccagccacaaatgagattctgacgtgtccaggtttctcctgagctcatctacatagattggtagacccttcctttggattaggaaagatgagttttacctctggtacactgtcttggtaagcctggatgtgacagacacctcggctctccttgaataagaaagccagcagaactcttaaagccagttgtagtacggagttgtcagcactcactgaacctcactttacagggataagagtggtgtggcattttaaatacaatggtatgttattgccagggagtgaggtacaagacgatggctcatgtcacaggcctacctgatacggtgtcagagaaagtggtggggaaaggatctggttcatggaattctgatcttggcccataggtgaaccaccaaaatagtgctcgagtcttaggttactgtcatcaaagacttgggatgactccattatatcctggggttgtgggtattagaactaaatatggaggtcctgagcatggggactggtgtcctcagtaggtgtttgggaatatgggaagggtctcctatttattcaatagagttttctcagttattttcctcccttgcccttgcaatctccagcaaaaggtgggatctaggaagaaagaatccagtgtagaagttgagaagaacttgaacgttttggttctggataaggtcactgtcctaggtgctaggtggaccgagcaaaagactcagtggatgaactggtgcagtgcctgacagaataaagaacagtattaatccctttgagaaagcatagtccagcaggacagtggccatttggacagaagcccacttagtttcttgggagcaacagcacgtatcagaagccagacttgctcttcggtcatgcactttgggatacagcgtataggtgcagccctgtcacaacaccaacagaagtagcagcctctgggtgcagtcacccacaccccaaagctggaaggatctggttcaacatagcacaaacccttaggaaaaatgaaattaacatcactgatgtgtaatccagtaaaatctccctttttcgggtgtgtatgtgggcatgtgcccatttctatgtgtgtgtctacgtgcagctcactaccaacagcctcatgtgcacttgacctgacagtgctcgctgagaactctcaccaggttggcgcctgaatgccttactctcagcagtcagaggcttgcttgctctgtgcagatttttaattttcttttttggccctaggctggttgggacctctacagcttcattctttcaccattaaatagtggcctttttcagtattttccctcttcccctttataaattatgctaaagccacaaagcacatttttggggatcatagaaggttggggttccagaaaggcatctgtgtgatggttccattgatgtgggatttccctacttgctgtattctcagtttctaataaaaagaaccaaatgaaatatgac

SEQ ID NO: 417044 - DNA, 3909 bp, Homo sapiens
ctccgttcccccctcctcccccctcccctcagcggtggctcccaagaagtccgagacacgcggtgaggcggcgacgggctccgggatcaactcactatcctgaaggtccattctcccaagaagaggggacagaaagacagatctatttgtaagaaaggcttgggtatcccatgaacgagccaacagaaaaccgattggggtgcagcaggactccagagccagatataaggctcagaaaagggcaccaactggatggtacacgaagaggtgataatgacagccaccaaggagatttggagcccattttagaggcatctgttctatcttcccatcataaaagctctgaggaacatgaatacagtgatgaagctcctcaggaagatgagggctttatgggcatgtcccctctcttacaagcccatcatgctatggaaaaaatggaagaatttgtttgtaaggtatgggaaggtcggtggcgagtgatccctcatgatgtactaccagactggctcaaggataatgacttcctcttgcatggacaccggcctcctatgccttctttccgggcctgttttaagagcattttcagaatacacacagaaacaggcaacatttggacacatctcttaggttgtgtatccttcctgtgcctggggatcttttatatgtttcgcccaaatatctcctttgtggcccctctgcaagagaaggtggtctttggattatttttcttaggagccattctctgcctttctttttcatggctcttccacacagtctactgccactcagagggggtctctcggctcttctctaaactggattactctggtattgctcttctgattatgggaagttttgttccttggctttattattctttctactgtaatccacaaccttgcttcatctacttgattgtcatctgtgtgctgggcattgcagccattatagtctcccagtgggacatgtttgccacccctcagtatcggggagtaagagcaggagtgtttttgggcctaggcctgagtggaatcattcctaccttgcactatgtcatctcggaggggttccttaaggccgccaccatagggcagataggctggttgatgctgatggccagcctctacatcacaggagctgccctgtatgctgcccggatccccgaacgctttttccctggcaaatgtgacatctggtttcactctcatcagctgtttcatatctttgtggttgctggagcttttgttcacttccatggtgtctcaaacctccaggagtttcgtttcatgatcggcgggggctgcagtgaagaggatgcactgtgatacctaccagtctccagggactatgaccctaaaccagggcctgcggcacttgcgggcctccctgctggctactgatgccagtaccagaggagccccaaaactttgacagcctcgtgggctttgtgacggcccaggggctctgcgtggtacatgactgagaagagaaaaacaaaaataaatcatacctcaaaggatggagtgcatcaattgggagaaaaggagacatagcccaaaccctggcttattcttgggatctactgattgcgggctctgcaagacccttggcaaactggcttctgatccatatcatatttatttgtagaagatggcgaaacagtttagctggtggttctttcttctccctttctctctctctatgacaataatacaaaccaatttaagtgaacatttatatccgataaggggtgggagtgtgattttaaatgctcttttgggagaacaaagaaattaatgtaaataagatttctaactgtttaaataagactttatataaatgtttaaaacataggggtaagggagggagggagaatttttgtatagaatgaaacatgcaagtaccacacactgtttgaattttgcacaaaaagtgactgtaggatcaggtgatagccccggaatgtacagtgtcttggtgcaccaagatgccttctaaaggctgacataccttggaccctaatggggcagagagtatagccctagcccagtggtgacatgaccactccctttgggaggcctgaggtagaggggagtggtatgtgttttctcagtggaagcagcacatgagtgggtgacaggatgttagataaaggctctagttagggtgtcattgtcatttgagagactgacacactcctagcagctggtaaaggggtgctggaggccatggaggagctctagaaacattagcatgggctgatctgattacttcctggcatcccgctcacttttatgggaagtcttattagagggatgggacagttttccatatccttgctgtggagctctggaacactctctaaatttccctctattaaaaatcactgccctaactacacttcctccttgagggaatagaaatggacctttctctgacatagttcttggcatgggagccagccacaaatgagattctgacgtgtccaggtttctcctgagctcatctacatagattggtagacccttcctttggattaggaaagatgagttttacctctggtacactgtcttggtaagcctggatgtgacagacacctcggctctccttgaataagaaagccagcagaactcttaaagccagttgtagtacggagttgtcagcactcactgaacctcactttacagggataagagtggtgtggcattttaaatacaatggtatgttattgccagggagtgaggtacaagacgatggctcatgtcacaggcctacctgatacggtgtcagagaaagtggtggggaaaggatctggttcatggaattctgatcttggcccataggtgaaccaccaaaatagtgctcgagtcttaggttactgtcatcaaagacttgggatgactccattatatcctggggttgtgggtattagaactaaatatggaggtcctgagcatggggactggtgtcctcagtaggtgtttgggaatatgggaagggtctcctatttattcaatagagttttctcagttattttcctcccttgcccttgcaatctccagcaaaaggtgggatctaggaagaaagaatccagtgtagaagttgagaagaacttgaacgttttggttctggataaggtcactgtcctaggtgctaggtggaccgagcaaaagactcagtggatgaactggtgcagtgcctgacagaataaagaacagtattaatccctttgagaaagcatagtccagcaggacagtggccatttggacagaagcccacttagtttcttgggagcaacagcacgtatcagaagccagacttgctcttcggtcatgcactttgggatacagcgtataggtgcagccctgtcacaacaccaacagaagtagcagcctctgggtgcagtcacccacaccccaaagctggaaggatctggttcaacatagcacaaacccttaggaaaaatgaaattaacatcactgatgtgtaatccagtaaaatctccctttttcgggtgtgtatgtgggcatgtgcccatttctatgtgtgtgtctacgtgcagctcactaccaacagcctcatgtgcacttgacctgacagtgctcgctgagaactctcaccaggttggcgcctgaatgccttactctcagcagtcagaggcttgcttgctctgtgcagatttttaattttcttttttggccctaggctggttgggacctctacagcttcattctttcaccattaaatagtggcctttttcagtattttccctcttcccctttatttttggggatcatagaaggttggggttccagaaaggcatctgtgtgatggttccattgatgtgggatttccctacttgctgtattctcagtttctaataaaaagaaccaaatgaaatatgac

SEQ ID NO: 417045 - DNA, 1622 bp, Homo sapiens
ctccgttcccccctcctcccccctcccctcagcggtggctcccaagaagtccgagacacgcggtgaggcggcgacgggctccgggatcaactcactatcctgaaggtccattctcccaagaagaggggacagaaagacagatctatttgtaagaaaggcttgggtatcccatgaacgagccaacagaaaaccgattggggtgcagcaggactccagagccagatataaggctcagaaaagggcaccaactggatggtacacgaagaggtgataatgacagccaccaaggagatttggagcccattttagaggcatctgttctatcttcccatcataaaagctctgaggaacatgaatacagtgatgaagctcctcaggaagatgagggctttatgggcatgtcccctctcttacaagcccatcatgctatggaaaaaatggaagaatttgtttgtaaggtatgggaaggtcggtggcgagtgatccctcatgatgtactaccagactggctcaaggataatgacttcctcttgcatggacaccggcctcctatgccttctttccgggcctgttttaagagcattttcagaatacacacagaaacaggcaacatttggacacatctcttaggtatgtaatgtcagtgatgtaatgagctggtgattcactttcttcctttttattttcatgtatttgagggtaagcacagaacttcagaaatgtatttggatttgccattttgttttctgaatttctaatgatgaattttctgactggtttactcgtagtttatcctggtttgcactatgattttgttataacttaagttatatttctttctactagattttcagatcttgtcctcaaaccaggccaagtaaaagttgctatacaaaatgtggtttcatattgtagtgaccactgagaagaaagtattatttaatagaagtaatctgatcttttaaaatgcattacttatatgcactgctaattttcagtttggcctgaagtagaatatggactgtaattttttctccataatgattgtatattaaagaaagaatactgtagaggaaagaatagtctttccaacaaatggtgctgggataactgagccatatgtaaaagaatgatcccgaactcacatatgcaaaagtgaacccaaaatggatcaaagacccaaacataagagcaaaaactataaaatccttaggagaaaacatatataaatccttgtaagtttggattaggtgactgtttctgagaattgccaccaaagaaaaaatagataaattggacttcatcaaaattaaaaacgttggtatatcaaagtgcattatcaagaaagtgaaaagacaacccatagagaagagaatatttacaaatcagctagttggtaaggatctaataaataactcctacaactcaacaataaagacaaccgattttaaaaatgggtaaaacatctgaatagatgttcttccagagaagatctaaaatggccaataagcacatgaaaagatgtttgtcttcgttaggcatttaggaaaacgcaaatcaaatgctttgagaaatgcagtgagaaatctcaacacttcacacccactaagatggctataatc

SEQ ID NO: 417046 - DNA, 1414 bp, Homo sapiens
gagtgcccggcgctggacaaagggaggaggcggcggcaggagagggctggggaggccccctctgacatgcctccctgccaactgtaaccaatcgtcgagcccccctgccgagcccccgcagcctgcaggtcttgcgggaggacttcctcacgcctcgcccatggcggggactgctggcccggcccggcgcgtcccagcacacctcgctcaggcagccccgccagaccggctcccccgtcagaagccgagctccttgcccagaaatcattaaccagcgcgacctcccagcaggcgatggtggtggtggggcggggggagagatatagattcccccgaacaatggcttgtaactccccacgccgccggagcggaatacagtaaaagcactggactgacctaagagtttgtttctgcactctacattgttttaatgaaaataaaatgttattttaagaaaaaaggttttcttctgattttctgcacaaccagacgtttgtttgtttgctttaaaatgtttcaacaaaatcctggtttgtttcgaaatatgttggattagcatttaacacctcatcggtcactaaagcccagtcagttcaccagccccaacacagcctcggctaaaagaacatcagagcaaacagagctgggcctttaaaagtggcaaacaaatgccacacaccgcctaaagaaggggggtttgggggaggggagggttaaggcgaacttgggtccaaatgagtttgaagggaatacaaagaacgaaaagtcagcacaagttttcctaaagctagctcgcgaacgcaagcgtcgcgaacaagggcttttgtgcatgctaattgcgccattggtgcgcaaaagttccgacgcgaagtgtgaactctcaacagaaggaaacatgagacaactgaagtgccctggtttatgtgccctgctcctcctccgctgccgcctccccttctttctccttcctcccgccgagcccgctgttgcagcttgtttgcactggggcttatccggagcggaaattcctttccgtttttgtgaatgacaaactcattaacaattcatcaacacaacctgttccagccggcccgtccccacggcaacagccccttccgcagcacgctcattggctggcccggagaatgtatccattgagacgctcgctgtttgtatccattgaggagctgcctcgcgcagggggtgtgcgaggctgagtccaagagatagcaaatcgagtcttaaataatccggggagaaagacgcccgggtagatttgaggtgcagccttggagggagggattagaagccgctagactttttttcctcccctctcagtagcacggagtccgaattaattggatttcattcactggggaggaacaaaactgacccacgcgtccgcgacgcgtgg

SEQ ID NO: 417047 - DNA, 310 bp, Homo sapiens
taaatgcaaaattcctagccattcatagagtttaagctgttaatcgttcttgctgcttgctaatttgtctgactgcaggtctctaatgttcctagagcgtccttaattctggtttatcttcttgctaaaggaagaaaacctgccttttgacatggctgcagatcacaggtgtatttgaaacgctgtttcttgaatctttgaattcagtcattgacagtcgttcataatcggacaacagatttttccccccagtctttggactcaggggaagggtcagatagaagtactcactatagacaggaattccagc

SEQ ID NO: 417048 - DNA, 3976 bp, Homo sapiens
gagtgcccggcgctggacaaagggaggaggcggcggcaggagagggctggggaggccccctctgacatgcctccctgccaactgtaaccaatcgtcgagcccccctgccgagcccccgcagcctgcaggtcttgcgggaggacttcctcacgcctcgcccatggcggggactgctggcccggcccggcgcgtcccagcacacctcgctcaggcagccccgccagaccggctcccccgtcagaagccgagctccttgcccagaaatcattaaccagcgcgacctcccagcaggcgatggtggtggtggggcggggggagagatatagattcccccgaacaatggcttgtaactccccacgccgccggagcggaatacagtaaaagcactggactgacctaagagtttgtttctgcactctacattgttttaatgaaaataaaatgttattttaagaaaaaaggttttcttctgattttctgcacaaccagacgtttgtttgtttgctttaaaatgtttcaacaaaatcctggtttgtttcgaaatatgttggattagcatttaacacctcatcggtcactaaagcccagtcagttcaccagccccaacacagcctcggctaaaagaacatcagagcaaacagagctgggcctttaaaagtggcaaacaaatgccacacaccgcctaaagaaggggggtttgggggaggggagggttaaggcgaacttgggtccaaatgagtttgaagggaatacaaagaacgaaaagtcagcacaagttttcctaaagctagctcgcgaacgcaagcgtcgcgaacaagggcttttgtgcatgctaattgcgccattggtgcgcaaaagttccgacgcgaagtgtgaactctcaacagaaggaaacatgagacaactgaagtgccctggtttatgtgccctgctcctcctccgctgccgcctccccttctttctccttcctcccgccgagcccgctgttgcagcttgtttgcactggggcttatccggagcggaaattcctttccgtttttgtgaatgacaaactcattaacaattcatcaacacaacctgttccagccggcccgtccccacggcaacagccccttccgcagcacgctcattggctggcccggagaatgtatccattgagacgctcgctgtttgtatccattgaggagctgcctcgcgcagggggtgtgcgaggctgagtccaagagatagcaaatcgagtcttaaataatccggggagaaagacgcccgggtagatttgaggtgcagccttggagggagggattagaagccgctagactttttttcctcccctctcagtagcacggagtccgaattaattggatttcattcactggggaggaacaaaaactatctgggcagcttcattgagagagattcattgacactaagagccagcggctgcagctgggtgcagagagaacctccggctttacttctgtctcgtctgccccaaccgctagcctcggcttgggtaaggcgaggcggaattaaaccccgctccgagagcggcagcttcgcgcgcggtgcgctcggcctatgcctgccccgaggggcgtctggtaggcaccccgccctctcccgcagctcgacccccatgatagatacgctcagacccgtgcccttcgcgtcggaaatggcgatcagcaagacggtggcgtggctcaacgagcagctggagctgggcaacgagcggctgctgctgatggactgccggccgcaggagctatacgagtcgtcgcacatcgagtcggccatcaacgtggccatcccgggcatcatgctgcggcgcctgcagaagggtaacctgccggtgcgcgcgctcttcacgcgcggcgaggaccgggaccgcttcacccggcgctgtggcaccgacacagtggtgctctacgacgagagcagcagcgactggaacgagaatacgggcggcgagtcgttgctcgggctgctgctcaagaagctcaaggacgagggctgccgggcgttctacctggaaggtggcttcagtaagttccaagccgagttctccctgcattgcgagaccaatctagacggctcgtgtagcagcagctcgccgccgttgccagtgctggggctcgggggcctgcggatcagctctgactcttcctcggacatcgagtctgaccttgaccgagaccccaatagtgcaacagactcggatggtagtccgctgtccaacagccagccttccttcccagtggagatcttgcccttcctctacttgggctgtgccaaagactccaccaacttggacgtgttggaggaattcggcatcaagtacatcttgaacgtcacccccaatttgccgaatctctttgagaacgcaggagagtttaaatacaagcaaatccccatctcggatcactggagccaaaacctgtcccagtttttccctgaggccatttctttcatagatgaagcccggggcaagaactgtggtgtcttggtacattgcttggctggcattagccgctcagtcactgtgactgtggcttaccttatgcagaagctcaatctgtcgatgaacgatgcctatgacattgtcaaaatgaaaaaatccaacatatcccctaacttcaacttcatgggtcagctgctggacttcgagaggacgctgggactcagcagcccatgtgacaacagggttccagcacagcagctgtattttaccaccccttccaaccagaatgtataccaggtggactctctgcaatctacgtgaaagaccccacacccctccttgctggaatgtgtctggcccttcagcagtttctcttggcagcatcagctgggctgctttctttgtgtgtggccccaggtgtcaaaatgacaccagctgtctgtactagacaaggttaccaagtgcggaattggttaatactaacagagagatttgctccattctctttggaataacaggacatgctgtatagatacaggcagtaggtttgctctgtacccatgtgtacagcctacccatgcagggactgggattcgaggacttccaggcgcatagggtagaaccaaatgatagggtaggagcatgtgttctttagggccttgtaaggctgtttccttttgcatctggaactgactatataattgtcttcaatgaagactaattcaattttgcatatagaggagccaaagagagatttcagctctgtatttgtggtatcagtttggaaaaaaaaatctgatactccatttgattattgtaaatatttgatcttgaatcacttgacagtgtttgtttgaattgtgtttgttttttcctttgatgggcttaaaagaaattatccaaagggagaaagagcagtatgccacttcttaaaacagaacaaaacaaaaaaagaaaattgtgctcttttctaatccaaagggtatatttgcagcatgcttgactttaccaattctgatgacatctttacggacactattatcactaagaccttgttatggcgaagtctttagtctttttcatgtattttcctcatgattttttctctttatgtagtttgactatgccttacctttgtaaatatttttgcttgtgttgtcgcaaaggggataatctgggaaagacaccaaatcatgggctcactttaaaaaaagaaagaataaaaaaaccttcagctgtgctaaacagtatattacctctgtataaaattcttcagggagtgtcacctcaaatgcaatactttgggttggtttctttcctttaaaaaaatttgtataaaactggaagtgtgtgtgtgtgagcatgggtacccatttgataagagaaatgcatttgattgtgaagaagggagagttaaattctccattatgttcgtggtgtaaagtttagagctggaatttattataagaatgtaaaaccttaaattattaataaataactattttggctattgaa

SEQ ID NO: 417049 - DNA, 4810 bp, Homo sapiens
gagtgcccggcgctggacaaagggaggaggcggcggcaggagagggctggggaggccccctctgacatgcctccctgccaactgtaaccaatcgtcgagcccccctgccgagcccccgcagcctgcaggtcttgcgggaggacttcctcacgcctcgcccatggcggggactgctggcccggcccggcgcgtcccagcacacctcgctcaggcagccccgccagaccggctcccccgtcagaagccgagctccttgcccagaaatcattaaccagcgcgacctcccagcaggcgatggtggtggtggggcggggggagagatatagattcccccgaacaatggcttgtaactccccacgccgccggagcggaatacagtaaaagcactggactgacctaagagtttgtttctgcactctacattgttttaatgaaaataaaatgttattttaagaaaaaaggttttcttctgattttctgcacaaccagacgtttgtttgtttgctttaaaatgtttcaacaaaatcctggtttgtttcgaaatatgttggattagcatttaacacctcatcggtcactaaagcccagtcagttcaccagccccaacacagcctcggctaaaagaacatcagagcaaacagagctgggcctttaaaagtggcaaacaaatgccacacaccgcctaaagaaggggggtttgggggaggggagggttaaggcgaacttgggtccaaatgagtttgaagggaatacaaagaacgaaaagtcagcacaagttttcctaaagctagctcgcgaacgcaagcgtcgcgaacaagggcttttgtgcatgctaattgcgccattggtgcgcaaaagttccgacgcgaagtgtgaactctcaacagaaggaaacatgagacaactgaagtgccctggtttatgtgccctgctcctcctccgctgccgcctccccttctttctccttcctcccgccgagcccgctgttgcagcttgtttgcactggggcttatccggagcggaaattcctttccgtttttgtgaatgacaaactcattaacaattcatcaacacaacctgttccagccggcccgtccccacggcaacagccccttccgcagcacgctcattggctggcccggagaatgtatccattgagacgctcgctgtttgtatccattgaggagctgcctcgcgcagggggtgtgcgaggctgagtccaagagatagcaaatcgagtcttaaataatccggggagaaagacgcccgggtagatttgaggtgcagccttggagggagggattagaagccgctagactttttttcctcccctctcagtagcacggagtccgaattaattggatttcattcactggggaggaacaaaaactatctgggcagcttcattgagagagattcattgacactaagagccagcggctgcagctgggtgcagagagaacctccggctttacttctgtctcgtctgccccaaccgctagcctcggcttgggtaaggcgaggcggaattaaaccccgctccgagagcggcagcttcgcgcgcggtgcgctcggcctatgcctgccccgaggggcgtctggtaggcaccccgccctctcccgcagctcgacccccatgatagatacgctcagacccgtgcccttcgcgtcggaaatggcgatcagcaagacggtggcgtggctcaacgagcagctggagctgggcaacgagcggctgctgctgatggactgccggccgcaggagctatacgagtcgtcgcacatcgagtcggccatcaacgtggccatcccgggcatcatgctgcggcgcctgcagaagggtaacctgccggtgcgcgcgctcttcacgcgcggcgaggaccgggaccgcttcacccggcgctgtggcaccgacacagtggtgctctacgacgagagcagcagcgactggaacgagaatacgggcggcgagtcgttgctcgggctgctgctcaagaagctcaaggacgagggctgccgggcgttctacctggaaggtggcttcagtaagttccaagccgagttctccctgcattgcgagaccaatctagacggctcgtgtagcagcagctcgccgccgttgccagtgctggggctcgggggcctgcggatcagctctgactcttcctcggacatcgagtctgaccttgaccgagaccccaatagtgcaacagactcggatggtagtccgctgtccaacagccagccttccttcccagtggagatcttgcccttcctctacttgggctgtgccaaagactccaccaacttggacgtgttggaggaattcggcatcaagtacatcttgaacgtcacccccaatttgccgaatctctttgagaacgcaggagagtttaaatacaagcaaatccccatctcggatcactggagccaaaacctgtcccagtttttccctgaggccatttctttcatagatgaagcccggggcaagaactgtggtgtcttggtacattgcttggctggcattagccgctcagtcactgtgactgtggcttaccttatgcagaagctcaatctgtcgatgaacgatgcctatgacattgtcaaaatgaaaaaatccaacatatcccctaacttcaacttcatgggtcagctgctggacttcgagaggacgctgggactcagcagcccatgtgacaacagggttccagcacagcagctgtattttaccaccccttccaaccagaatgtataccaggtggactctctgcaatctacgtgaaagaccccacacccctccttgctggaatgtgtctggcccttcagcagtttctcttggcagcatcagctgggctgctttctttgtgtgtggccccaggtgtcaaaatgacaccagctgtctgtactagacaaggttaccaagtgcggaattggttaatactaacagagagatttgctccattctctttggaataacaggacatgctgtatagatacaggcagtaggtttgctctgtacccatgtgtacagcctacccatgcagggactgggattcgaggacttccaggcgcatagggtagaaccaaatgatagggtaggagcatgtgttctttagggccttgtaaggctgtttccttttgcatctggaactgactatataattgtcttcaatgaagactaattcaattttgcatatagaggagccaaagagagatttcagctctgtatttgtggtatcagtttggaaaaaaaaatctgatactccatttgattattgtaaatatttgatcttgaatcacttgacagtgtttgtttgaattgtgtttgttttttcctttgatgggcttaaaagaaattatccaaagggagaaagagcagtatgccacttcttaaaacagaacaaaacaaaaaaagaaaattgtgctcttttctaatccaaagggtatatttgcagcatgcttgactttaccaattctgatgacatctttacggacactattatcactaagaccttgttatggcgaagtctttagtctttttcatgtattttcctcatgattttttctctttatgtagtttgactatgccttacctttgtaaatatttttgcttgtgttgtcgcaaaggggataatctgggaaagacaccaaatcatgggctcactttaaaaaaagaaagaataaaaaaaccttcagctgtgctaaacagtatattacctctgtataaaattcttcagggagtgtcacctcaaatgcaatactttgggttggtttctttcctttaaaaaaatttgtataaaactggaagtgtgtgtgtgtgagcatgggtacccatttgataagagaaatgcatttgattgtgaagaagggagagttaaattctccattatgttcgtggtgtaaagtttagagctggaatttattataagaatgtaaaaccttaaattattaataaataactattttggctattgaagaatgtgtgtttttaaaaactcagttatacctatgtgtgaagtgacacattttagaactttttcattcagggattgattttgacttgtaggcatagtagggcaaggttcttttaagcttttcctagaacgtttttcagcagcagtttatgaaattcatcgtttgccacgaataaagatgacatcctagaatggaccgactgtaccgtgtatatgaacaatacctcttatgagtatagttccggcttaagattttaaagcccctgaagaaaaatgaacctatagagcatagcttgctgaggaatacaatttggatattaaccacagagaggtgtagcagaataccaagatgacagccacatgttaacctcctccctatccttcactgtcaggatcttctgctttataatgctgagataatgccaaagaggaagtagggataattctttttccagtctgttgtcatgggcaattctacctgcagatatcctagtgtgagaatgctgaatccagaatgatgtctccactttttcccctagcatgcgcatggcaaggcatatctaagcttcctcaccgtgtcaggatatggctttagaattttacattggcacttaggaggcaactttgtcatccctgttgtaatgtgcttttttgtttaactggcttgggatgtgggtcagaaacccttattgaaacttgtggggattattttagtttcttttcaagctaaagactttatatcttgccatttttcttgggacctaccctctccttacctcaaatgtaaaaatacacaaaccaaaataaaaggcaggtgtatggaatcaaaagaacta

SEQ ID NO: 417050 - DNA, 3538 bp, Homo sapiens
gagtgcccggcgctggacaaagggaggaggcggcggcaggagagggctggggaggccccctctgacatgcctccctgccaactgtaaccaatcgtcgagcccccctgccgagcccccgcagcctgcaggtcttgcgggaggacttcctcacgcctcgcccatggcggggactgctggcccggcccggcgcgtcccagcacacctcgctcaggcagccccgccagaccggctcccccgtcagaagccgagctccttgcccagaaatcattaaccagcgcgacctcccagcaggcgatggtggtggtggggcggggggagagatatagattcccccgaacaatggcttgtaactccccacgccgccggagcggaatacagtaaaagcactggactgacctaagagtttgtttctgcactctacattgttttaatgaaaataaaatgttattttaagaaaaaaggttttcttctgattttctgcacaaccagacgtttgtttgtttgctttaaaatgtttcaacaaaatcctggtttgtttcgaaatatgttggattagcatttaacacctcatcggtcactaaagcccagtcagttcaccagccccaacacagcctcggctaaaagaacatcagagcaaacagagctgggcctttaaaagtggcaaacaaatgccacacaccgcctaaagaaggggggtttgggggaggggagggttaaggcgaacttgggtccaaatgagtttgaagggaatacaaagaacgaaaagtcagcacaagttttcctaaagctagctcgcgaacgcaagcgtcgcgaacaagggcttttgtgcatgctaattgcgccattggtgcgcaaaagttccgacgcgaagtgtgaactctcaacagaaggaaacatgagacaactgaagtgccctggtttatgtgccctgctcctcctccgctgccgcctccccttctttctccttcctcccgccgagcccgctgttgcagcttgtttgcactggggcttatccggagcggaaattcctttccgtttttgtgaatgacaaactcattaacaattcatcaacacaacctgttccagccggcccgtccccacggcaacagccccttccgcagcacgctcattggctggcccggagaatgtatccattgagacgctcgctgtttgtatccattgaggagctgcctcgcgcagggggtgtgcgaggctgagtccaagagatagcaaatcgagtcttaaataatccggggagaaagacgcccgggtagatttgaggtgcagccttggagggagggattagaagccgctagactttttttcctcccctctcagtagcacggagtccgaattaattggatttcattcactggggaggaacaaaaactatctgggcagcttcattgagagagattcattgacactaagagccagcggctgcagctgggtgcagagagaacctccggctttacttctgtctcgtctgccccaaccgctagcctcggcttgggtaaggcgaggcggaattaaaccccgctccgagagcggcagcttcgcgcgcggtgcgctcggcctatgcctgccccgaggggcgtctggtaggcaccccgccctctcccgcagctcgacccccatgatagatacgctcagacccgtgcccttcgcgtcggaaatggcgatcagcaagacggtggcgtggctcaacgagcagctggagctgggcaacgagcggctgctgctgatggactgccggccgcaggagctatacgagtcgtcgcacatcgagtcggccatcaacgtggccatcccgggcatcatgctgcggcgcctgcagaagggtaacctgccggtgcgcgcgctcttcacgcgcggcgaggaccgggaccgcttcacccggcgctgtggcaccgacacagtggtgctctacgacgagagcagcagcgactggaacgagaatacgggcggcgagtcgttgctcgggctgctgctcaagaagctcaaggacgagggctgccgggcgttctacctggaagatgaagcccggggcaagaactgtggtgtcttggtacattgcttggctggcattagccgctcagtcactgtgactgtggcttaccttatgcagaagctcaatctgtcgatgaacgatgcctatgacattgtcaaaatgaaaaaatccaacatatcccctaacttcaacttcatgggtcagctgctggacttcgagaggacgctgggactcagcagcccatgtgacaacagggttccagcacagcagctgtattttaccaccccttccaaccagaatgtataccaggtggactctctgcaatctacgtgaaagaccccacacccctccttgctggaatgtgtctggcccttcagcagtttctcttggcagcatcagctgggctgctttctttgtgtgtggccccaggtgtcaaaatgacaccagctgtctgtactagacaaggttaccaagtgcggaattggttaatactaacagagagatttgctccattctctttggaataacaggacatgctgtatagatacaggcagtaggtttgctctgtacccatgtgtacagcctacccatgcagggactgggattcgaggacttccaggcgcatagggtagaaccaaatgatagggtaggagcatgtgttctttagggccttgtaaggctgtttccttttgcatctggaactgactatataattgtcttcaatgaagactaattcaattttgcatatagaggagccaaagagagatttcagctctgtatttgtggtatcagtttggaaaaaaaaatctgatactccatttgattattgtaaatatttgatcttgaatcacttgacagtgtttgtttgaattgtgtttgttttttcctttgatgggcttaaaagaaattatccaaagggagaaagagcagtatgccacttcttaaaacagaacaaaacaaaaaaagaaaattgtgctcttttctaatccaaagggtatatttgcagcatgcttgactttaccaattctgatgacatctttacggacactattatcactaagaccttgttatggcgaagtctttagtctttttcatgtattttcctcatgattttttctctttatgtagtttgactatgccttacctttgtaaatatttttgcttgtgttgtcgcaaaggggataatctgggaaagacaccaaatcatgggctcactttaaaaaaagaaagaataaaaaaaccttcagctgtgctaaacagtatattacctctgtataaaattcttcagggagtgtcacctcaaatgcaatactttgggttggtttctttcctttaaaaaaatttgtataaaactggaagtgtgtgtgtgtgagcatgggtacccatttgataagagaaatgcatttgattgtgaagaagggagagttaaattctccattatgttcgtggtgtaaagtttagagctggaatttattataagaatgtaaaaccttaaattattaataaataactattttggctattgaa

SEQ ID NO: 417051 - DNA, 3922 bp, Homo sapiens
gagtgcccggcgctggacaaagggaggaggcggcggcaggagagggctggggaggccccctctgacatgcctccctgccaactgtaaccaatcgtcgagcccccctgccgagcccccgcagcctgcaggtcttgcgggaggacttcctcacgcctcgcccatggcggggactgctggcccggcccggcgcgtcccagcacacctcgctcaggcagccccgccagaccggctcccccgtcagaagccgagctccttgcccagaaatcattaaccagcgcgacctcccagcaggcgatggtggtggtggggcggggggagagatatagattcccccgaacaatggcttgtaactccccacgccgccggagcggaatacagtaaaagcactggactgacctaagagtttgtttctgcactctacattgttttaatgaaaataaaatgttattttaagaaaaaaggttttcttctgattttctgcacaaccagacgtttgtttgtttgctttaaaatgtttcaacaaaatcctggtttgtttcgaaatatgttggattagcatttaacacctcatcggtcactaaagcccagtcagttcaccagccccaacacagcctcggctaaaagaacatcagagcaaacagagctgggcctttaaaagtggcaaacaaatgccacacaccgcctaaagaaggggggtttgggggaggggagggttaaggcgaacttgggtccaaatgagtttgaagggaatacaaagaacgaaaagtcagcacaagttttcctaaagctagctcgcgaacgcaagcgtcgcgaacaagggcttttgtgcatgctaattgcgccattggtgcgcaaaagttccgacgcgaagtgtgaactctcaacagaaggaaacatgagacaactgaagtgccctggtttatgtgccctgctcctcctccgctgccgcctccccttctttctccttcctcccgccgagcccgctgttgcagcttgtttgcactggggcttatccggagcggaaattcctttccgtttttgtgaatgacaaactcattaacaattcatcaacacaacctgttccagccggcccgtccccacggcaacagccccttccgcagcacgctcattggctggcccggagaatgtatccattgagacgctcgctgtttgtatccattgaggagctgcctcgcgcagggggtgtgcgaggctgagtccaagagatagcaaatcgagtcttaaataatccggggagaaagacgcccgggtagatttgaggtgcagccttggagggagggattagaagccgctagactttttttcctcccctctcagtagcacggagtccgaattaattggatttcattcactggggaggaacaaaaactatctgggcagcttcattgagagagattcattgacactaagagccagcggctgcagctgggtgcagagagaacctccggctttacttctgtctcgtctgccccaaccgctagcctcggcttgggtaaggcgaggcggaattaaaccccgctccgagagcggcagcttcgcgcgcggtgcgctcggcctatgcctgccccgaggggcgtctggtaggcaccccgccctctcccgcagctcgacccccatgatagatacgctcagacccgtgcccttcgcgtcggaaatggcgatcagcaagacggtggcgtggctcaacgagcagctggagctgggcaacgagcggctgctgctgatggactgccggccgcaggagctatacgagtcgtcgcacatcgagtcggccatcaacgtggccatcccgggcatcatgctgcggcgcctgcagaagggtaacctgccggtgcgcgcgctcttcacgcgcggcgaggaccgggaccgcttcacccggcgctgtggcaccgacacagtggtgctctacgacgagagcagcagcgactggaacgagaatacgggcggcgagtcgttgctcgggctgctgctcaagaagctcaaggacgagggctgccgggcgttctacctggaaggtggcttcagtaagttccaagccgagttctccctgcattgcgagaccaatctagacggctcgtgtagcagcagctcgccgccgttgccagtgctggggctcgggggcctgcggatcagctctgactcttcctcggacatcgagtctgaccttgaccgagaccccaatagtgcaacagactcggatggtagtccgctgtccaacagccagccttccttcccagtggagatcttgcccttcctctacttgggctgtgccaaagactccaccaacttggacgtgttggaggaattcggcatcaagtacatcttgaacgtcacccccaatttgccgaatctctttgagaacgcaggagagtttaaatacaagcaaatccccatctcggatcactggagccaaaacctgtcccagtttttccctgaggccatttctttcatagatgaagcccggggcaagaactgtggtgtcttggtacattgcttggctggcattagccgctcagtcactgtgactgtggcttaccttatgcagaagctcaatctgtcgatgaacgatgcctatgacattgtcaaaatgaaaaaatccaacatatcccctaacttcaacttcatgggtcagctgctggacttcgagaggacgctgggactcagcagcccatgtgacaacagggttccagcacagcagctgtattttaccaccccttccaaccagaatgtataccaggtggactctctgcaatctacgtgaaagaccccacacccctccttgctggaatgtgtctggcccttcagcagtttctcttggcagcatcagctgggctgctttctttgtgtgtggccccaggtgtcatactaacagagagatttgctccattctctttggaataacaggacatgctgtatagatacaggcagtaggtttgctctgtacccatgtgtacagcctacccatgcagggactgggattcgaggacttccaggcgcatagggtagaaccaaatgatagggtaggagcatgtgttctttagggccttgtaaggctgtttccttttgcatctggaactgactatataattgtcttcaatgaagactaattcaattttgcatatagaggagccaaagagagatttcagctctgtatttgtggtatcagtttggaaaaaaaaatctgatactccatttgattattgtaaatatttgatcttgaatcacttgacagtgtttgtttgaattgtgtttgttttttcctttgatgggcttaaaagaaattatccaaagggagaaagagcagtatgccacttcttaaaacagaacaaaacaaaaaaagaaaattgtgctcttttctaatccaaagggtatatttgcagcatgcttgactttaccaattctgatgacatctttacggacactattatcactaagaccttgttatggcgaagtctttagtctttttcatgtattttcctcatgattttttctctttatgtagtttgactatgccttacctttgtaaatatttttgcttgtgttgtcgcaaaggggataatctgggaaagacaccaaatcatgggctcactttaaaaaaagaaagaataaaaaaaccttcagctgtgctaaacagtatattacctctgtataaaattcttcagggagtgtcacctcaaatgcaatactttgggttggtttctttcctttaaaaaaatttgtataaaactggaagtgtgtgtgtgtgagcatgggtacccatttgataagagaaatgcatttgattgtgaagaagggagagttaaattctccattatgttcgtggtgtaaagtttagagctggaatttattataagaatgtaaaaccttaaattattaataaataactattttggctattgaa

SEQ ID NO: 417052 - DNA, 3922 bp, Homo sapiens
gagtgcccggcgctggacaaagggaggaggcggcggcaggagagggctggggaggccccctctgacatgcctccctgccaactgtaaccaatcgtcgagcccccctgccgagcccccgcagcctgcaggtcttgcgggaggacttcctcacgcctcgcccatggcggggactgctggcccggcccggcgcgtcccagcacacctcgctcaggcagccccgccagaccggctcccccgtcagaagccgagctccttgcccagaaatcattaaccagcgcgacctcccagcaggcgatggtggtggtggggcggggggagagatatagattcccccgaacaatggcttgtaactccccacgccgccggagcggaatacagtaaaagcactggactgacctaagagtttgtttctgcactctacattgttttaatgaaaataaaatgttattttaagaaaaaaggttttcttctgattttctgcacaaccagacgtttgtttgtttgctttaaaatgtttcaacaaaatcctggtttgtttcgaaatatgttggattagcatttaacacctcatcggtcactaaagcccagtcagttcaccagccccaacacagcctcggctaaaagaacatcagagcaaacagagctgggcctttaaaagtggcaaacaaatgccacacaccgcctaaagaaggggggtttgggggaggggagggttaaggcgaacttgggtccaaatgagtttgaagggaatacaaagaacgaaaagtcagcacaagttttcctaaagctagctcgcgaacgcaagcgtcgcgaacaagggcttttgtgcatgctaattgcgccattggtgcgcaaaagttccgacgcgaagtgtgaactctcaacagaaggaaacatgagacaactgaagtgccctggtttatgtgccctgctcctcctccgctgccgcctccccttctttctccttcctcccgccgagcccgctgttgcagcttgtttgcactggggcttatccggagcggaaattcctttccgtttttgtgaatgacaaactcattaacaattcatcaacacaacctgttccagccggcccgtccccacggcaacagccccttccgcagcacgctcattggctggcccggagaatgtatccattgagacgctcgctgtttgtatccattgaggagctgcctcgcgcagggggtgtgcgaggctgagtccaagagatagcaaatcgagtcttaaataatccggggagaaagacgcccgggtagatttgaggtgcagccttggagggagggattagaagccgctagactttttttcctcccctctcagtagcacggagtccgaattaattggatttcattcactggggaggaacaaaaactatctgggcagcttcattgagagagattcattgacactaagagccagcggctgcagctgggtgcagagagaacctccggctttacttctgtctcgtctgccccaaccgctagcctcggcttgggtaaggcgaggcggaattaaaccccgctccgagagcggcagcttcgcgcgcggtgcgctcggcctatgcctgccccgaggggcgtctggtaggcaccccgccctctcccgcagctcgacccccatgatagatacgctcagacccgtgcccttcgcgtcggaaatggcgatcagcaagacggtggcgtggctcaacgagcagctggagctgggcaacgagcggctgctgctgatggactgccggccgcaggagctatacgagtcgtcgcacatcgagtcggccatcaacgtggccatcccgggcatcatgctgcggcgcctgcagaagggtaacctgccggtgcgcgcgctcttcacgcgcggcgaggaccgggaccgcttcacccggcgctgtggcaccgacacagtggtgctctacgacgagagcagcagcgactggaacgagaatacgggcggcgagtcgttgctcgggctgctgctcaagaagctcaaggacgagggctgccgggcgttctacctggaaggtggcttcagtaagttccaagccgagttctccctgcattgcgagaccaatctagacggctcgtgtagcagcagctcgccgccgttgccagtgctggggctcgggggcctgcggatcagctctgactcttcctcggacatcgagtctgaccttgaccgagaccccaatagtgcaacagactcggatggtagtccgctgtccaacagccagccttccttcccagtggagatcttgcccttcctctacttgggctgtgccaaagactccaccaacttggacgtgttggaggaattcggcatcaagtacatcttgaacgtcacccccaatttgccgaatctctttgagaacgcaggagagtttaaatacaagcaaatccccatctcggatcactggagccaaaacctgtcccagtttttccctgaggccatttctttcatagatgaagcccggggcaagaactgtggtgtcttggtacattgcttggctggcattagccgctcagtcactgtgactgtggcttaccttatgcagaagctcaatctgtcgatgaacgatgcctatgacattgtcaaaatgaaaaaatccaacatatcccctaacttcaacttcatgggtcagctgctggacttcgagaggacgctgggactcagcagcccatgtgacaacagggttccagcacagcagctgtattttaccaccccttccaaccagaatgtataccaggtggactctctgcaatctacgtgaaagaccccacacccctccttgctggaatgtgtctggcccttcagcagtttctcttggcagcatcagctgggctgctttctttgtgtgtggccccaggtgtcaaaatgacaccagctgtctgtactagacaaggttaccaagtgcggaattggttaatactaacagagagatttgctccattctctttggaataacaggacatgctgtatagatacaggcagtaggtttgctctgtacccatgtgtacagcctacccatgcagggactgggattcgaggacttccaggcgcatagggtagaaccagcatctggaactgactatataattgtcttcaatgaagactaattcaattttgcatatagaggagccaaagagagatttcagctctgtatttgtggtatcagtttggaaaaaaaaatctgatactccatttgattattgtaaatatttgatcttgaatcacttgacagtgtttgtttgaattgtgtttgttttttcctttgatgggcttaaaagaaattatccaaagggagaaagagcagtatgccacttcttaaaacagaacaaaacaaaaaaagaaaattgtgctcttttctaatccaaagggtatatttgcagcatgcttgactttaccaattctgatgacatctttacggacactattatcactaagaccttgttatggcgaagtctttagtctttttcatgtattttcctcatgattttttctctttatgtagtttgactatgccttacctttgtaaatatttttgcttgtgttgtcgcaaaggggataatctgggaaagacaccaaatcatgggctcactttaaaaaaagaaagaataaaaaaaccttcagctgtgctaaacagtatattacctctgtataaaattcttcagggagtgtcacctcaaatgcaatactttgggttggtttctttcctttaaaaaaatttgtataaaactggaagtgtgtgtgtgtgagcatgggtacccatttgataagagaaatgcatttgattgtgaagaagggagagttaaattctccattatgttcgtggtgtaaagtttagagctggaatttattataagaatgtaaaaccttaaattattaataaataactattttggctattgaa

SEQ ID NO: 417053 - DNA, 3923 bp, Homo sapiens
gagtgcccggcgctggacaaagggaggaggcggcggcaggagagggctggggaggccccctctgacatgcctccctgccaactgtaaccaatcgtcgagcccccctgccgagcccccgcagcctgcaggtcttgcgggaggacttcctcacgcctcgcccatggcggggactgctggcccggcccggcgcgtcccagcacacctcgctcaggcagccccgccagaccggctcccccgtcagaagccgagctccttgcccagaaatcattaaccagcgcgacctcccagcaggcgatggtggtggtggggcggggggagagatatagattcccccgaacaatggcttgtaactccccacgccgccggagcggaatacagtaaaagcactggactgacctaagagtttgtttctgcactctacattgttttaatgaaaataaaatgttattttaagaaaaaaggttttcttctgattttctgcacaaccagacgtttgtttgtttgctttaaaatgtttcaacaaaatcctggtttgtttcgaaatatgttggattagcatttaacacctcatcggtcactaaagcccagtcagttcaccagccccaacacagcctcggctaaaagaacatcagagcaaacagagctgggcctttaaaagtggcaaacaaatgccacacaccgcctaaagaaggggggtttgggggaggggagggttaaggcgaacttgggtccaaatgagtttgaagggaatacaaagaacgaaaagtcagcacaagttttcctaaagctagctcgcgaacgcaagcgtcgcgaacaagggcttttgtgcatgctaattgcgccattggtgcgcaaaagttccgacgcgaagtgtgaactctcaacagaaggaaacatgagacaactgaagtgccctggtttatgtgccctgctcctcctccgctgccgcctccccttctttctccttcctcccgccgagcccgctgttgcagcttgtttgcactggggcttatccggagcggaaattcctttccgtttttgtgaatgacaaactcattaacaattcatcaacacaacctgttccagccggcccgtccccacggcaacagccccttccgcagcacgctcattggctggcccggagaatgtatccattgagacgctcgctgtttgtatccattgaggagctgcctcgcgcagggggtgtgcgaggctgagtccaagagatagcaaatcgagtcttaaataatccggggagaaagacgcccgggtagatttgaggtgcagccttggagggagggattagaagccgctagactttttttcctcccctctcagtagcacggagtccgaattaattggatttcattcactggggaggaacaggctgcagctgggtgcagagagaacctccggctttacttctgtctcgtctgccccaaccgctagcctcggcttgggtaaggcgaggcggaattaaaccccgctccgagagcggcagcttcgcgcgcggtgcgctcggcctatgcctgccccgaggggcgtctggtaggcaccccgccctctcccgcagctcgacccccatgatagatacgctcagacccgtgcccttcgcgtcggaaatggcgatcagcaagacggtggcgtggctcaacgagcagctggagctgggcaacgagcggctgctgctgatggactgccggccgcaggagctatacgagtcgtcgcacatcgagtcggccatcaacgtggccatcccgggcatcatgctgcggcgcctgcagaagggtaacctgccggtgcgcgcgctcttcacgcgcggcgaggaccgggaccgcttcacccggcgctgtggcaccgacacagtggtgctctacgacgagagcagcagcgactggaacgagaatacgggcggcgagtcgttgctcgggctgctgctcaagaagctcaaggacgagggctgccgggcgttctacctggaaggtggcttcagtaagttccaagccgagttctccctgcattgcgagaccaatctagacggctcgtgtagcagcagctcgccgccgttgccagtgctggggctcgggggcctgcggatcagctctgactcttcctcggacatcgagtctgaccttgaccgagaccccaatagtgcaacagactcggatggtagtccgctgtccaacagccagccttccttcccagtggagatcttgcccttcctctacttgggctgtgccaaagactccaccaacttggacgtgttggaggaattcggcatcaagtacatcttgaacgtcacccccaatttgccgaatctctttgagaacgcaggagagtttaaatacaagcaaatccccatctcggatcactggagccaaaacctgtcccagtttttccctgaggccatttctttcatagatgaagcccggggcaagaactgtggtgtcttggtacattgcttggctggcattagccgctcagtcactgtgactgtggcttaccttatgcagaagctcaatctgtcgatgaacgatgcctatgacattgtcaaaatgaaaaaatccaacatatcccctaacttcaacttcatgggtcagctgctggacttcgagaggacgctgggactcagcagcccatgtgacaacagggttccagcacagcagctgtattttaccaccccttccaaccagaatgtataccaggtggactctctgcaatctacgtgaaagaccccacacccctccttgctggaatgtgtctggcccttcagcagtttctcttggcagcatcagctgggctgctttctttgtgtgtggccccaggtgtcaaaatgacaccagctgtctgtactagacaaggttaccaagtgcggaattggttaatactaacagagagatttgctccattctctttggaataacaggacatgctgtatagatacaggcagtaggtttgctctgtacccatgtgtacagcctacccatgcagggactgggattcgaggacttccaggcgcatagggtagaaccaaatgatagggtaggagcatgtgttctttagggccttgtaaggctgtttccttttgcatctggaactgactatataattgtcttcaatgaagactaattcaattttgcatatagaggagccaaagagagatttcagctctgtatttgtggtatcagtttggaaaaaaaaatctgatactccatttgattattgtaaatatttgatcttgaatcacttgacagtgtttgtttgaattgtgtttgttttttcctttgatgggcttaaaagaaattatccaaagggagaaagagcagtatgccacttcttaaaacagaacaaaacaaaaaaagaaaattgtgctcttttctaatccaaagggtatatttgcagcatgcttgactttaccaattctgatgacatctttacggacactattatcactaagaccttgttatggcgaagtctttagtctttttcatgtattttcctcatgattttttctctttatgtagtttgactatgccttacctttgtaaatatttttgcttgtgttgtcgcaaaggggataatctgggaaagacaccaaatcatgggctcactttaaaaaaagaaagaataaaaaaaccttcagctgtgctaaacagtatattacctctgtataaaattcttcagggagtgtcacctcaaatgcaatactttgggttggtttctttcctttaaaaaaatttgtataaaactggaagtgtgtgtgtgtgagcatgggtacccatttgataagagaaatgcatttgattgtgaagaagggagagttaaattctccattatgttcgtggtgtaaagtttagagctggaatttattataagaatgtaaaaccttaaattattaataaataactattttggctattgaa

SEQ ID NO: 417054 - DNA, 1730 bp, Homo sapiens
ggcagaaacttaatacaaaagctctcttttcagaaaatatctgaaatatgtaattgtgtccagtgtacatgtttcatttcagtgatacattttctgctgcttgtagggctcaactgccacacacaactattattattattatgttttcaagttcagtttttagactgatcattcacaaagggtggttttcagtctgctgagatcttgcttttctttttgtgttcacagatgaagcccggggcaagaactgtggtgtcttggtacattgcttggctggcattagccgctcagtcactgtgactgtggcttaccttatgcagaagctcaatctgtcgatgaacgatgcctatgacattgtcaaaatgaaaaaatccaacatatcccctaacttcaacttcatgggtcagctgctggacttcgagaggacgctgggactcagcagcccatgtgacaacagggttccagcacagcagctgtattttaccaccccttccaaccagaatgtataccaggtggactctctgcaatctacgtgaaagaccccacacccctccttgctggaatgtgtctggcccttcagcagtttctcttggcagcatcagctgggctgctttctttgtgtgtggccccaggtgtcaaaatgacaccagctgtctgtactagacaaggttaccaagtgcggaattggttaatactaacagagagatttgctccattctctttggaataacaggacatgctgtatagatacaggcagtaggtttgctctgtacccatgtgtacagcctacccatgcagggactgggattcgaggacttccaggcgcatagggtagaaccaaatgatagggtaggagcatgtgttctttagggccttgtaaggctgtttccttttgcatctggaactgactatataattgtcttcaatgaagactaattcaattttgcatatagaggagccaaagagagatttcagctctgtatttgtggtatcagtttggaaaaaaaaatctgatactccatttgattattgtaaatatttgatcttgaatcacttgacagtgtttgtttgaattgtgtttgttttttcctttgatgggcttaaaagaaattatccaaagggagaaagagcagtatgccacttcttaaaacagaacaaaacaaaaaaagaaaattgtgctcttttctaatccaaagggtatatttgcagcatgcttgactttaccaattctgatgacatctttacggacactattatcactaagaccttgttatggcgaagtctttagtctttttcatgtattttcctcatgattttttctctttatgtagtttgactatgccttacctttgtaaatatttttgcttgtgttgtcgcaaaggggataatctgggaaagacaccaaatcatgggctcactttaaaaaaagaaagaataaaaaaaccttcagctgtgctaaacagtatattacctctgtataaaattcttcagggagtgtcacctcaaatgcaatactttgggttggtttctttcctttaaaaaaatttgtataaaactggaagtgtgtgtgtgtgagcatgggtacccatttgataagagaaatgcatttgattgtgaagaagggagagttaaattctccattatgttcgtggtgtaaagtttagagctggaatttattataagaatgtaaaaccttaaattattaataaataactattttggctattgaa

SEQ ID NO: 417055 - DNA, 1399 bp, Homo sapiens
aactttcgtttggtgcgtgagctcgcggaggtacgagaggatggctcgtagtcgttagctagatgtatcatgggcatgcctgaagtgcgtggctgtttcatcacactacacacacttatgcaccgcagaatgtctaccagtttgtgactctactgcccaaagtactgagcaggtgtcagaagctcccattacctggtactcttgtcctagagcagtgatgtctagagcgcatgtctacggcaaatgatcacatctttggcaacccgtcagtctgggctgctttctttgtgtgtggccccaggtgtcaaaatgacaccagctgtctgtactagacaaggttaccaagtgcggaattggttaatactaacagagagatttgctccattctctttggaataacaggacatgctgtatagatacaggcagtaggtttgctctgtacccatgtgtacagcctacccatgcagggactgggattcgaggacttccaggcgcatagggtagaaccaaatgatagggtaggagcatgtgttctttagggccttgtaaggctgtttccttttgcatctggaactgactatataattgtcttcaatgaagactaattcaattttgcatatagaggagccaaagagagatttcagctctgtatttgtggtatcagtttggaaaaaaaaatctgatactccatttgattattgtaaatatttgatcttgaatcacttgacagtgtttgtttgaattgtgtttgttttttcctttgatgggcttaaaagaaattatccaaagggagaaagagcagtatgccacttcttaaaacagaacaaaacaaaaaaagaaaattgtgctcttttctaatccaaagggtatatttgcagcatgcttgactttaccaattctgatgacatctttacggacactattatcactaagaccttgttatggcgaagtctttagtctttttcatgtattttcctcatgattttttctctttatgtagtttgactatgccttacctttgtaaatatttttgcttgtgttgtcgcaaaggggataatctgggaaagacaccaaatcatgggctcactttaaaaaaagaaagaataaaaaaaccttcagctgtgctaaacagtatattacctctgtataaaattcttcagggagtgtcacctcaaatgcaatactttgggttggtttctttcctttaaaaaaatttgtataaaactggaagtgtgtgtgtgtgagcatgggtacccatttgataagagaaatgcatttgattgtgaagaagggagagttaaattctccattatgttcgtggtgtaaagtttagagctggaatttattataagaatgtaaaaccttaaattattaataaataactattttggctattgaa

SEQ ID NO: 417056 - DNA, 432 bp, Homo sapiens
tggataaagtaaatgaatgtcacttatctgataggcccaggagccccaagttatcttggaacatcaagaggagaggaatcacccaacttgtatgtatttgatggtacaaatcgggctcactttaaaaaaagaaagaataaaaaaaccttcagctgtgctaaacagtatattacctctgtataaaattcttcagggagtgtcacctcaaatgcaatactttgggttggtttctttcctttaaaaaaatttgtataaaactggaagtgtgtgtgtgtgagcatgggtacccatttgataagagaaatgcatttgattgtgaagaagggagagttaaattctccattatgttcgtggtgtaaagtttagagctggaatttattataagaatgtaaaaccttaaattattaataaataactattttggctattgaa

SEQ ID NO: 417057 - DNA, 2998 bp, Homo sapiens
  misc_feature (119)..(119): n is a, c, g, or t
atttgtataaaactggaagtgtgtgtgtgtgagcatgggtaccatttgataagagaaatgcatttgattgtgaagaagggagagttaaattctccattatgttcgtggtgtaaagtttngagctggaatttattataagaatgtaaaaccttaaattattaataaataactattttggctattgaaaaaaaaaaaaaaatattgaggagctgcctcgcgcagggggtgtgcgaggctgagtccaagagatagcaaatcgagtcttaaataatccggggagaaagacgcccgggtagatttgaggtgcagccttggagggagggattagaagccgctagactttttttcctcccctctcagtagcacggagtccgaattaattggatttcattcactggggaggaacaaaaactatctgggcagcttcattgagagagattcattgacactaagagccagcggctgcagctgggtgcagagagaacctccggctttacttctgtctcgtctgccccaaccgctagcctcggcttgggtaaggcgaggcggaattaaaccccgctccgagagcggcagcttcgcgcgcggtgcgctcggcctatgcctgccccgaggggcgtctggtaggcaccccgccctctcccgcagctcgacccccatgatagatacgctcagacccgtgcccttcgcgtcggaaatggcgatcagcaagacggtggcgtggctcaacgagcagctggagctgggcaacgagcggctgctgctgatggactgccggccgcaggagctatacgagtcgtcgcacatcgagtcggccatcaacgtggccatcccgggcatcatgctgcggcgcctgcagaagggtaacctgccggtgcgcgcgctcttcacgcgcggcgaggaccgggaccgcttcacccggcgctgtggcaccgacacagtggtgctctacgacgagagcagcagcgactggaacgagaatacgggcggcgagtcgttgctcgggctgctgctcaagaagctcaaggacgagggctgccgggcgttctacctggaaggtggcttcagtaagttccaagccgagttctccctgcattgcgagaccaatctagacggctcgtgtagcagcagctcgccgccgttgccagtgctggggctcgggggcctgcggatcagctctgactcttcctcggacatcgagtctgaccttgaccgagaccccaatagtgcaacagactcggatggtagtccgctgtccaacagccagccttccttcccagtggagatcttgcccttcctctacttgggctgtgccaaagactccaccaacttggacgtgttggaggaattcggcatcaagtacatcttgaacgtcacccccaatttgccgaatctctttgagaacgcaggagagtttaaatacaagcaaatccccatctcggatcactggagccaaaacctgtcccagtttttccctgaggccatttctttcatagatgaagcccggggcaagaactgtggtgtcttggtacattgcttggctggcattagccgctcagtcactgtgactgtggcttaccttatgcagaagctcaatctgtcgatgaacgatgcctatgacattgtcaaaatgaaaaaatccaacatatcccctaacttcaacttcatgggtcagctgctggacttcgagaggacgctgggactcagcagcccatgtgacaacagggttccagcacagcagctgtattttaccaccccttccaaccagaatgtataccaggtggactctctgcaatctacgtgaaagaccccacacccctccttgctggaatgtgtctggcccttcagcagtttctcttggcagcatcagctgggctgctttctttgtgtgtggccccaggtgtcaaaatgacaccagctgtctgtactagacaaggttaccaagtgcggaattggttaatactaacagagagatttgctccattctctttggaataacaggacatgctgtatagatacaggcagtaggtttgctctgtacccatgtgtacagcctacccatgcagggactgggattcgaggacttccaggcgcatagggtagaaccaaatgatagggtaggagcatgtgttctttagggccttgtaaggctgtttccttttgcatctggaactgactatataattgtcttcaatgaagactaattcaattttgcatatagaggagccaaagagagatttcagctctgtatttgtggtatcagtttggaaaaaaaaatctgatactccatttgattattgtaaatatttgatcttgaatcacttgacagtgtttgtttgaattgtgtttgttttttcctttgatgggcttaaaagaaattatccaaagggagaaagagcagtatgccacttcttaaaacagaacaaaacaaaaaaagaaaattgtgctcttttctaatccaaagggtatatttgcagcatgcttgactttaccaattctgatgacatctttacggacactattatcactaagaccttgttatggcgaagtctttagtctttttcatgtattttcctcatgattttttctctttatgtagtttgactatgccttacctttgtaaatatttttgcttgtgttgtcgcaaaggggataatctgggaaagacaccaaatcatgggctcactttaaaaaaagaaagaataaaaaaaccttcagctgtgctaaacagtatattacctctgtataaaattcttcagggagtgtcacctcaaatgcaatactttgggttggtttctttcctttaaaaaaatttgtataaaactggaagtgtgtgtgtgtgagcatgggtacccatttgataagagaaatgcatttgattgtgaagaagggagagttaaattctccattatgttcgtggtgtaaagtttagagctggaatttattataagaatgtaaaaccttaaattattaataaataactattttggctattgaa

SEQ ID NO: 417058 - DNA, 4336 bp, Homo sapiens
gagtgcccggcgctggacaaagggaggaggcggcggcaggagagggctggggaggccccctctgacatgcctccctgccaactgtaaccaatcgtcgagcccccctgccgagcccccgcagcctgcaggtcttgcgggaggacttcctcacgcctcgcccatggcggggactgctggcccggcccggcgcgtcccagcacacctcgctcaggcagccccgccagaccggctcccccgtcagaagccgagctccttgcccagaaatcattaaccagcgcgacctcccagcaggcgatggtggtggtggggcggggggagagatatagattcccccgaacaatggcttgtaactccccacgccgccggagcggaatacagtaaaagcactggactgacctaagagtttgtttctgcactctacattgttttaatgaaaataaaatgttattttaagaaaaaaggttttcttctgattttctgcacaaccagacgtttgtttgtttgctttaaaatgtttcaacaaaatcctggtttgtttcgaaatatgttggattagcatttaacacctcatcggtcactaaagcccagtcagttcaccagccccaacacagcctcggctaaaagaacatcagagcaaacagagctgggcctttaaaagtggcaaacaaatgccacacaccgcctaaagaaggggggtttgggggaggggagggttaaggcgaacttgggtccaaatgagtttgaagggaatacaaagaacgaaaagtcagcacaagttttcctaaagctagctcgcgaacgcaagcgtcgcgaacaagggcttttgtgcatgctaattgcgccattggtgcgcaaaagttccgacgcgaagtgtgaactctcaacagaaggaaacatgagacaactgaagtgccctggtttatgtgccctgctcctcctccgctgccgcctccccttctttctccttcctcccgccgagcccgctgttgcagcttgtttgcactggggcttatccggagcggaaattcctttccgtttttgtgaatgacaaactcattaacaattcatcaacacaacctgttccagccggcccgtccccacggcaacagccccttccgcagcacgctcattggctggcccggagaatgtatccattgagacgctcgctgtttgtatccattgaggagctgcctcgcgcagggggtgtgcgaggctgagtccaagagatagcaaatcgagtcttaaataatccggggagaaagacgcccgggtagatttgaggtgcagccttggagggagggattagaagccgctagactttttttcctcccctctcagtagcacggagtccgaattaattggatttcattcactggggaggaacaaaaactatctgggcagcttcattgagagagattcattgacactaagagccagcggctgcagctgggtgcagagagaacctccggctttacttctgtctcgtctgccccaaccgctagcctcggcttgggtaaggcgaggcggaattaaaccccgctccgagagcggcagcttcgcgcgcggtgcgctcggcctatgcctgccccgaggggcgtctggtaggcaccccgccctctcccgcagctcgacccccatgatagatacgctcagacccgtgcccttcgcgtcggaaatggcgatcagcaagacggtggcgtggctcaacgagcagctggagctgggcaacgagcggctgctgctgatggactgccggccgcaggagctatacgagtcgtcgcacatcgagtcggccatcaacgtggccatcccgggcatcatgctgcggcgcctgcagaagggtaacctgccggtgcgcgcgctcttcacgcgcggcgaggaccgggaccgcttcacccggcgctgtggcaccgacacagtggtgctctacgacgagagcagcagcgactggaacgagaatacgggcggcgagtcgttgctcgggctgctgctcaagaagctcaaggacgagggctgccgggcgttctacctggaaggtggcttcagtaagttccaagccgagttctccctgcattgcgagaccaatctagacggctcgtgtagcagcagctcgccgccgttgccagtgctggggctcgggggcctgcggatcagctctgactcttcctcggacatcgagtctgaccttgaccgagaccccaatagtgcaacagactcggatggtagtccgctgtccaacagccagccttccttcccagtggagatcttgcccttcctctacttgggctgtgccaaagactccaccaacttggacgtgttggaggaattcggcatcaagtacatcttgaacgtcacccccaatttgccgaatctctttgagaacgcaggagagtttaaatacaagcaaatccccatctcggatcactggagccaaaacctgtcccagtttttccctgaggccatttctttcatagatgaagcccggggcaagaactgtggtgtcttggtacattgcttggctggcattagccgctcagtcactgtgactgtggcttaccttatgcagaagctcaatctgtcgatgaacgatgcctatgacattgtcaaaatgaaaaaatccaacatatcccctaacttcaacttcatgggtcagctgctggacttcgagaggacgctgggactcagcagcccatgtgacaacagggttccagcacagcagctgtattttaccaccccttccaaccagaatgtataccaggtggactctctgcaatctacgtgaaagaccccacacccctccttgctggaatgtgtctggcccttcagcagtttctcttggcagcatcagctgggctgctttctttgtgtgtggccccaggtgtcaaaatgacaccagctgtctgtactagacaaggttaccaagtgcggaattggttaatactaacagagagatttgctccattctctttggaataacaggacatgctgtatagatacaggcagtaggtttgctctgtacccatgtgtacagcctacccatgcagggactgggattcgaggacttccaggcgcatagggtagaaccaaatgatagggtaggagcatgtgttctttagggccttgtaaggctgtttccttttgcatctggaactgactatataattgtcttcaatgaagactaattcaattttgcatatagaggagccaaagagagatttcagctctgtatttgtggtatcagtttggaaaaaaaaatctgatactccatttgattattgtaaatatttgatcttgaatcacttgacagtgtttgtttgaattgtgtttgttttttcctttgatgggcttaaaagaaattatccaaagggagaaagagcagtatgccacttcttaaaacagaacaaaacaaaaaaagaaaattgtgctcttttctaatccaaagggtatatttgcagcatgcttgactttaccaattctgatgacatctttacggacactattatcactaagaccttgttatggcgaagtctttagtctttttcatgtattttcctcatgattttttctctttatgtagtttgactatgccttacctttgtaaatatttttgcttgtgttgtcgcaaaggggataatctgggaaagacaccaaatcatgggctcactttaaaaaaagaaagaataaaaaaaccttcagctgtgctaaacagtatattacctctgtataaaattcttcagggagtgtcacctcaaatgcaatactttgggttggtttctttcctttaaaaaaatttgtataaaactggaagtgtgtgtgtgtgagcatgggtacccatttgataagagaaatgcatttgattgtgaagaagggagagttaaattctccattatgttcgtggtgtaaagtttagagctggaatttattataagaatgtaaaaccttaaattattaataaataactattttggctattgaaaaaaaaaaaaaaaaaaaaaaaaaaaaaaacactgtgtgtggggcgcggcccggggcccccagaaaaagctcttctgaaacccccccgctgtggggcgcgcgcgcgggcccccatgtggtggtaaggtcaaccgcgggcgccacaagcggtggtcccccaagaggagaaaactccgggcgccaggagacaagagcggcgcgggggagtttcctccccacaatataaaaaaaacgcgccggggggggaccaccgaggcgtttctctgagaacaatcccccagagagggggcccagagggggcaaaaaagggggagcccataccacaggggaggccacaagggacagcaaatataaaatagcg

SEQ ID NO: 417059 - DNA, 3922 bp, Homo sapiens
gagtgcccggcgctggacaaagggaggaggcggcggcaggagagggctggggaggccccctctgacatgcctccctgccaactgtaaccaatcgtcgagcccccctgccgagcccccgcagcctgcaggtcttgcgggaggacttcctcacgcctcgcccatggcggggactgctggcccggcccggcgcgtcccagcacacctcgctcaggcagccccgccagaccggctcccccgtcagaagccgagctccttgcccagaaatcattaaccagcgcgacctcccagcaggcgatggtggtggtggggcggggggagagatatagattcccccgaacaatggcttgtaactccccacgccgccggagcggaatacagtaaaagcactggactgacctaagagtttgtttctgcactctacattgttttaatgaaaataaaatgttattttaagaaaaaaggttttcttctgattttctgcacaaccagacgtttgtttgtttgctttaaaatgtttcaacaaaatcctggtttgtttcgaaatatgttggattagcatttaacacctcatcggtcactaaagcccagtcagttcaccagccccaacacagcctcggctaaaagaacatcagagcaaacagagctgggcctttaaaagtggcaaacaaatgccacacaccgcctaaagaaggggggtttgggggaggggagggttaaggcgaacttgggtccaaatgagtttgaagggaatacaaagaacgaaaagtcagcacaagttttcctaaagctagctcgcgaacgcaagcgtcgcgaacaagggcttttgtgcatgctaattgcgccattggtgcgcaaaagttccgacgcgaagtgtgaactctcaacagaaggaaacatgagacaactgaagtgccctggtttatgtgccctgctcctcctccgctgccgcctccccttctttctccttcctcccgccgagcccgctgttgcagcttgtttgcactggggcttatccggagcggaaattcctttccgtttttgtgaatgacaaactcattaacaattcatcaacacaacctgttccagccggcccgtccccacggcaacagccccttccgcagcacgctcattggctggcccggagaatgtatccattgagacgctcgctgtttgtatccattgaggagctgcctcgcgcagggggtgtgcgaggctgagtccaagagatagcaaatcgagtcttaaataatccggggagaaagacgcccgggtagatttgaggtgcagccttggagggagggattagaagccgctagactttttttcctcccctctcagtagcacggagtccgaattaattggatttcattcactggggaggaacaaaaactatctgggcagcttcattgagagagattcattgacactaagagccagcggctgcagctgggtgcagagagaacctccggctttacttctgtctcgtctgccccaaccgctagcctcggcttgggtaaggcgaggcggaattaaaccccgctccgagagcggcagcttcgcgcgcggtgcgctcggcctatgcctgccccgaggggcgtctggtaggcaccccgccctctcccgcagctcgacccccatgatagatacgctcagacccgtgcccttcgcgtcggaaatggcgatcagcaagacggtggcgtggctcaacgagcagctggagctgggcaacgagcggctgctgctgatggactgccggccgcaggagctatacgagtcgtcgcacatcgagtcggccatcaacgtggccatcccgggcatcatgctgcggcgcctgcagaagggtaacctgccggtgcgcgcgctcttcacgcgcggcgaggaccgggaccgcttcacccggcgctgtggcaccgacacagtggtgctctacgacgagagcagcagcgactggaacgagaatacgggcggcgagtcgttgctcgggctgctgctcaagaagctcaaggacgagggctgccgggcgttctacctggaaggtggcttcagtaagttccaagccgagttctccctgcattgcgagaccaatctagacggctcgtgtagcagcagctcgccgccgttgccagtgctggggctcgggggcctgcggatcagctctgactcttcctcggacatcgagtctgaccttgaccgagaccccaatagtgcaacagactcggatggtagtccgctgtccaacagccagccttccttcccagtggagatcttgcccttcctctacttgggctgtgccaaagactccaccaacttggacgtgttggaggaattcggcatcaagtacatcttgaacgtcacccccaatttgccgaatctctttgagaacgcaggagagtttaaatacaagcaaatccccatctcggatcactggagccaaaacctgtcccagtttttccctgaggccatttctttcatagatgaagcccggggcaagaactgtggtgtcttggtacattgcttggctggcattagccgctcagtcactgtgactgtggcttaccttatgcagaagctcaatctgtcgatgaacgatgcctatgacattgtcaaaatgaaaaaatccaacatatcccctaacttcaacttcatgggtcagctgctggacttcgagaggacgctgggactcagcagcccatgtgacaacagggttccagcacagcagctgtattttaccaccccttccaaccagaatgtataccaggtggactctctgcaatctacgtgaaagaccccacacccctccttgctggaatgtgtctggcccttcagcagtttctcttggcagcatcagctgggctgctttctttgtgtgtggccccaggtgtcaaaatgacaccagctgtctgtactagacaaggttaccaagtgcggaattggttaatactaacagagagatttgctccattctctttggaataacaggacatgctgtatagatacaggcagtaggtttgctctgtacccatgtgtacagcctacccatgcagggactgggattcgaggacttccaggcgcatagggtagaaccaaatgatagggtaggagcatgtgttctttagggccttgtaaggctgtttccttttgcatctggaactgactatataattgtcttcaatgaagactaattcaattttgcatatagaggagccaaagagagatttcagctctgtatttgtggtatcagtttggaaaaaaaaatctgatactccatttgattattgtaaatatttgatcttgaatcacttgacagtgtttgtttgaattgtgtttgttttttcctttgatgggcttaaaagaaattatccaaagggagaaagagcagtatgccacttcttaaaacagaacaaaacaaaatttaccaattctgatgacatctttacggacactattatcactaagaccttgttatggcgaagtctttagtctttttcatgtattttcctcatgattttttctctttatgtagtttgactatgccttacctttgtaaatatttttgcttgtgttgtcgcaaaggggataatctgggaaagacaccaaatcatgggctcactttaaaaaaagaaagaataaaaaaaccttcagctgtgctaaacagtatattacctctgtataaaattcttcagggagtgtcacctcaaatgcaatactttgggttggtttctttcctttaaaaaaatttgtataaaactggaagtgtgtgtgtgtgagcatgggtacccatttgataagagaaatgcatttgattgtgaagaagggagagttaaattctccattatgttcgtggtgtaaagtttagagctggaatttattataagaatgtaaaaccttaaattattaataaataactattttggctattgaa

SEQ ID NO: 417060 - DNA, 3814 bp, Homo sapiens
gagtgcccggcgctggacaaagggaggaggcggcggcaggagagggctggggaggccccctctgacatgcctccctgccaactgtaaccaatcgtcgagcccccctgccgagcccccgcagcctgcaggtcttgcgggaggacttcctcacgcctcgcccatggcggggactgctggcccggcccggcgcgtcccagcacacctcgctcaggcagccccgccagaccggctcccccgtcagaagccgagctccttgcccagaaatcattaaccagcgcgacctcccagcaggcgatggtggtggtggggcggggggagagatatagattcccccgaacaatggcttgtaactccccacgccgccggagcggaatacagtaaaagcactggactgacctaagagtttgtttctgcactctacattgttttaatgaaaataaaatgttattttaagaaaaaaggttttcttctgattttctgcacaaccagacgtttgtttgtttgctttaaaatgtttcaacaaaatcctggtttgtttcgaaatatgttggattagcatttaacacctcatcggtcactaaagcccagtcagttcaccagccccaacacagcctcggctaaaagaacatcagagcaaacagagctgggcctttaaaagtggcaaacaaatgccacacaccgcctaaagaaggggggtttgggggaggggagggttaaggcgaacttgggtccaaatgagtttgaagggaatacaaagaacgaaaagtcagcacaagttttcctaaagctagctcgcgaacgcaagcgtcgcgaacaagggcttttgtgcatgctaattgcgccattggtgcgcaaaagttccgacgcgaagtgtgaactctcaacagaaggaaacatgagacaactgaagtgccctggtttatgtgccctgctcctcctccgctgccgcctccccttctttctccttcctcccgccgagcccgctgttgcagcttgtttgcactggggcttatccggagcggaaattcctttccgtttttgtgaatgacaaactcattaacaattcatcaacacaacctgttccagccggcccgtccccacggcaacagccccttccgcagcacgctcattggctggcccggagaatgtatccattgagacgctcgctgtttgtatccattgaggagctgcctcgcgcagggggtgtgcgaggctgagtccaagagatagcaaatcgagtcttaaataatccggggagaaagacgcccgggtagatttgaggtgcagccttggagggagggattagaagccgctagactttttttcctcccctctcagtagcacggagtccgaattaattggatttcattcactggggaggaacaaaaactatctgggcagcttcattgagagagattcattgacactaagagccagcggctgcagctgggtgcagagagaacctccggctttacttctgtctcgtctgccccaaccgctagcctcggcttgggtaaggcgaggcggaattaaaccccgctccgagagcggcagcttcgcgcgcggtgcgctcggcctatgcctgccccgaggggcgtctggtaggcaccccgccctctcccgcagctcgacccccatgatagatacgctcagacccgtgcccttcgcgtcggaaatggcgatcagcaagacggtggcgtggctcaacgagcagctggagctgggcaacgagcggctgctgctgatggactgccggccgcaggagctatacgagtcgtcgcacatcgagtcggccatcaacgtggccatcccgggcatcatgctgcggcgcctgcagaagggtaacctgccggtgcgcgcgctcttcacgcgcggcgaggaccgggaccgcttcacccggcgctgtggcaccgacacagtggtgctctacgacgagagcagcagcgactggaacgagaatacgggcggcgagtcgttgctcgggctgctgctcaagaagctcaaggacgagggctgccgggcgttctacctggaaggtggcttcagtaagttccaagccgagttctccctgcattgcgagaccaatctagacggctcgtgtagcagcagctcgccgccgttgccagtgctggggctcgggggcctgcggatcagctctgactcttcctcggacatcgagtctgaccttgaccgagaccccaatagtgcaacagactcggatggtagtccgctgtccaacagccagccttccttcccagtggagatcttgcccttcctctacttgggctgtgccaaagactccaccaacttggacgtgttggaggaattcggcatcaagtacatcttgaacgtcacccccaatttgccgaatctctttgagaacgcaggagagtttaaatacaagcaaatccccatctcggatcactggagccaaaacctgtcccagtttttccctgaggccatttctttcatagatgaagcccggggcaagaactgtggtgtcttggtacattgcttggctggcattagccgctcagtcactgtgactgtggcttaccttatgcagaagctcaatctgtcgatgaacgatgcctatgacattgtcaaaatgaaaaaatccaacatatcccctaacttcaacttcatgggtcagctgctggacttcgagaggacgctgggactcagcagcccatgtgacaacagggttccagcacagcagctgtattttaccaccccttccaaccagaatgtataccaggtggactctctgcaatctacgtgaaagaccccacacccctccttgctggaatgtgtctggcccttcagcagtttctcttggcagcatcagctgggctgctttctttgtgtgtggccccaggtgtcaaaatgacaccagctgtctgtactagacaaggttaccaagtgcggaattggttaatactaacagagagatttgctccattctctttggaataacaggacatgctgtatagatacaggcagtaggtttgctctgtacccatgtgtacagcctacccatgcagggactgggattcgaggacttccaggcgcatagggtagaaccaaatgatagggtaggagcatgtgttctttagggccttgtaaggctgtttccttttgcatctggaactgactatataattgtcttcaatgaagactaattcaattttgcatatagaggagccaaagagagatttcagctctgtatttgtggtatcagtttggaaaaaaaaatctgatactccatttgattattgtaaatatttgatcttgaatcacttgacagtgtttgtttgaattgtgtttgttttttcctttgatgggcttaaaagaaattatccaaagggagaaagagcagtatgccacttcttaaaacagaacaaaacaaaaaaagaaaattgtgctcttttctaatccaaagggtatatttgcagcatgcttgactttaccaattctgatgacatctttacggacactattatcactaagaccttgttatggcgaagtctttagtctttttcatgtattttcctcatgattttttctctttatgtagtttgactatgccttacctttgtaaatatttttgcttgtgttgtcgcaaaggggataatctgggaaagacaccaaatcatcaaaaaaacctcaacatacaaacaggaaactataattacactttggtcgagaagccagccatcaggcccccatatgaacacaggcttatatagcaccaatccggtttggggcccagcgccccacagaacgcaaaaggtagaccttgggccttacccgt

SEQ ID NO: 417061 - DNA, 3705 bp, Homo sapiens
gagtgcccggcgctggacaaagggaggaggcggcggcaggagagggctggggaggccccctctgacatgcctccctgccaactgtaaccaatcgtcgagcccccctgccgagcccccgcagcctgcaggtcttgcgggaggacttcctcacgcctcgcccatggcggggactgctggcccggcccggcgcgtcccagcacacctcgctcaggcagccccgccagaccggctcccccgtcagaagccgagctccttgcccagaaatcattaaccagcgcgacctcccagcaggcgatggtggtggtggggcggggggagagatatagattcccccgaacaatggcttgtaactccccacgccgccggagcggaatacagtaaaagcactggactgacctaagagtttgtttctgcactctacattgttttaatgaaaataaaatgttattttaagaaaaaaggttttcttctgattttctgcacaaccagacgtttgtttgtttgctttaaaatgtttcaacaaaatcctggtttgtttcgaaatatgttggattagcatttaacacctcatcggtcactaaagcccagtcagttcaccagccccaacacagcctcggctaaaagaacatcagagcaaacagagctgggcctttaaaagtggcaaacaaatgccacacaccgcctaaagaaggggggtttgggggaggggagggttaaggcgaacttgggtccaaatgagtttgaagggaatacaaagaacgaaaagtcagcacaagttttcctaaagctagctcgcgaacgcaagcgtcgcgaacaagggcttttgtgcatgctaattgcgccattggtgcgcaaaagttccgacgcgaagtgtgaactctcaacagaaggaaacatgagacaactgaagtgccctggtttatgtgccctgctcctcctccgctgccgcctccccttctttctccttcctcccgccgagcccgctgttgcagcttgtttgcactggggcttatccggagcggaaattcctttccgtttttgtgaatgacaaactcattaacaattcatcaacacaacctgttccagccggcccgtccccacggcaacagccccttccgcagcacgctcattggctggcccggagaatgtatccattgagacgctcgctgtttgtatccattgaggagctgcctcgcgcagggggtgtgcgaggctgagtccaagagatagcaaatcgagtcttaaataatccggggagaaagacgcccgggtagatttgaggtgcagccttggagggagggattagaagccgctagactttttttcctcccctctcagtagcacggagtccgaattaattggatttcattcactggggaggaacaaaaactatctgggcagcttcattgagagagattcattgacactaagagccagcggctgcagctgggtgcagagagaacctccggctttacttctgtctcgtctgccccaaccgctagcctcggcttgggtaaggcgaggcggaattaaaccccgctccgagagcggcagcttcgcgcgcggtgcgctcggcctatgcctgccccgaggggcgtctggtaggcaccccgccctctcccgcagctcgacccccatgatagatacgctcagacccgtgcccttcgcgtcggaaatggcgatcagcaagacggtggcgtggctcaacgagcagctggagctgggcaacgagcggctgctgctgatggactgccggccgcaggaggtggcttcagtaagttccaagccgagttctccctgcattgcgagaccaatctagacggctcgtgtagcagcagctcgccgccgttgccagtgctggggctcgggggcctgcggatcagctctgactcttcctcggacatcgagtctgaccttgaccgagaccccaatagtgcaacagactcggatggtagtccgctgtccaacagccagccttccttcccagtggagatcttgcccttcctctacttgggctgtgccaaagactccaccaacttggacgtgttggaggaattcggcatcaagtacatcttgaacgtcacccccaatttgccgaatctctttgagaacgcaggagagtttaaatacaagcaaatccccatctcggatcactggagccaaaacctgtcccagtttttccctgaggccatttctttcatagatgaagcccggggcaagaactgtggtgtcttggtacattgcttggctggcattagccgctcagtcactgtgactgtggcttaccttatgcagaagctcaatctgtcgatgaacgatgcctatgacattgtcaaaatgaaaaaatccaacatatcccctaacttcaacttcatgggtcagctgctggacttcgagaggacgctgggactcagcagcccatgtgacaacagggttccagcacagcagctgtattttaccaccccttccaaccagaatgtataccaggtggactctctgcaatctacgtgaaagaccccacacccctccttgctggaatgtgtctggcccttcagcagtttctcttggcagcatcagctgggctgctttctttgtgtgtggccccaggtgtcaaaatgacaccagctgtctgtactagacaaggttaccaagtgcggaattggttaatactaacagagagatttgctccattctctttggaataacaggacatgctgtatagatacaggcagtaggtttgctctgtacccatgtgtacagcctacccatgcagggactgggattcgaggacttccaggcgcatagggtagaaccaaatgatagggtaggagcatgtgttctttagggccttgtaaggctgtttccttttgcatctggaactgactatataattgtcttcaatgaagactaattcaattttgcatatagaggagccaaagagagatttcagctctgtatttgtggtatcagtttggaaaaaaaaatctgatactccatttgattattgtaaatatttgatcttgaatcacttgacagtgtttgtttgaattgtgtttgttttttcctttgatgggcttaaaagaaattatccaaagggagaaagagcagtatgccacttcttaaaacagaacaaaacaaaaaaagaaaattgtgctcttttctaatccaaagggtatatttgcagcatgcttgactttaccaattctgatgacatctttacggacactattatcactaagaccttgttatggcgaagtctttagtctttttcatgtattttcctcatgattttttctctttatgtagtttgactatgccttacctttgtaaatatttttgcttgtgttgtcgcaaaggggataatctgggaaagacaccaaatcatgggctcactttaaaaaaagaaagaataaaaaaaccttcagctgtgctaaacagtatattacctctgtataaaattcttcagggagtgtcacctcaaatgcaatactttgggttggtttctttcctttaaaaaaatttgtataaaactggaagtgtgtgtgtgtgagcatgggtacccatttgataagagaaatgcatttgattgtgaagaagggagagttaaattctccattatgttcgtggtgtaaagtttagagctggaatttattataagaatgtaaaaccttaaattattaataaataactattttggctattgaa

SEQ ID NO: 417062 - DNA, 767 bp, Homo sapiens
cttatagatggttctgtatgtagggggttcgtaggatgcttgtggtgtttcttgcgccgggctgcggttcttacaagctgtgaaaactactacggcttctcaggttagatgattgcttttctcgttctggtggcttcagtaagttccaagccgagttctccctgcattgcgagaccaatctagacggctcgtgtagcagcagctcgccgccgttgccagtgctggggctcgggggcctgcggatcagctctgactcttcctcggacatcgagtctgaccttgaccgagaccccaatagtgcaacagactcggatggtagtccgctgtccaacagccagccttccttcccagtggagatcttgcccttcctctacttgggctgtgccaaagactccaccaacttggacgtgttggaggaattcggcatcaagtacatcttgaacgtcacccccaatttgccgaatctctttgagaacgcaggagagtttaaatacaagcaaatccccatctcggatcactggagccaaaacctgtcccagtttttccctgaggccatttctttcataggtgagactaattaatagtcgtcgctctgacatttaaatgcaaaattcctagccattcatagagtttaagctgttaatcgttcttgctgcttgctaatttgtctgactgcaggtctctaatgttcctagagcgtccttaattctggtttatcttcttgctaaaggaagaaaacctgccttttgacatggctgcagatcaca

SEQ ID NO: 417063 - DNA, 422 bp, Homo sapiens
agccaaaacaatcttgaaaaaaggaacaagatataaaactacaataagtaagactatgtgagactgacataagatagacatagattgagggtctaaaactttggccaggcacagcaggtcacacctataaccccaacactttgtgaggctgaggtagaaggattgcttgagcccagaattcgagaccaacctaggcaacatggtgaaattccatttctacaaaaatacaaaacttagttgggcatggtggtgcacacctgtaattccagctacttgagaggcgaagtaggaagattatttgagcctgggaggttggggctgcagtgaacagtgaacatgctactgcactccagcctggtgacagcgtgagacctcgtctcaaaaaacataaaaataaacctttacatgtattgtcaaatatg

SEQ ID NO: 417064 - DNA, 3432 bp, Homo sapiens
caggaccatggaactcagcgtcctcctcttccttgcactcctcacaggactcttgctactcctggttcagcgccaccctaacacccatgaccgcctcccaccagggccccgccctctgccccttttgggaaaccttctgcagatggatagaagaggcctactcaaatcctttctgaggttccgagagaaatatggggacgtcttcacggtacacctgggaccgaggcccgtggtcatgctgtgtggagtagaggccatacgggaggcccttgtggacaaggctgaggccttctctggccggggaaaaatcgccatggtcgacccattcttccggggatatggtgtgatctttgccaatggaaaccgctggaaggtgcttcggcgattctctgtgaccactatgagggacttcgggatgggaaagcggagtgtggaggagcggattcaggaggaggctcagtgtctgatagaggagcttcggaaatccaagggggccctcatggaccccaccttcctcttccagtccattaccgccaacatcatctgctccatcgtctttggaaaacgattccactaccaagatcaagagttcctgaagatgctgaacttgttctaccagactttttcactcatcagctctgtattcggccagctgtttgagctcttctctggcttcttgaaatactttcctggggcacacaggcaagtttacaaaaacctgcaggaaatcaatgcttacattggccacagtgtggagaagcaccgtgaaaccctggaccccagcgcccccaaggacctcatcgacacctacctgctccacatggaaaaagagaaatccaacgcacacagtgaattcagccaccagaacctcaacctcaacacgctctcgctcttctttgctggcactgagaccaccagcaccactctccgctacggcttcctgctcatgctcaaataccctcatgttgcagagagagtctacagggagattgaacaggtgattggcccacatcgccctccagagcttcatgaccgagccaaaatgccatacacagaggcagtcatctatgagattcagagattttccgaccttctccccatgggtgtgccccacattgtcacccaacacaccagcttccgagggtacatcatccccaaggacacagaagtatttctcatcctgagcactgctctccatgacccacactactttgaaaaaccagacgccttcaatcctgaccactttctggatgccaatggggcactgaaaaagactgaagcttttatccccttctccttagggaagcggatttgtcttggtgaaggcatcgcccgtgcggaattgttcctcttcttcaccaccatcctccagaacttctccatggccagccccgtggccccagaagacatcgatctgacaccccaggagtgtggtgtgggcaaaatacccccaacataccagatccgcttcctgccccgctgaaggggctgagggaagggggtcaaaggattccagggtcattcagtgtccccgcctctgtagacaatggctctgactccccgcaacttcctgcctctgagagacctgctacaagccagcttccttcccctccatggcaccagttgtctgaggtcacattgcaagtgagtgcaggagtgagattatcgaaaattataatatacaaaatcatatatatatatatgttcttgttttttgagacagagtctcacactgttgcccaggctggagtgcagtggcgtgatcttggctcactgcaacctccacccccggggatcaagcaactctcctgcctcagcctccctagtagctgggattacaggcatgcactaccacgcttggctaatttttgtatttttagtagagatggggtttcactgtgtaggccaggctggtctcgaactcctgaactcaagtgattcacccaccttagcctcccaaagtgctgggattacaggcgtgagtcaccgtgcccagccatgtatatatataattttaaaaattaagctgaaattcacataacataaaattagccgttttaaagtgtaaaatttagtggcgtgtggttcattcacaaagctgtacaaccaccaccatctagttccaaacattttctttttttctgagatggagtctcactctgtcacccaggttcgagttcagtggtgccatctctgtccactgcaacctccacatcctgggttcaagtgattctcctgcctcagcctctggaggagctggtatcacaggcgtcccccaccacgcctggctaaattttgtatttttaggtggtcttgaactcctgatgtcaggtgattctcctagctccaaatgttttcattatctctcccccaacaaaacccatacctatcaagctgtcactccccataccccattctctttttcatctcggcccctgtcaatctggtttttgtcactatggacttaccaattctgaatatttcccataaaccagaatcatacaatatttgatttttttttttttttgaaactaagccttgctctgtctcccaggctggagtgctatggtgcaatttttgttcactgcaacctctgccttccaagatcaagagattctccagtctcagctcccaagtagctgggattacaggcatgtactaccatgcctggctaattttcttgtagttttagtagggacatgttggccaggctggtggtgagctcctggcctcaggtgatccacccacctcagtgttccaaagtgctgatattacaggcataatatgtgatcttttgtgtctggttgctttcatgttgaatgctatttttgaggttcgtgcctgttgtagaccacagtcacacactgctgtagtcttccccagtcctcattcccagctgcctcttcctactgcttccgtctatcaaaaagcccccttggcccaggttccctgagctgtgggattctgcactggtgctttggattccctgatatgttccttcaaatctgctgagaattaaataaacatctctaaagcctgacctccccacgtcaagaggtgatctgtgccattttgtgtgtgattcttttattgtcgggtctctagggatttttctggaaggaatgttggtgagaatgcctctctcacctcaatgccaactctgtgaagggccaaaccattgtcttgctcatccctgtactctcaacacagcgtgtggcatatgacaggtgttcaaaatatttggtgaggaatgaatgaatgagtggctaaatcagccaccccctacccccacagcccacccaaaatggagctaggcctcctccatcagactatatctcctccatatcccactttcttgtgaggtccagaataaattctcatccccaaagggcccaggatgcccccattctgcctaccagttactctcgatac

SEQ ID NO: 417065 - DNA, 3636 bp, Homo sapiens
  misc_feature (3465)..(3465): n is a, c, g, or t
  misc_feature (3568)..(3568): n is a, c, g, or t
caggaccatggaactcagcgtcctcctcttccttgcactcctcacaggactcttgctactcctggttcagcgccaccctaacacccatgaccgcctcccaccagggccccgccctctgccccttttgggaaaccttctgcagatggatagaagaggcctactcaaatcctttctgaggttccgagagaaatatggggacgtcttcacggtacacctgggaccgaggcccgtggtcatgctgtgtggagtagaggccatacgggaggcccttgtggacaaggctgaggccttctctggccggggaaaaatcgccatggtcgacccattcttccggggatatggtgtgatctttgccaatggaaaccgctggaaggtgcttcggcgattctctgtgaccactatgagggacttcgggatgggaaagcggagtgtggaggagcggattcaggaggaggctcagtgtctgatagaggagcttcggaaatccaagggggccctcatggaccccaccttcctcttccagtccattaccgccaacatcatctgctccatcgtctttggaaaacgattccactaccaagatcaagagttcctgaagatgctgaacttgttctaccagactttttcactcatcagctctgtattcggccagctgtttgagctcttctctggcttcttgaaatactttcctggggcacacaggcaagtttacaaaaacctgcaggaaatcaatgcttacattggccacagtgtggagaagcaccgtgaaaccctggaccccagcgcccccaaggacctcatcgacacctacctgctccacatggaaaaagagaaatccaacgcacacagtgaattcagccaccagaacctcaacctcaacacgctctcgctcttctttgctggcactgagaccaccagcaccactctccgctacggcttcctgctcatgctcaaataccctcatgttgcagagagagtctacagggagattgaacaggtgattggcccacatcgccctccagagcttcatgaccgagccaaaatgccatacacagaggcagtcatctatgagattcagagattttccgaccttctccccatgggtgtgccccacattgtcacccaacacaccagcttccgagggtacatcatccccaaggacacagaagtatttctcatcctgagcactgctctccatgacccacactactttgaaaaaccagacgccttcaatcctgaccactttctggatgccaatggggcactgaaaaagactgaagcttttatccccttctccttagggaagcggatttgtcttggtgaaggcatcgcccgtgcggaattgttcctcttcttcaccaccatcctccagaacttctccatggccagccccgtggccccagaagacatcgatctgacaccccaggagtgtggtgtgggcaaaatacccccaacataccagatccgcttcctgccccgctgaaggggctgagggaagggggtcaaaggattccagggtcattcagtgtccccgcctctgtagacaatggctctgactccccgcaacttcctgcctctgagagacctgctacaagccagcttccttcccctccatggcaccagttgtctgaggtcacattgcaagtgagtgcaggagtgagattatcgaaaattataatatacaaaatcatatatatatatatgttcttgttttttgagacagagtctcacactgttgcccaggctggagtgcagtggcgtgatcttggctcactgcaacctccacccccggggatcaagcaactctcctgcctcagcctccctagtagctgggattacaggcatgcactaccacgcttggctaatttttgtatttttagtagagatggggtttcactgtgtaggccaggctggtctcgaactcctgaactcaagtgattcacccaccttagcctcccaaagtgctgggattacaggcgtgagtcaccgtgcccagccatgtatatatataattttaaaaattaagctgaaattcacataacataaaattagccgttttaaagtgtaaaatttagtggcgtgtggttcattcacaaagctgtacaaccaccaccatctagttccaaacattttctttttttctgagatggagtctcactctgtcacccaggttcgagttcagtggtgccatctctgtccactgcaacctccacatcctgggttcaagtgattctcctgcctcagcctctggaggagctggtatcacaggcgtcccccaccacgcctggctaaattttgtatttttaggtggtcttgaactcctgatgtcaggtgattctcctagctccaaatgttttcattatctctcccccaacaaaacccatacctatcaagctgtcactccccataccccattctctttttcatctcggcccctgtcaatctggtttttgtcactatggacttaccaattctgaatatttcccataaaccagaatcatacaatatttgatttttttttttttttgaaactaagccttgctctgtctcccaggctggagtgctatggtgcaatttttgttcactgcaacctctgccttccaagatcaagagattctccagtctcagctcccaagtagctgggattacaggcatgtactaccatgcctggctaattttcttgtagttttagtagggacatgttggccaggctggtggtgagctcctggcctcaggtgatccacccacctcagtgttccaaagtgctgatattacaggcataatatgtgatcttttgtgtctggttgctttcatgttgaatgctatttttgaggttcgtgcctgttgtagaccacagtcacacactgctgtagtcttccccagtcctcattcccagctgcctcttcctactgcttccgtctatcaaaaagcccccttggcccaggttccctgagctgtgggattctgcactggtgctttggattccctgatatgttccttcaaatctgctgagaattaaataaacatctctaaagcctgaaaaaaaaaaaaaaaaaaaaaaaaaaaaaaaaaaaaaaaaaaaaaaaaaaaaaaaaaaaaaaaaaaaaaaaaaaaaacctcgggccgaattcggcacgagtagtctcgattttttttttttttttttaactgcccatatgcaaagaatttatggaggatccattcaattttaaatggcttgaaaataagaccataggtatgcaatttttttttacagggttggacattattttaaaataggccctacatagatatcttcgggaaatgaaaattttttctccagtggttactactttaagggactactcatgaggaaggaattatacaaggttcttggctggccacttcacatatggagaacccttttggcttaactaggactaattttatgttgcccccatgggtgaatccttaaaaaaatagcanttcaaatcccctacaggattattttggaatgtcctgttttgggcttaaatgcatggaagcaagcttcttaatgttgaggggttacccatggaccaatttggtngggaaatcattttgcaagtcctctagggaccttttcaaccaatttgcatgcttaaaaaagctttggca

SEQ ID NO: 417066 - DNA, 3378 bp, Homo sapiens
caggaccatggaactcagcgtcctcctcttccttgcactcctcacaggactcttgctactcctggttcagcgccaccctaacacccatgaccgcctcccaccagggccccgccctctgccccttttgggaaaccttctgcagatggatagaagaggcctactcaaatcctttctgaggttccgagagaaatatggggacgtcttcacggtacacctgggaccgaggcccgtggtcatgctgtgtggagtagaggccatacgggaggcccttgtggacaaggctgaggccttctctggccggggaaaaatcgccatggtcgacccattcttccggggatatggtgtgatctttgccaatggaaaccgctggaaggtgcttcggcgattctctgtgaccactatgagggacttcgggatgggaaagcggagtgtggaggagcggattcaggaggaggctcagtgtctgatagaggagcttcggaaatccaagggggccctcatggaccccaccttcctcttccagtccattaccgccaacatcatctgctccatcgtctttggaaaacgattccactaccaagatcaagagttcctgaagatgctgaacttgttctaccagactttttcactcatcagctctgtattcggccagctgtttgagctcttctctggcttcttgaaatactttcctggggcacacaggcaagtttacaaaaacctgcaggaaatcaatgcttacattggccacagtgtggagaagcaccgtgaaaccctggaccccagcgcccccaaggacctcatcgacacctacctgctccacatggaaaaagagaaatccaacgcacacagtgaattcagccaccagaacctcaacctcaacacgctctcgctcttctttgctggcactgagaccaccagcaccactctccgctacggcttcctgctcatgctcaaataccctcatgttgcagagagagtctacagggagattgaacaggtgattggcccacatcgccctccagagcttcatgaccgagccaaaatgccatacacagaggcagtcatctatgagattcagagattttccgaccttctccccatgggtgtgccccacattgtcacccaacacaccagcttccgagggtacatcatccccaaggacacagaagtatttctcatcctgagcactgctctccatgacccacactactttgaaaaaccagacgccttcaatcctgaccactttctggatgccaatggggcactgaaaaagactgaagcttttatccccttctccttagggaagcggatttgtcttggtgaaggcatcgcccgtgcggaattgttcctcttcttcaccaccatcctccagaacttctccatggccagccccgtggccccagaagacatcgatctgacaccccaggagtgtggtgtgggcaaaatacccccaacataccagatccgcttcctgccccgctgaaggggctgagggaagggggtcaaaggattccagggtcattcagtgtccccgcctctgtagacaatggctctgactccccgcaacttcctgcctctgagagacctgctacaagccagcttccttcccctccatggcaccagttgtctgaggtcacattgcaagtgagtgcaggagtgagattatcgaaaattataatatacaaaatcatatatatatatatgttcttgttttttgagacagagtctcacactgttgcccaggctggagtgcagtggcgtgatcttggctcactgcaacctccacccccggggatcaagcaactctcctgcctcagcctccctagtagctgggattacaggcatgcactaccacgcttggctaatttttgtatttttagtagagatggggtttcactgtgtaggccaggctggtctcgaactcctgaactcaagtgattcacccaccttagcctcccaaagtgctgggattacaggcgtgagtcaccgtgcccagccatgtatatatataattttaaaaattaagctgaaattcacataacataaaattagccgttttaaagtgtaaaatttagtggcgtgtggttcattcacaaagctgtacaaccaccaccatctagttccaaacattttctttttttctgagatggagtctcactctgtcacccaggttcgagttcagtggtgccatctctgtccactgcaacctccacatcctgggttcaagtgattctcctgcctcagcctctggaggagctggtatcacaggcgtcccccaccacgcctggctaaattttgtatttttaggtggtcttgaactcctgatgtcaggtgattctcctagctccaaatgttttcattatctctcccccaaccggcccctgtcaatctggtttttgtcactatggacttaccaattctgaatatttcccataaaccagaatcatacaatatttgatttttttttttttttgaaactaagccttgctctgtctcccaggctggagtgctatggtgcaatttttgttcactgcaacctctgccttccaagatcaagagattctccagtctcagctcccaagtagctgggattacaggcatgtactaccatgcctggctaattttcttgtagttttagtagggacatgttggccaggctggtggtgagctcctggcctcaggtgatccacccacctcagtgttccaaagtgctgatattacaggcataatatgtgatcttttgtgtctggttgctttcatgttgaatgctatttttgaggttcgtgcctgttgtagaccacagtcacacactgctgtagtcttccccagtcctcattcccagctgcctcttcctactgcttccgtctatcaaaaagcccccttggcccaggttccctgagctgtgggattctgcactggtgctttggattccctgatatgttccttcaaatctgctgagaattaaataaacatctctaaagcctgacctccccacgtcaagaggtgatctgtgccattttgtgtgtgattcttttattgtcgggtctctagggatttttctggaaggaatgttggtgagaatgcctctctcacctcaatgccaactctgtgaagggccaaaccattgtcttgctcatccctgtactctcaacacagcgtgtggcatatgacaggtgttcaaaatatttggtgaggaatgaatgaatgagtggctaaatcagccaccccctacccccacagcccacccaaaatggagctaggcctcctccatcagactatatctcctccatatcccactttcttgtgaggtccagaataaattctcatccccaaagggcccaggatgcccccattctgcctaccagttactctcgatac

SEQ ID NO: 417067 - DNA, 3378 bp, Homo sapiens
caggaccatggaactcagcgtcctcctcttccttgcactcctcacaggactcttgctactcctggttcagcgccaccctaacacccatgaccgcctcccaccagggccccgccctctgccccttttgggaaaccttctgcagatggatagaagaggcctactcaaatcctttctgaggttccgagagaaatatggggacgtcttcacggtacacctgggaccgaggcccgtggtcatgctgtgtggagtagaggccatacgggaggcccttgtggacaaggctgaggccttctctggccggggaaaaatcgccatggtcgacccattcttccggggatatggtgtgatctttgccaatggaaaccgctggaaggtgcttcggcgattctctgtgaccactatgagggacttcgggatgggaaagcggagtgtggaggagcggattcaggaggaggctcagtgtctgatagaggagcttcggaaatccaagggggccctcatggaccccaccttcctcttccagtccattaccgccaacatcatctgctccatcgtctttggaaaacgattccactaccaagatcaagagttcctgaagatgctgaacttgttctaccagactttttcactcatcagctctgtattcggccagctgtttgagctcttctctggcttcttgaaatactttcctggggcacacaggcaagtttacaaaaacctgcaggaaatcaatgcttacattggccacagtgtggagaagcaccgtgaaaccctggaccccagcgcccccaaggacctcatcgacacctacctgctccacatggaaaaagagaaatccaacgcacacagtgaattcagccaccagaacctcaacctcaacacgctctcgctcttctttgctggcactgagaccaccagcaccactctccgctacggcttcctgctcatgctcaaataccctcatgttgcagagagagtctacagggagattgaacaggtgattggcccacatcgccctccagagcttcatgaccgagccaaaatgccatacacagaggcagtcatctatgagattcagagattttccgaccttctccccatgggtgtgccccacattgtcacccaacacaccagcttccgagggtacatcatccccaaggacacagaagtatttctcatcctgagcactgctctccatgacccacactactttgaaaaaccagacgccttcaatcctgaccactttctggatgccaatggggcactgaaaaagactgaagcttttatccccttctccttagggaagcggatttgtcttggtgaaggcatcgcccgtgcggaattgttcctcttcttcaccaccatcctccagaacttctccatggccagccccgtggccccagaagacatcgatctgacaccccaggagtgtggtgtgggcaaaatacccccaacataccagatccgcttcctgccccgctgaaggggctgagggaagggggtcaaaggattccagggtcattcagtgtccccgcctctgtagacaatggctctgactccccgcaacttcctgcctctgagagacctgctacaagccagcttccttcccctccatggcaccagttgtctgaggtcacattgcaagtgagtgcaggagtgagattatcgaaaattataatatacaaaatcatatatatatatatgttcttgttttttgagacagagtctcacactgttgcccaggctggagtgcagtggcgtgatcttggctcactgcaacctccacccccggggatcaagcaactctcctgcctcagcctccctagtagctgggattacaggcatgcactaccacgcttggctaatttttgtatttttagtagagatggggtttcactgtgtaggccaggctggtctcgaactcctgaactcaagtgattcacccaccttagcctcccaaagtgctgggattacaggcgtgagtcaccgtgcccagccatgtatatatataattttaaaaattaagctgaaattcacataacataaaattagccgttttaaagtgtttccaaacattttctttttttctgagatggagtctcactctgtcacccaggttcgagttcagtggtgccatctctgtccactgcaacctccacatcctgggttcaagtgattctcctgcctcagcctctggaggagctggtatcacaggcgtcccccaccacgcctggctaaattttgtatttttaggtggtcttgaactcctgatgtcaggtgattctcctagctccaaatgttttcattatctctcccccaacaaaacccatacctatcaagctgtcactccccataccccattctctttttcatctcggcccctgtcaatctggtttttgtcactatggacttaccaattctgaatatttcccataaaccagaatcatacaatatttgatttttttttttttttgaaactaagccttgctctgtctcccaggctggagtgctatggtgcaatttttgttcactgcaacctctgccttccaagatcaagagattctccagtctcagctcccaagtagctgggattacaggcatgtactaccatgcctggctaattttcttgtagttttagtagggacatgttggccaggctggtggtgagctcctggcctcaggtgatccacccacctcagtgttccaaagtgctgatattacaggcataatatgtgatcttttgtgtctggttgctttcatgttgaatgctatttttgaggttcgtgcctgttgtagaccacagtcacacactgctgtagtcttccccagtcctcattcccagctgcctcttcctactgcttccgtctatcaaaaagcccccttggcccaggttccctgagctgtgggattctgcactggtgctttggattccctgatatgttccttcaaatctgctgagaattaaataaacatctctaaagcctgacctccccacgtcaagaggtgatctgtgccattttgtgtgtgattcttttattgtcgggtctctagggatttttctggaaggaatgttggtgagaatgcctctctcacctcaatgccaactctgtgaagggccaaaccattgtcttgctcatccctgtactctcaacacagcgtgtggcatatgacaggtgttcaaaatatttggtgaggaatgaatgaatgagtggctaaatcagccaccccctacccccacagcccacccaaaatggagctaggcctcctccatcagactatatctcctccatatcccactttcttgtgaggtccagaataaattctcatccccaaagggcccaggatgcccccattctgcctaccagttactctcgatac

SEQ ID NO: 417068 - DNA, 2777 bp, Homo sapiens
  misc_feature (121)..(121): n is a, c, g, or t
gaattcggggcaagggacaaaaatacagcaacaagagaaaaaactcacagaggcagaaagagacggggacaaaaagagagaaacacatcaaagagatgtggagagagatagaaacagagtnaggaagactaaagagaggctgagagagatgagttagagatacgcggttggatgtgtagaggacagagaaaagcaaactgggccagatagtgtcaaagacctttaggccaacggagggcagccagggagatgggcgtatacacagcaagctacagcctcccctgaccctccccttccttccctactgtggacgcaggagaaatccaacgcacacagtgaattcagccaccagaacctcaacctcaacacgctctcgctcttctttgctggcactgagaccaccagcaccactctccgctacggcttcctgctcatgctcaaataccctcatgttgcagagagagtctacagggagattgaacaggtgattggcccacatcgccctccagagcttcatgaccgagccaaaatgccatacacagaggcagtcatctatgagattcagagattttccgaccttctccccatgggtgtgccccacattgtcacccaacacaccagcttccgagggtacatcatccccaagggaagcggatttgtcttggtgaaggcatcgcccgtgcggaattgttcctcttcttcaccaccatcctccagaacttctccatggccagccccgtggccccagaagacatcgatctgacaccccaggagtgtggtgtgggcaaaatacccccaacataccagatccgcttcctgccccgctgaaggggctgagggaagggggtcaaaggattccagggtcattcagtgtccccgcctctgtagacaatggctctgactccccgcaacttcctgcctctgagagacctgctacaagccagcttccttcccctccatggcaccagttgtctgaggtcacattgcaagtgagtgcaggagtgagattatcgaaaattataatatacaaaatcatatatatatatatgttcttgttttttgagacagagtctcacactgttgcccaggctggagtgcagtggcgtgatcttggctcactgcaacctccacccccggggatcaagcaactctcctgcctcagcctccctagtagctgggattacaggcatgcactaccacgcttggctaatttttgtatttttagtagagatggggtttcactgtgtaggccaggctggtctcgaactcctgaactcaagtgattcacccaccttagcctcccaaagtgctgggattacaggcgtgagtcaccgtgcccagccatgtatatatataattttaaaaattaagctgaaattcacataacataaaattagccgttttaaagtgtaaaatttagtggcgtgtggttcattcacaaagctgtacaaccaccaccatctagttccaaacattttctttttttctgagatggagtctcactctgtcacccaggttcgagttcagtggtgccatctctgtccactgcaacctccacatcctgggttcaagtgattctcctgcctcagcctctggaggagctggtatcacaggcgtcccccaccacgcctggctaaattttgtatttttaggtggtcttgaactcctgatgtcaggtgattctcctagctccaaatgttttcattatctctcccccaacaaaacccatacctatcaagctgtcactccccataccccattctctttttcatctcggcccctgtcaatctggtttttgtcactatggacttaccaattctgaatatttcccataaaccagaatcatacaatatttgatttttttttttttttgaaactaagccttgctctgtctcccaggctggagtgctatggtgcaatttttgttcactgcaacctctgccttccaagatcaagagattctccagtctcagctcccaagtagctgggattacaggcatgtactaccatgcctggctaattttcttgtagttttagtagggacatgttggccaggctggtggtgagctcctggcctcaggtgatccacccacctcagtgttccaaagtgctgatattacaggcataatatgtgatcttttgtgtctggttgctttcatgttgaatgctatttttgaggttcgtgcctgttgtagaccacagtcacacactgctgtagtcttccccagtcctcattcccagctgcctcttcctactgcttccgtctatcaaaaagcccccttggcccaggttccctgagctgtgggattctgcactggtgctttggattccctgatatgttccttcaaatctgctgagaattaaataaacatctctaaagcctgacctccccacgtcaagaggtgatctgtgccattttgtgtgtgattcttttattgtcgggtctctagggatttttctggaaggaatgttggtgagaatgcctctctcacctcaatgccaactctgtgaagggccaaaccattgtcttgctcatccctgtactctcaacacagcgtgtggcatatgacaggtgttcaaaatatttggtgaggaatgaatgaatgagtggctaaatcagccaccccctacccccacagcccacccaaaatggagctaggcctcctccatcagactatatctcctccatatcccactttcttgtgaggtccagaataaattctcatccccaaagggcccaggatgcccccattctgcctaccagttactctcgatac

SEQ ID NO: 417069 - DNA, 521 bp, Homo sapiens
accagtcacggaccctggacccagcgcacccgcaccatggccggccccagcctcgcttgctgtctgctcggcctcctggcgctgacctccgcctgctacatccagaactgccccctgggaggcaagagggccgcgccggacctcgacgtgcgcaagtgcctcccctgcggccccgggggcaaaggccgctgcttcgggcccaatatctgctgcgcggaagagctgggctgcttcgtgggcaccgccgaagcgctgcgctgccaggaggagaactacctgccgtcgccctgccagtccggccagaaggcgtgcgggagcgggggccgctgcgcggtcttgggcctctgctgcagcccggacggctgccacgccgaccctgcctgcgacgcggaagccaccttctcccagcgctgaaacttgatggctccgaacaccctcgaagcgcgccactcgcttcccccatagccaccccagaaatggtgaaaataaaataaagcaggtttttctcctctaccttgact

SEQ ID NO: 417070 - DNA, 276 bp, Homo sapiens
tgacatttcctgcagagaaagtctgtaaggaaccctgactccaggctgtttctcgttaaggtgctgtgcttcctgttttgttcattatagttttgaaagattcatattatagccaattttcccagaaaagtttagtttataataacctagaatcagcaatttatttctagttaaaatgttactgccttccacagtctcactgggagagggtctggatcatttctcctcaggaaatcactgccttgagctgaaatatactggaatcctgctacttcc

SEQ ID NO: 417071 - DNA, 3267 bp, Homo sapiens
agcaggaagctcgcgccgccgtcgccgccgccgctcagcttccccgggcgcgtccaggacccgctgcgccaggcgcgccgtccccggacccggcgtgcgtccctacgaggaaagggaccccgccgctcgagccgcctccgccagccccactgcgaggggtcccagagccagccgcgcccgccctcgcccccggccccgcagccttcccgccctgcgcgccatgaacgcccccgagcggcagccccaacccgacggcggggacgccccaggccacgagcctgggggcagcccccaagacgagcttgacttctccatcctcttcgactatgagtatttgaatccgaacgaagaagagccgaatgcacataaggtcgccagcccaccctccggacccgcataccccgatgatgtaatggactatggcctcaagccatacagcccccttgctagtctctctggcgagccccccggccgattcggagagccggatagggtagggccgcagaagtttctgagcgcggccaagccagcaggggcctcgggcctgagccctcggatcgagatcactccgtcccacgaactgatccaggcagtggggcccctccgcatgagagacgcgggcctcctggtggagcagcctcccctggccggggtggccgccagcccgaggttcaccctgcccgtgcccggcttcgagggctaccgcgagccgctttgcttgagccccgctagcagcggctcctctgccagcttcatttctgacaccttctccccctacacctcgccctgcgtctcgcccaataacggcgggcccgacgacctgtgtccgcagtttcaaaacatccctgctcattattcccccagaacctcgccaataatgtcacctcgaaccagcctcgccgaggacagctgcctgggccgccactcgcccgtgccccgtccggcctcccgctcctcatcgcctggtgccaagcggaggcattcgtgcgccgaggccttggttgccctgccgcccggagcctcaccccagcgctcccggagcccctcgccgcagccctcatctcacgtggcaccccaggaccacggctccccggctgggtacccccctgtggctggctctgccgtgatcatggatgccctgaacagcctcgccacggactcgccttgtgggatcccccccaagatgtggaagaccagccctgacccctcgccggtgtctgccgccccatccaaggccggcctgcctcgccacatctacccggccgtggagttcctggggccctgcgagcagggcgagaggagaaactcggctccagaatccatcctgctggttccgcccacttggcccaagccgctggtgcctgccattcccatctgcagcatcccagtgactgcatccctccctccacttgagtggccgctgtccagtcagtcaggctcttacgagctgcggatcgaggtgcagcccaagccacatcaccgggcccactatgagacagaaggcagccgaggggctgtcaaagctccaactggaggccaccctgtggttcagctccatggctacatggaaaacaagcctctgggacttcagatcttcattgggacagctgatgagcggatccttaagccgcacgccttctaccaggtgcaccgaatcacggggaaaactgtcaccaccaccagctatgagaagatagtgggcaacaccaaagtcctggagatccccttggagcccaaaaacaacatgagggcaaccatcgactgtgcggggatcttgaagcttagaaacgccgacattgagctgcggaaaggcgagacggacattggaagaaagaacacgcgggtgagactggttttccgagttcacatcccagagtccagtggcagaatcgtctctttacagactgcatctaaccccatcgagtgctcccagcgatctgctcacgagctgcccatggttgaaagacaagacacagacagctgcctggtctatggcggccagcaaatgatcctcacggggcagaactttacatccgagtccaaagttgtgtttactgagaagaccacagatggacagcaaatttgggagatggaagccacggtggataaggacaagagccagcccaacatgctttttgttgagatccctgaatatcggaacaagcatatccgcacacctgtaaaagtgaacttctacgtcatcaatgggaagagaaaacgaagtcagcctcagcactttacctaccacccagtcccagccatcaagacggagcccacggatgaatatgaccccactctgatctgcagccccacccatggaggcctggggagccagccttactacccccagcacccgatggtggccgagtccccctcctgcctcgtggccaccatggctccctgccagcagttccgcacggggctctcatcccctgacgcccgctaccagcaacagaacccagcggccgtactctaccagcggagcaagagcctgagccccagcctgctgggctatcagcagccggccctcatggccgccccgctgtcccttgcggacgctcaccgctctgtgctggtgcacgccggctcccagggccagagctcagccctgctccacccctctccgaccaaccagcaggcctcgcctgtgatccactactcacccaccaaccagcagctgcgctgcggaagccaccaggagttccagcacatcatgtactgcgagaatttcgcaccaggcaccaccagacctggcccgcccccggtcagtcaaggtcagaggctgagcccgggttcctaccccacagtcattcagcagcagaatgccacgagccaaagagccgccaaaaacggacccccggtcagtgaccaaaaggaagtattacctgcgggggtgaccattaaacaggagcagaacttggaccagacctacttggatgatgttaatgaaattatcaggaaggagttttcaggacctcctgccagaaatcagacgtaaaagaagccattatagcaagacaccttctgtatctgacccctcggagccctccacagcccctcaccttctgtctcctttcatgttcatctcccagcccggagtccacacgcggatcaatgtatgggcactaagcggactctcacttaaggagctcgccacctccctctaaacaccagagagaactcttcttttcggtttatgttttaaatcccagagagcatcctggttgatcttaatggtgttccgtccaaatagtaagcacctgctga

SEQ ID NO: 417072 - DNA, 525 bp, Homo sapiens
ctgacatttggaggcagggcgtatttaggtaataaatcagcatgtaaagcatctatgacatttctgacggggataagcagtagaaaggaaagcaagcggagacaggagctgctgggatagaaagagggggaggcatcatctgaaatcaagcattctcctctgagctgtcacctggagagataggctgtaaacatcccagggctgagtcagacctaccagccacctttccaatattggaaaaatctataattcaagatgttcatggccagggtaaaatttcctacctaagacaattgcatggggagccttttgcccaaggctgataagtgacagggaccagctgtttgtcccacccgtatggactcccaaggccatgttctcaagcaccatccacgaatcctccgtgcacatccgtggctcactgccatgggcgcccctatgtgctcttttctcctcccagtcccagccatcaagacggagcccacggatgaatatgaccccactctgatctgcagccccacccat

SEQ ID NO: 417073 - DNA, 247 bp, Homo sapiens
actatgagacagaaggcagccgaggggctgtcaaagctccaactggaggccaccctgtggttcaggtatggacttgaatgctcttccttttgtgtgtggtgtttgtcactaagagattcacttctgctgacccactgtttgttgcttgttaaggtgaggtatgtgtctcagcctcttactcctttgaggaatgagaaatatgagattaaattagcattagaagctaatccagctactcataagccag

SEQ ID NO: 417074 - DNA, 3355 bp, Homo sapiens
agcaggaagctcgcgccgccgtcgccgccgccgctcagcttccccgggcgcgtccaggacccgctgcgccaggcgcgccgtccccggacccggcgtgcgtccctacgaggaaagggaccccgccgctcgagccgcctccgccagccccactgcgaggggtcccagagccagccgcgcccgccctcgcccccggccccgcagccttcccgccctgcgcgccatgaacgcccccgagcggcagccccaacccgacggcggggacgccccaggccacgagcctgggggcagcccccaagacgagcttgacttctccatcctcttcgactatgagtatttgaatccgaacgaagaagagccgaatgcacataaggtcgccagcccaccctccggacccgcataccccgatgatgtaatggactatggcctcaagccatacagcccccttgctagtctctctggcgagccccccggccgattcggagagccggatagggtagggccgcagaagtttctgagcgcggccaagccagcaggggcctcgggcctgagccctcggatcgagatcactccgtcccacgaactgatccaggcagtggggcccctccgcatgagagacgcgggcctcctggtggagcagcctcccctggccggggtggccgccagcccgaggttcaccctgcccgtgcccggcttcgagggctaccgcgagccgctttgcttgagccccgctagcagcggctcctctgccagcttcatttctgacaccttctccccctacacctcgccctgcgtctcgcccaataacggcgggcccgacgacctgtgtccgcagtttcaaaacatccctgctcattattcccccagaacctcgccaataatgtcacctcgaaccagcctcgccgaggacagctgcctgggccgccactcgcccgtgccccgtccggcctcccgctcctcatcgcctggtgccaagcggaggcattcgtgcgccgaggccttggttgccctgccgcccggagcctcaccccagcgctcccggagcccctcgccgcagccctcatctcacgtggcaccccaggaccacggctccccggctgggtacccccctgtggctggctctgccgtgatcatggatgccctgaacagcctcgccacggactcgccttgtgggatcccccccaagatgtggaagaccagccctgacccctcgccggtgtctgccgccccatccaaggccggcctgcctcgccacatctacccggccgtggagttcctggggccctgcgagcagggcgagaggagaaactcggctccagaatccatcctgctggttccgcccacttggcccaagccgctggtgcctgccattcccatctgcagcatcccagtgactgcatccctccctccacttgagtggccgctgtccagtcagtcaggctcttacgagctgcggatcgaggtgcagcccaagccacatcaccgggcccactatgagacagaaggcagccgaggggctgtcaaagctccaactggaggccaccctgtggttcagctccatggctacatggaaaacaagcctctgggacttcagatcttcattgggacagctgatgagcggatccttaagccgcacgccttctaccaggtgcaccgaatcacggggaaaactgtcaccaccaccagctatgagaagatagtgggcaacaccaaagtcctggagatccccttggagcccaaaaacaacatgagggcaaccatcgactgtgcggggatcttgaagcttagaaacgccgacattgagctgcggaaaggcgagacggacattggaagaaagaacacgcgggtgagactggttttccgagttcacatcccagagtccagtggcagaatcgtctctttacagactgcatctaaccccatcgagtgctcccagcgatctgctcacgagctgcccatggttgaaagacaagacacagacagctgcctggtctatggcggccagcaaatgatcctcacggggcagaactttacatccgagtccaaagttgtgtttactgagaagaccacagatggacagcaaatttgggagatggaagccacggtggataaggacaagagccagcccaacatgctttttgttgagatccctgaatatcggaacaagcatatccgcacacctgtaaaagtgaacttctacgtcatcaatgggaagagaaaacgaagtcagcctcagcactttacctaccacccagtcccagccatcaagacggagcccacggatgaatatgaccccactctgatctgcagccccacccatggaggcctggggagccagccttactacccccagcacccgatggtggccgagtccccctcctgcctcgtggccaccatggctccctgccagcagttccgcacggggctctcatcccctgacgcccgctaccagcaacagaacccagcggccgtactctaccagcggagcaagagcctgagccccagcctgctgggctatcagcagccggccctcatggccgccccgctgtcccttgcggacgctcaccgctctgtgctggtgcacgccggctcccagggccagagctcagccctgctccacccctctccgaccaaccagcaggcctcgcctgtgatccactactcacccaccaaccagcagctgcgctgcggaagccaccaggagttccagcacatcatgtactgcgagaatttcgcaccaggcaccaccagacctggcccgcccccggtcagtcaaggtcagaggctgagcccgggttcctaccccacagtcattcagcagcagaatgccacgagccaaagagccgccaaaaacggacccccggtcagtgaccaaaaggaagtattacctgcgggggtgaccattaaacaggagcagaacttggaccagacctacttggatgatgagctgatagacacacaccttagctggatacaaaacatattatgaaacagaatgactgtgatctttgatccgagaaatcaaagttaaagttaatgaaattatcaggaaggagttttcaggacctcctgccagaaatcagacgtaaaagaagccattatagcaagacaccttctgtatctgacccctcggagccctccacagcccctcaccttctgtctcctttcatgttcatctcccagcccggagtccacacgcggatcaatgtatgggcactaagcggactctcacttaaggagctcgccacctccctctaaacaccagagagaactcttcttttcggtttatgttttaaatcccagagagcatcctggttgatcttaatggtgttccgtccaaatagtaagcacctgctga

SEQ ID NO: 417075 - DNA, 1070 bp, Homo sapiens
aactcctttaacttctcaacttttcccactaaaactgtgaaacattatataaaatctttaatcaataggatatgatacatatttcatcattttgtttcaggttttggttgtgataaataacactgaaaaaccatcctaatatatgtattaactttatcattagaaaaggggattgttcaaaaaaaaacaatacacagaaaccttttttgaaaattaaaaacattaagaaacttcttgtaattcacaaataattgaaattaagtaattttctcagcttaagagtttgtattttttaagtgaatatcagtaattaatccattaacattgatgctctatttctgcttttaagtttgaactgaggctgatcaatgttcagtcaattctcctttgggattggtgtcaatcaaagacaaatcacaacaagtgattgtccagggtgtccatgagctctatgatctggaggagactccagtgagctggaaggatgacactgagagaacaaatcgattggtcctcattggtaagtctcaaaggattcacagttttaaaacaaagtgaaaaatatatttgaaagggatatcatgtgccacttaaacagattaaccattcaggtcctcttttaaaactaaataagcttgtggtcaatgtttcatctttatcatgttacaacgttcgtaaaagcttgttaggacttttgttcttcttcagttttagaaaagtggttaatccaaggaccaatgtgactttgatgtactgacctggaaagttaaagatggaatcactcaattgctattctttttgtaaatttctaaacaccataaagcatttaatgaactggaattgataggtgaactgtgtcattttaataagcataatgtaatcacgtcatattttgttttgtttgcaggcagaaatttagataaggatatccttaaacagctgtttatagctactgtgacagaaacagaaaagcagtggacaacacatttcaaagaagatcaagtttgtacataacactagtggcatttcttatcaaaaggattggataataaaaataagtttctactggg

SEQ ID NO: 417076 - DNA, 1338 bp, Homo sapiens
agtcagtgtcaaaatattttttggagttagcctgactctggagaggtcagtaaaataaacagttgcactgagaggccagattagcaagtatgggtttctaaatgataaactgctttttggctagaatcagggctgaatcagccttcccaccacttatttgtttctagggtgtttgaaaggcctagtactgagttcacgtggtgcatgattgtgggctggggtgcagggaagtattttagattctaatatgggggtttggtgtgaagggaagtatattagattctaagaaactatatttcagtggttatcctttttttaaaataagtaataatgaatatttagaaccagaacagttttgtaagaaggaaaatacctaaaatctgaactgtaatcttctatgtttttatgacattatgtgaatcaaaggggttttccttttaagtaaaagaaaaggtcaggagtatgaaatcctaagccctcttcctccccctataaaaccccacaggttcacttgtagaaaaaaattgcaaatgaggaagaaaaatgctttcagctagaaaagttagttttggatttgtgtattcagtaacagaacatgttgaagtttttattaaatgcaagaaaatgtctctaaagtaaaatcctttgtgttgacattagattttttattgtattatagtaactttattcaaacttttttttgtttaggcatttaacagaagagaaacctgatggccttatcaatgaagctactagatccataaatggactaggacaaatcttagaaacacaaagatcaagagttgatctctctaatgtattagatcttcatgcctttgatagtctctctggaataagtttgcagaaaaaacttcagcatgtgccaggaacacaacctcaccttgatcagagtattgttacaatcacatttgaagtaccaggaaatgcaaaggaagaacatcttaatatgtttattcagaatctcctgtgggaaaagaatgtgagaaacaaggacaatcactgcatggaggtcataaggctgaagggattggtgtcaatcaaagacaaatcacaacaagtgattgtccagggtgtccatgagctctatgatctggaggagactccagtgagctggaaggatgacactgagagaacaaatcgattggtcctcattggcagaaatttagataaggatatccttaaacagctgtttatagctactgtgacagaaacagaaaagcagtggacaacacatttcaaagaagatcaagtttgtacataacactagtggcatttcttatcaaaaggattggataataaaaataagtttctactggg

SEQ ID NO: 417077 - DNA, 683 bp, Homo sapiens
aactcctttaacttctcaacttttcccactaaaactgtgaaacattatataaaatctttaatcaataggatatgatacatatttcatcattttgtttcaggttttggttgtgataaataacactgaaaaaccatcctaatatatgtattaactttatcattagaaaaggggattgttcaaaaaaaaacaatacacagaaaccttttttgaaaattaaaaacattaagaaacttcttgtaattcacaaataattgaaattaagtaattttctcagcttaagagtttgtattttttaagtgaatatcagtaattaatccattaacattgatgctctatttctgcttttaagtttgaactgaggctgatcaatgttcagtcaattctcctttgggattggtgtcaatcaaagacaaatcacaacaagtgattgtccagggtgtccatgagctctatgatctggaggagactccagtgagctggaaggatgacactgagagaacaaatcgattggtcctcattggcagaaatttagataaggatatccttaaacagctgtttatagctactgtgacagaaacagaaaagcagtggacaacacatttcaaagaagatcaagtttgtacataacactagtggcatttcttatcaaaaggattggataataaaaataagtttctactggg

SEQ ID NO: 417078 - DNA, 1584 bp, Homo sapiens
  misc_feature (512)..(512): n is a, c, g, or t
tgcgcgtacggcgtgttggtcccagcggttcagctgaggtagggacgtgccgtaggccggaatgttaccggctgttggatctgtggatgaggaagaggatcctgcggaggaggattgtcctgaattggttcccattgagacgacgcaaagcgaggaggaggaaaagtctggcctcggcgccaagatcccagtcacaattatcaccgggtatttaggtgctgggaagacaacacttctgaactatattttgacagagcaacatagtaaaagagtagcggtcattttaaatgaatctggggaaggaagtgcgctggagaaatccttagctgtcagccaaggtggagagctctatgaagagtggctggaacttagaaacggttgcctctgctgttcagtgaaggacaatggccttagagctattgagaatttgatgcaaaagaaggggaaatttgatgacatactgttagagaccactggattagcagaccctggtgcagtggcttctatgtttngggttgatgctgaattagggagtgatatttaccttgatggtatcataactattgtggattcaaaatatggattaaaagtgaaataccactaaaggcagaagagaatgaaatcatcccacccactgacccgttcccaatctgagcatatggatagggcccaaagcacatttaacagaagagaaacctgatggccttatcaatgaagctactaggcaagttgctttggcagatatcattctcattaataaaacagacttggttccagaagaagatgtaaagaaattaagaacgacaattaggtacaaaatgataagtgtgttaagtgcctacagatccatattgtatacacagaatattttttactctgattgttgccctgtagaaacttaaggcataaggttgacctgcttcaagaacgttagggaatcacatatattgttgatggctaattgttatataaatggtaatacataaaattagtcctcagtgcttgcagaatatagttcacagttaatagactgatattcagggtcttcgcactccatctttcttttcctgtcttctctttgactctttcctaatgtcagtcttccctaactttacccaggatggttaattcactttcccatggatgcatcctctcagttcctgtctttactcataatgtattctcactctgccaatccctgagttctttcttgttctgttttttttttttttaaatttattctatagagcctattctgtctctccccgcttcctatgtgaagtcttccctgactcaagtggtctcagttttccctgaactcttgttgacttcatcttccttaactgtcaaccatgccttgtcttccagcttgctttaatatcttctttgtccatagccaaggctgatcagcataggacaatcaggacaatatgaatgatgctcaaatatgtgctaacagtcattttgctgactgttctggagactcccattccttttgaaaacaaagatggacttttcaaatgaagttatagttcagggactttgttttgaattattttgtaagacctgaactaataaaagccc

SEQ ID NO: 417079 - DNA, 1305 bp, Homo sapiens
  misc_feature (512)..(512): n is a, c, g, or t
tgcgcgtacggcgtgttggtcccagcggttcagctgaggtagggacgtgccgtaggccggaatgttaccggctgttggatctgtggatgaggaagaggatcctgcggaggaggattgtcctgaattggttcccattgagacgacgcaaagcgaggaggaggaaaagtctggcctcggcgccaagatcccagtcacaattatcaccgggtatttaggtgctgggaagacaacacttctgaactatattttgacagagcaacatagtaaaagagtagcggtcattttaaatgaatctggggaaggaagtgcgctggagaaatccttagctgtcagccaaggtggagagctctatgaagagtggctggaacttagaaacggttgcctctgctgttcagtgaaggacaatggccttagagctattgagaatttgatgcaaaagaaggggaaatttgatgacatactgttagagaccactggattagcagaccctggtgcagtggcttctatgtttngggttgatgctgaattagggagtgatatttaccttgatggtatcataactattgtggattcaaaatatggattaaaacatttaacagaagagaaacctgatggccttatcaatgaagctactaggcaagttgctttggcagatatcattctcattaataaaacagacttggttccagaagaagatgtaaagaaattaagaacgacaattagatccataaatggactaggacaaatcttagaaacacaaagatcaagagttgatctctctaatgtattagatcttcatgcctttgatagtctctctggaataagtttgcagaaaaaacttcagcatgtgccaggaacacaacctcaccttgatcagagtattgttacaatcacatttgaagtaccaggaaatgcaaaggaagaacatcttaatatgtttattcagaatctcctgtgggaaaagaatgtgagaaacaaggacaatcactgcatggaggtcataaggctgaagggattggtgtcaatcaaagacaaatcacaacaagtgattgtccagggtgtccatgagctctatgatctggaggagactccagtgagctggaaggatgacactgagagaacaaatcgattggtcctcattggcagaaatttagataaggatatccttaaacagctgtttatagctactgtgacagaaacagaaaagcagtggacaacacatttcaaagaagatcaagtttgtacataacactagtggcatttcttatcaaaaggattggataataaaaataagtttctactggg

SEQ ID NO: 417080 - DNA, 1393 bp, Homo sapiens
  misc_feature (512)..(512): n is a, c, g, or t
tgcgcgtacggcgtgttggtcccagcggttcagctgaggtagggacgtgccgtaggccggaatgttaccggctgttggatctgtggatgaggaagaggatcctgcggaggaggattgtcctgaattggttcccattgagacgacgcaaagcgaggaggaggaaaagtctggcctcggcgccaagatcccagtcacaattatcaccgggtatttaggtgctgggaagacaacacttctgaactatattttgacagagcaacatagtaaaagagtagcggtcattttaaatgaatctggggaaggaagtgcgctggagaaatccttagctgtcagccaaggtggagagctctatgaagagtggctggaacttagaaacggttgcctctgctgttcagtgaaggacaatggccttagagctattgagaatttgatgcaaaagaaggggaaatttgatgacatactgttagagaccactggattagcagaccctggtgcagtggcttctatgtttngggttgatgctgaattagggagtgatatttaccttgatggtatcataactattgtggattcaaaatatggattaaaagtgaaataccactaaaggcagaagagaatgaaatcatcccacccactgacccgttcccaatctgagcatatggatagggcccaaagcacatttaacagaagagaaacctgatggccttatcaatgaagctactaggcaagttgctttggcagatatcattctcattaataaaacagacttggttccagaagaagatgtaaagaaattaagaacgacaattagatccataaatggactaggacaaatcttagaaacacaaagatcaagagttgatctctctaatgtattagatcttcatgcctttgatagtctctctggaataagtttgcagaaaaaacttcagcatgtgccaggaacacaacctcaccttgatcagagtattgttacaatcacatttgaagtaccaggaaatgcaaaggaagaacatcttaatatgtttattcagaatctcctgtgggaaaagaatgtgagaaacaaggacaatcactgcatggaggtcataaggctgaagggattggtgtcaatcaaagacaaatcacaacaagtgattgtccagggtgtccatgagctctatgatctggaggagactccagtgagctggaaggatgacactgagagaacaaatcgattggtcctcattggcagaaatttagataaggatatccttaaacagctgtttatagctactgtgacagaaacagaaaagcagtggacaacacatttcaaagaagatcaagtttgtacataacactagtggcatttcttatcaaaaggattggataataaaaataagtttctactggg

SEQ ID NO: 417081 - DNA, 1425 bp, Homo sapiens
agtcagtgtcaaaatattttttggagttagcctgactctggagaggtcagtaaaataaacagttgcactgagaggccagattagcaagtatgggtttctaaatgataaactgctttttggctagaatcagggctgaatcagccttcccaccacttatttgtttctagggtgtttgaaaggcctagtactgagttcacgtggtgcatgattgtgggctggggtgcagggaagtattttagattctaatatgggggtttggtgtgaagggaagtatattagattctaagaaactatatttcagtggttatcctttttttaaaataagtaataatgaatatttagaaccagaacagttttgtaagaaggaaaatacctaaaatctgaactgtaatcttctatgtttttatgacattatgtgaatcaaaggggttttccttttaagtaaaagaaaaggtcaggagtatgaaatcctaagccctcttcctccccctataaaaccccacaggttcacttgtagaaaaaaattgcaaatgaggaagaaaaatgctttcagctagaaaagttagttttggatttgtgtattcagtaacagaacatgttgaagtttttattaaatgcaagaaaatgtctctaaagtaaaatcctttgtgttgacattagattttttattgtattatagtaactttattcaaacttttttttgtttaggcatttaacagaagagaaacctgatggccttatcaatgaagctactaggcaagttgctttggcagatatcattctcattaataaaacagacttggttccagaagaagatgtaaagaaattaagaacgacaattagatccataaatggactaggacaaatcttagaaacacaaagatcaagagttgatctctctaatgtattagatcttcatgcctttgatagtctctctggaataagtttgcagaaaaaacttcagcatgtgccaggaacacaacctcaccttgatcagagtattgttacaatcacatttgaagtaccaggaaatgcaaaggaagaacatcttaatatgtttattcagaatctcctgtgggaaaagaatgtgagaaacaaggacaatcactgcatggaggtcataaggctgaagggattggtgtcaatcaaagacaaatcacaacaagtgattgtccagggtgtccatgagctctatgatctggaggagactccagtgagctggaaggatgacactgagagaacaaatcgattggtcctcattggcagaaatttagataaggatatccttaaacagctgtttatagctactgtgacagaaacagaaaagcagtggacaacacatttcaaagaagatcaagtttgtacataacactagtggcatttcttatcaaaaggattggataataaaaataagtttctactggg

SEQ ID NO: 417082 - DNA, 1662 bp, Homo sapiens
  misc_feature (1523)..(1523): n is a, c, g, or t
tcaaatcacgtgaagatcagggtcctagagtaacctaatattttgtacattggttatttgactcctcatttttatattacatgttatatcaagggagggggtataaaagaaatacaaaaattgcagaggtatctggaatgtacctatttgttaattctatttgtcatttcttttgtttcatcttttgagtaataagctgcttggaaaagtttctgttctttagctgattttttagctataaaaatgtatttgaaaagctcataaatttcaggattgaaaagataattgaaagtttaaaaaaaacctaattcattgaagtaataaccaaataattttcaatcttgattcaactgtgattcaaatcttacaccatttgcccacttctatgaattttatgtataaaattttttaagagtcagagttttttttccttgattaattggatgtatttcacagaatttccaactgctcacgttagttttcttccttttagagttgatctctctaatgtattagatcttcatgcctttgatagtctctctggaataagtttgcagaaaaaacttcagcatgtgccaggaacacaacctcaccttgatcagagtattgttacaatcacatttgaagtaccaggaaatgcaaaggaagaacatcttaatatgtttattcagaatctcctgtgggaaaagaatgtgagaaacaaggacaatcactgcatggaggtcataaggctgaagggattggtgtcaatcaaagacaaatcacaacaagtgattgtccagggtgtccatgagctctatgatctggaggagactccagtgagctggaaggatgacactgagagaacaaatcgattggtcctcattggcagaaatttagataaggatatccttaaacagctgtttatagctactgtgacagaaacagaaaagcagtggacaacacatttcaaagaagatcaagtttgtacataacactagtggcatttcttatcaaaaggattggataataaaaataagtttctactgggaaaaaaaaagcatttatttattactttagttacgaattccaatatactttaaaatggtatttgttttacagcatacataaaatgtagcaaatcagtactgtaaaacatttaacattcatacaattatatataatatccttttttttaaagaatggtatttcacaaaaatatcttttgaaattggctttggagtttacatatactgaacatgaaagtttataataatgatgatacaactttcaacattgtcattttttcttagaacttcagctgattgcagagatataatgattacattgttattaaatttttttaacacaagtaagtgtcaccattttatgacatgaaataaaaggttatgactgttattgatgttgatgttgacgacctgaaaaaaaaaaaaccaaaaacataaaaaataaaaaaaagaaaaaaaaaacataaaaacaacacaaccaataatccaaaaaaaatattatatcaacaaaccaanatcccacagggtggtgaactgggaaaaaaaacactcgggggggggtccccaacccaagtccctctaaaaaaaggctgacttttgcgcggcattggtgaacattttttcaatctgggaagggggaaaacacctgtgtttt

SEQ ID NO: 417083 - DNA, 2324 bp, Homo sapiens
  misc_feature (512)..(512): n is a, c, g, or t
  misc_feature (2185)..(2185): n is a, c, g, or t
tgcgcgtacggcgtgttggtcccagcggttcagctgaggtagggacgtgccgtaggccggaatgttaccggctgttggatctgtggatgaggaagaggatcctgcggaggaggattgtcctgaattggttcccattgagacgacgcaaagcgaggaggaggaaaagtctggcctcggcgccaagatcccagtcacaattatcaccgggtatttaggtgctgggaagacaacacttctgaactatattttgacagagcaacatagtaaaagagtagcggtcattttaaatgaatctggggaaggaagtgcgctggagaaatccttagctgtcagccaaggtggagagctctatgaagagtggctggaacttagaaacggttgcctctgctgttcagtgaaggacaatggccttagagctattgagaatttgatgcaaaagaaggggaaatttgatgacatactgttagagaccactggattagcagaccctggtgcagtggcttctatgtttngggttgatgctgaattagggagtgatatttaccttgatggtatcataactattgtggattcaaaatatggattaaaacatttaacagaagagaaacctgatggccttatcaatgaagctactaggcaagttgctttggcagatatcattctcattaataaaacagacttggttccagaagaagatgtaaagaaattaagaacgacaattagatccataaatggactaggacaaatcttagaaacacaaagatcaagagttgatctctctaatgtattagatcttcatgcctttgatagtctctctggaataagtttgcagaaaaaacttcagcatgtgccaggaacacaacctcaccttgatcagagtattgttacaatcacatttgaagtaccaggaaatgcaaaggaagaacatcttaatatgtttattcagaatctcctgtgggaaaagaatgtgagaaacaaggacaatcactgcatggaggtcataaggctgaagggattggtgtcaatcaaagacaaatcacaacaagtgattgtccagggtgtccatgagctctatgatctggaggagactccagtgagctggaaggatgacactgagagaacaaatcgattggtcctcattggtaagtctcaaaggattcacagttttaaaacaaagtgaaaaatatatttgaaagggatatcatgtgccacttaaacagattaaccattcaggtcctcttttaaaactaaataagcttgtggtcaatgtttcatctttatcatgttacaacgttcgtaaaagcttgttaggacttttgttcttcttcagttttagaaaagtggttaatccaaggaccaatgtgactttgatgtactgacctggaaagttaaagatggaatcactcaattgctattctttttgtaaatttctaaacaccataaagcatttaatgaactggaattgataggtgaactgtgtcattttaataagcataatgtaatcacgtcatattttgttttgtttgcaggcagaaatttagataaggatatccttaaacagctgtttatagctactgtgacagaaacagaaaagcagtggacaacacatttcaaagaagatcaagtttgtacataacactagtggcatttcttatcaaaaggattggataataaaaataagtttctactgggaaaaaaaaagcatttatttattactttagttacgaattccaatatactttaaaatggtatttgttttacagcatacataaaatgtagcaaatcagtactgtaaaacatttaacattcatacaattatatataatatccttttttttaaagaatggtatttcacaaaaatatcttttgaaattggctttggagtttacatatactgaacatgaaagtttataataatgatgatacaactttcaacattgtcattttttcttagaacttcagctgattgcagagatataatgattacattgttattaaatttttttaacacaagtaagtgtcaccattttatgacatgaaataaaaggttatgactgttattgatgttgatgttgacgacctgaaaaaaaaaaaaccaaaaacataaaaaataaaaaaaagaaaaaaaaaacataaaaacaacacaaccaataatccaaaaaaaatattatatcaacaaaccaanatcccacagggtggtgaactgggaaaaaaaacactcgggggggggtccccaacccaagtccctctaaaaaaaggctgacttttgcgcggcattggtgaacattttttcaatctgggaagggggaaaacacctgtgtttt

SEQ ID NO: 417084 - DNA, 1145 bp, Homo sapiens
agtcctttccccctcccgtcctgtccccatcagtgttgaaatgtatgctacagttattatggttgtaatttgttatgccatgttgatcttcttgtgcttttcatatcagaacaatgcatttttaacattctgactttctttttctctcaattggtaactgactatatagaaaatttatatttatggatactatttcttttttaataagttcaagggaaaacattgataaaggaaaatttatcctttcaactttctttaggtgccagcattattttcatattaggaagcaggagaaagttaaggaactctaagcaatactagaatggttatatatatatttaagtttgtattaaacctgttggaatggtaaagaaatttactgacatatttaaccatacaaaatagtgttgctaaaagactagtttttctctttattctgtgcatatgtatatatatgaatgtgtgttttttttaagaaattttaaaaaaacttaatctgccagcttttctctattggaatttgcaaacaacttgtaaaattggaattacagaatattagaatagtcagttatggaaagtcacttcattatccttgtgtcactaaataacgtataaagttaaatcagaagtgtattatctctgaatttctaatcagttgtttttagtttgcagaaaaaacttcagcatgtgccaggaacacaacctcaccttgatcagagtattgttacaatcacatttgaagtaccaggaaatgcaaaggaagaacatcttaatatgtttattcagaatctcctgtgggaaaagaatgtgagaaacaaggacaatcactgcatggaggtcataaggctgaagggattggtgtcaatcaaagacaaatcacaacaagtgattgtccagggtgtccatgagctctatgatctggaggagactccagtgagctggaaggatgacactgagagaacaaatcgattggtcctcattggcagaaatttagataaggatatccttaaacagctgtttatagctactgtgacagaaacagaaaagcagtggacaacacatttcaaagaagatcaagtttgtacataacactagtggcatttcttatcaaaaggattggataataaaaataagtttctactggg

SEQ ID NO: 417085 - DNA, 1161 bp, Homo sapiens
  misc_feature (512)..(512): n is a, c, g, or t
tgcgcgtacggcgtgttggtcccagcggttcagctgaggtagggacgtgccgtaggccggaatgttaccggctgttggatctgtggatgaggaagaggatcctgcggaggaggattgtcctgaattggttcccattgagacgacgcaaagcgaggaggaggaaaagtctggcctcggcgccaagatcccagtcacaattatcaccgggtatttaggtgctgggaagacaacacttctgaactatattttgacagagcaacatagtaaaagagtagcggtcattttaaatgaatctggggaaggaagtgcgctggagaaatccttagctgtcagccaaggtggagagctctatgaagagtggctggaacttagaaacggttgcctctgctgttcagtgaaggacaatggccttagagctattgagaatttgatgcaaaagaaggggaaatttgatgacatactgttagagaccactggattagcagaccctggtgcagtggcttctatgtttngggttgatgctgaattagggagtgatatttaccttgatggtatcataactattgtggattcaaaatatggattaaaacatttaacagaagagaaacctgatggccttatcaatgaagctactagatccataaatggactaggacaaatcttagaaacacaaagatcaagtttgcagaaaaaacttcagcatgtgccaggaacacaacctcaccttgatcagagtattgttacaatcacatttgaagtaccaggaaatgcaaaggaagaacatcttaatatgtttattcagaatctcctgtgggaaaagaatgtgagaaacaaggacaatcactgcatggaggtcataaggctgaagggattggtgtcaatcaaagacaaatcacaacaagtgattgtccagggtgtccatgagctctatgatctggaggagactccagtgagctggaaggatgacactgagagaacaaatcgattggtcctcattggcagaaatttagataaggatatccttaaacagctgtttatagctactgtgacagaaacagaaaagcagtggacaacacatttcaaagaagatcaagtttgtacataacactagtggcatttcttatcaaaaggattggataataaaaataagtttctactggg

SEQ ID NO: 417086 - DNA, 1346 bp, Homo sapiens
  misc_feature (512)..(512): n is a, c, g, or t
tgcgcgtacggcgtgttggtcccagcggttcagctgaggtagggacgtgccgtaggccggaatgttaccggctgttggatctgtggatgaggaagaggatcctgcggaggaggattgtcctgaattggttcccattgagacgacgcaaagcgaggaggaggaaaagtctggcctcggcgccaagatcccagtcacaattatcaccgggtatttaggtgctgggaagacaacacttctgaactatattttgacagagcaacatagtaaaagagtagcggtcattttaaatgaatctggggaaggaagtgcgctggagaaatccttagctgtcagccaaggtggagagctctatgaagagtggctggaacttagaaacggttgcctctgctgttcagtgaaggacaatggccttagagctattgagaatttgatgcaaaagaaggggaaatttgatgacatactgttagagaccactggattagcagaccctggtgcagtggcttctatgtttngggttgatgctgaattagggagtgatatttaccttgatggtatcataactattgtggattcaaaatatggattaaaacatttaacagaagagaaacctgatggccttatcaatgaagctactaggcaagttgctttggcagatatcattctcattaataaaacagacttggttccagaagaagatgtaaagaaattaagaacgacaattagatccataaatggactaggacaaatcttagaaacacaaagatcaagagttgatctctctaatgtattagatcttcatgcctttgatagtctctctggaataagtttgcagaaaaaacttcagcatgtgccaggaacacaacctcaccttgatcagagtattgttacaatcacatttgaagtaccaggaaatgcaaaggaagaacatcttaatatgtttattcagaatctcctgtgggaaaagaatgtgagaaacaaggacaatcactgcatggaggtcataaggctgaagtttgaactgaggctgatcaatgttcagtcaattctcctttgggattggtgtcaatcaaagacaaatcacaacaagtgattgtccagggtgtccatgagctctatgatctggaggagactccagtgagctggaaggatgacactgagagaacaaatcgattggtcctcattggcagaaatttagataaggatatccttaaacagctgtttatagctactgtgacagaaacagaaaagcagtggacaacacatttcaaagaagatcaagtttgtacataacactagtggcatttcttatcaaaaggattggataataaaaataagtttctactggg

SEQ ID NO: 417087 - DNA, 1558 bp, Homo sapiens
  misc_feature (512)..(512): n is a, c, g, or t
tgcgcgtacggcgtgttggtcccagcggttcagctgaggtagggacgtgccgtaggccggaatgttaccggctgttggatctgtggatgaggaagaggatcctgcggaggaggattgtcctgaattggttcccattgagacgacgcaaagcgaggaggaggaaaagtctggcctcggcgccaagatcccagtcacaattatcaccgggtatttaggtgctgggaagacaacacttctgaactatattttgacagagcaacatagtaaaagagtagcggtcattttaaatgaatctggggaaggaagtgcgctggagaaatccttagctgtcagccaaggtggagagctctatgaagagtggctggaacttagaaacggttgcctctgctgttcagtgaaggacaatggccttagagctattgagaatttgatgcaaaagaaggggaaatttgatgacatactgttagagaccactggattagcagaccctggtgcagtggcttctatgtttngggttgatgctgaattagggagtgatatttaccttgatggtatcataactattgtggattcaaaatatggattaaaacatttaacagaagagaaacctgatggccttatcaatgaagctactaggcaagttgctttggcagatatcattctcattaataaaacagacttggttccagaagaagatgtaaagaaattaagaacgacaattagatccataaatggactaggacaaatcttagaaacacaaagatcaagagttgatctctctaatgtattagatcttcatgcctttgatagtctctctggaataagtttgcagaaaaaacttcagcatgtgccaggaacacaacctcaccttgatcagagtattgttacaatcacatttgaagtaccaggaaatgcaaaggaagaacatcttaatatgtttattcagaatctcctgtgggaaaagaatgtgagaaacaaggacaatcactgcatggaggtcataaggctgaaggtacagtttactgttgcagacttttggacaaagtccttttcttggctgttataaaaactatatttggttttaaacagaaacactggttttagtacaaatcatctttgtctactttcatttttctttattattttcatgactgaaaaggagctttggaaatcactgcataaggcttgatttatttgcacaactttctttagggttgcagctagaacaaacctgtgcgctttgaaatgttaccttctgctctctgttcccaagtacagagaaataatgttgcaaatctcacttctgctgaacattatgcttcctgatgcatttagcagacactaaacatttgtcatactctaaacaaagttacaaaggactagaagaattcttgttctgtatttagaaacccactcacattacttgatatttgggtatttaagtcatgaaaggtatttcttctaggaagcagtgattctaaagtgtatgcttaaccagtcagttgagtgtctactcttgtgtgttcacaagtgtacacaaagtttttggtaaattaag

SEQ ID NO: 417088 - DNA, 1315 bp, Homo sapiens
  misc_feature (1176)..(1176): n is a, c, g, or t
aactcctttaacttctcaacttttcccactaaaactgtgaaacattatataaaatctttaatcaataggatatgatacatatttcatcattttgtttcaggttttggttgtgataaataacactgaaaaaccatcctaatatatgtattaactttatcattagaaaaggggattgttcaaaaaaaaacaatacacagaaaccttttttgaaaattaaaaacattaagaaacttcttgtaattcacaaataattgaaattaagtaattttctcagcttaagagtttgtattttttaagtgaatatcagtaattaatccattaacattgatgctctatttctgcttttaagtttgaactgaggctgatcaatgttcagtcaattctcctttgggattggtgtcaatcaaagacaaatcacaacaagtgattgtccagggtgtccatgagctctatgatctggaggagactccagtgagctggaaggatgacactgagagaacaaatcgattggtcctcattggcagaaatttagataaggatatccttaaacagctgtttatagctactgtgacagaaacagaaaagcagtggacaacacatttcaaagaagatcaagtttgtacataacactagtggcatttcttatcaaaaggattggataataaaaataagtttctactgggaaaaaaaaagcatttatttattactttagttacgaattccaatatactttaaaatggtatttgttttacagcatacataaaatgtagcaaatcagtactgtaaaacatttaacattcatacaattatatataatatccttttttttaaagaatggtatttcacaaaaatatcttttgaaattggctttggagtttacatatactgaacatgaaagtttataataatgatgatacaactttcaacattgtcattttttcttagaacttcagctgattgcagagatataatgattacattgttattaaatttttttaacacaagtaagtgtcaccattttatgacatgaaataaaaggttatgactgttattgatgttgatgttgacgacctgaaaaaaaaaaaaccaaaaacataaaaaataaaaaaaagaaaaaaaaaacataaaaacaacacaaccaataatccaaaaaaaatattatatcaacaaaccaanatcccacagggtggtgaactgggaaaaaaaacactcgggggggggtccccaacccaagtccctctaaaaaaaggctgacttttgcgcggcattggtgaacattttttcaatctgggaagggggaaaacacctgtgtttt

SEQ ID NO: 417089 - DNA, 1327 bp, Homo sapiens
  misc_feature (512)..(512): n is a, c, g, or t
tgcgcgtacggcgtgttggtcccagcggttcagctgaggtagggacgtgccgtaggccggaatgttaccggctgttggatctgtggatgaggaagaggatcctgcggaggaggattgtcctgaattggttcccattgagacgacgcaaagcgaggaggaggaaaagtctggcctcggcgccaagatcccagtcacaattatcaccgggtatttaggtgctgggaagacaacacttctgaactatattttgacagagcaacatagtaaaagagtagcggtcattttaaatgaatctggggaaggaagtgcgctggagaaatccttagctgtcagccaaggtggagagctctatgaagagtggctggaacttagaaacggttgcctctgctgttcagtgaaggacaatggccttagagctattgagaatttgatgcaaaagaaggggaaatttgatgacatactgttagagaccactggattagcagaccctggtgcagtggcttctatgtttngggttgatgctgaattagggagtgatatttaccttgatggtatcataactattgtggattcaaaatatggattaaaagtgaaataccactaaaggcagaagagaatgaaatcatcccacccactgacccgttcccaatctgagcatatggatagggcccaaagcacatttaacagaagagaaacctgatggccttatcaatgaagctactaggcaagttgctttggcagatatcattctcattaataaaacagacttggttccagaagaagatgtaaagaaattaagaacgacaattagatccataaatggactaggacaaatcttagaaacacaaagatcaagagttgatctctctaatgtattagatcttcatgcctttgatagtctctctggaataagtttgcagaaaaaacttcagcatgtgccaggaacacaacctcaccttgatcagagtattgttacaatcacatttgaagtaccaggaaatgcaaaggaagaacatcttaatatgtttattcagggattggtgtcaatcaaagacaaatcacaacaagtgattgtccagggtgtccatgagctctatgatctggaggagactccagtgagctggaaggatgacactgagagaacaaatcgattggtcctcattggcagaaatttagataaggatatccttaaacagctgtttatagctactgtgacagaaacagaaaagcagtggacaacacatttcaaagaagatcaagtttgtacataacactagtggcatttcttatcaaaaggattggataataaaaataagtttctactggg

SEQ ID NO: 417090 - DNA, 1248 bp, Homo sapiens
  misc_feature (512)..(512): n is a, c, g, or t
tgcgcgtacggcgtgttggtcccagcggttcagctgaggtagggacgtgccgtaggccggaatgttaccggctgttggatctgtggatgaggaagaggatcctgcggaggaggattgtcctgaattggttcccattgagacgacgcaaagcgaggaggaggaaaagtctggcctcggcgccaagatcccagtcacaattatcaccgggtatttaggtgctgggaagacaacacttctgaactatattttgacagagcaacatagtaaaagagtagcggtcattttaaatgaatctggggaaggaagtgcgctggagaaatccttagctgtcagccaaggtggagagctctatgaagagtggctggaacttagaaacggttgcctctgctgttcagtgaaggacaatggccttagagctattgagaatttgatgcaaaagaaggggaaatttgatgacatactgttagagaccactggattagcagaccctggtgcagtggcttctatgtttngggttgatgctgaattagggagtgatatttaccttgatggtatcataactattgtggattcaaaatatggattaaaacatttaacagaagagaaacctgatggccttatcaatgaagctactaggcaagttgctttggcagatatcattctcattaataaaacagacttggttccagaagaagatgtaaagaaattaagaacgacaattagatccataaatggactaggacaaatcttagaaacacaaagatcaagtttgcagaaaaaacttcagcatgtgccaggaacacaacctcaccttgatcagagtattgttacaatcacatttgaagtaccaggaaatgcaaaggaagaacatcttaatatgtttattcagaatctcctgtgggaaaagaatgtgagaaacaaggacaatcactgcatggaggtcataaggctgaagggattggtgtcaatcaaagacaaatcacaacaagtgattgtccagggtgtccatgagctctatgatctggaggagactccagtgagctggaaggatgacactgagagaacaaatcgattggtcctcattggcagaaatttagataaggatatccttaaacagctgtttatagctactgtgacagaaacagaaaagcagtggacaacacatttcaaagaagatcaagtttgtacataacactagtggcatttcttatcaaaaggattggataataaaaataagtttctactggg

SEQ ID NO: 417091 - DNA, 1937 bp, Homo sapiens
  misc_feature (512)..(512): n is a, c, g, or t
  misc_feature (1798)..(1798): n is a, c, g, or t
tgcgcgtacggcgtgttggtcccagcggttcagctgaggtagggacgtgccgtaggccggaatgttaccggctgttggatctgtggatgaggaagaggatcctgcggaggaggattgtcctgaattggttcccattgagacgacgcaaagcgaggaggaggaaaagtctggcctcggcgccaagatcccagtcacaattatcaccgggtatttaggtgctgggaagacaacacttctgaactatattttgacagagcaacatagtaaaagagtagcggtcattttaaatgaatctggggaaggaagtgcgctggagaaatccttagctgtcagccaaggtggagagctctatgaagagtggctggaacttagaaacggttgcctctgctgttcagtgaaggacaatggccttagagctattgagaatttgatgcaaaagaaggggaaatttgatgacatactgttagagaccactggattagcagaccctggtgcagtggcttctatgtttngggttgatgctgaattagggagtgatatttaccttgatggtatcataactattgtggattcaaaatatggattaaaacatttaacagaagagaaacctgatggccttatcaatgaagctactaggcaagttgctttggcagatatcattctcattaataaaacagacttggttccagaagaagatgtaaagaaattaagaacgacaattagatccataaatggactaggacaaatcttagaaacacaaagatcaagagttgatctctctaatgtattagatcttcatgcctttgatagtctctctggaataagtttgcagaaaaaacttcagcatgtgccaggaacacaacctcaccttgatcagagtattgttacaatcacatttgaagtaccaggaaatgcaaaggaagaacatcttaatatgtttattcagaatctcctgtgggaaaagaatgtgagaaacaaggacaatcactgcatggaggtcataaggctgaagggattggtgtcaatcaaagacaaatcacaacaagtgattgtccagggtgtccatgagctctatgatctggaggagactccagtgagctggaaggatgacactgagagaacaaatcgattggtcctcattggcagaaatttagataaggatatccttaaacagctgtttatagctactgtgacagaaacagaaaagcagtggacaacacatttcaaagaagatcaagtttgtacataacactagtggcatttcttatcaaaaggattggataataaaaataagtttctactgggaaaaaaaaagcatttatttattactttagttacgaattccaatatactttaaaatggtatttgttttacagcatacataaaatgtagcaaatcagtactgtaaaacatttaacattcatacaattatatataatatccttttttttaaagaatggtatttcacaaaaatatcttttgaaattggctttggagtttacatatactgaacatgaaagtttataataatgatgatacaactttcaacattgtcattttttcttagaacttcagctgattgcagagatataatgattacattgttattaaatttttttaacacaagtaagtgtcaccattttatgacatgaaataaaaggttatgactgttattgatgttgatgttgacgacctgaaaaaaaaaaaaccaaaaacataaaaaataaaaaaaagaaaaaaaaaacataaaaacaacacaaccaataatccaaaaaaaatattatatcaacaaaccaanatcccacagggtggtgaactgggaaaaaaaacactcgggggggggtccccaacccaagtccctctaaaaaaaggctgacttttgcgcggcattggtgaacattttttcaatctgggaagggggaaaacacctgtgtttt

SEQ ID NO: 417092 - DNA, 1692 bp, Homo sapiens
  misc_feature (512)..(512): n is a, c, g, or t
tgcgcgtacggcgtgttggtcccagcggttcagctgaggtagggacgtgccgtaggccggaatgttaccggctgttggatctgtggatgaggaagaggatcctgcggaggaggattgtcctgaattggttcccattgagacgacgcaaagcgaggaggaggaaaagtctggcctcggcgccaagatcccagtcacaattatcaccgggtatttaggtgctgggaagacaacacttctgaactatattttgacagagcaacatagtaaaagagtagcggtcattttaaatgaatctggggaaggaagtgcgctggagaaatccttagctgtcagccaaggtggagagctctatgaagagtggctggaacttagaaacggttgcctctgctgttcagtgaaggacaatggccttagagctattgagaatttgatgcaaaagaaggggaaatttgatgacatactgttagagaccactggattagcagaccctggtgcagtggcttctatgtttngggttgatgctgaattagggagtgatatttaccttgatggtatcataactattgtggattcaaaatatggattaaaacatttaacagaagagaaacctgatggccttatcaatgaagctactaggcaagttgctttggcagatatcattctcattaataaaacagacttggttccagaagaagatgtaaagaaattaagaacgacaattagatccataaatggactaggacaaatcttagaaacacaaagatcaagagttgatctctctaatgtattagatcttcatgcctttgatagtctctctggaataagtttgcagaaaaaacttcagcatgtgccaggaacacaacctcaccttgatcagagtattgttacaatcacatttgaagtaccaggaaatgcaaaggaagaacatcttaatatgtttattcagaatctcctgtgggaaaagaatgtgagaaacaaggacaatcactgcatggaggtcataaggctgaagggattggtgtcaatcaaagacaaatcacaacaagtgattgtccagggtgtccatgagctctatgatctggaggagactccagtgagctggaaggatgacactgagagaacaaatcgattggtcctcattggtaagtctcaaaggattcacagttttaaaacaaagtgaaaaatatatttgaaagggatatcatgtgccacttaaacagattaaccattcaggtcctcttttaaaactaaataagcttgtggtcaatgtttcatctttatcatgttacaacgttcgtaaaagcttgttaggacttttgttcttcttcagttttagaaaagtggttaatccaaggaccaatgtgactttgatgtactgacctggaaagttaaagatggaatcactcaattgctattctttttgtaaatttctaaacaccataaagcatttaatgaactggaattgataggtgaactgtgtcattttaataagcataatgtaatcacgtcatattttgttttgtttgcaggcagaaatttagataaggatatccttaaacagctgtttatagctactgtgacagaaacagaaaagcagtggacaacacatttcaaagaagatcaagtttgtacataacactagtggcatttcttatcaaaaggattggataataaaaataagtttctactggg

SEQ ID NO: 417093 - DNA, 1564 bp, Homo sapiens
  misc_feature (1425)..(1425): n is a, c, g, or t
cgtgtgtgttcaagggtcaactgcattgccctttcatgacaacctttggtttgggagggtttttggttttgtttggttttcatcttttgagtaataagctgcttggaaaagtttctgttctttagctgattttttagctataaaaatgtatttgaaaagctcataaatttcaggattgaaaagataattgaaagtttaaaaaaaacctaattcattgaagtaataaccaaataattttcaatcttgattcaactgtgattcaaatcttacaccatttgcccacttctatgaattttatgtataaaattttttaagagtcagagttttttttccttgattaattggatgtatttcacagaatttccaactgctcacgttagttttcttccttttagagttgatctctctaatgtattagatcttcatgcctttgatagtctctctggaataagtttgcagaaaaaacttcagcatgtgccaggaacacaacctcaccttgatcagagtattgttacaatcacatttgaagtaccaggaaatgcaaaggaagaacatcttaatatgtttattcagaatctcctgtgggaaaagaatgtgagaaacaaggacaatcactgcatggaggtcataaggctgaagggattggtgtcaatcaaagacaaatcacaacaagtgattgtccagggtgtccatgagctctatgatctggaggagactccagtgagctggaaggatgacactgagagaacaaatcgattggtcctcattggcagaaatttagataaggatatccttaaacagctgtttatagctactgtgacagaaacagaaaagcagtggacaacacatttcaaagaagatcaagtttgtacataacactagtggcatttcttatcaaaaggattggataataaaaataagtttctactgggaaaaaaaaagcatttatttattactttagttacgaattccaatatactttaaaatggtatttgttttacagcatacataaaatgtagcaaatcagtactgtaaaacatttaacattcatacaattatatataatatccttttttttaaagaatggtatttcacaaaaatatcttttgaaattggctttggagtttacatatactgaacatgaaagtttataataatgatgatacaactttcaacattgtcattttttcttagaacttcagctgattgcagagatataatgattacattgttattaaatttttttaacacaagtaagtgtcaccattttatgacatgaaataaaaggttatgactgttattgatgttgatgttgacgacctgaaaaaaaaaaaaccaaaaacataaaaaataaaaaaaagaaaaaaaaaacataaaaacaacacaaccaataatccaaaaaaaatattatatcaacaaaccaanatcccacagggtggtgaactgggaaaaaaaacactcgggggggggtccccaacccaagtccctctaaaaaaaggctgacttttgcgcggcattggtgaacattttttcaatctgggaagggggaaaacacctgtgtttt

SEQ ID NO: 417094 - DNA, 1807 bp, Homo sapiens
  misc_feature (512)..(512): n is a, c, g, or t
  misc_feature (1668)..(1668): n is a, c, g, or t
tgcgcgtacggcgtgttggtcccagcggttcagctgaggtagggacgtgccgtaggccggaatgttaccggctgttggatctgtggatgaggaagaggatcctgcggaggaggattgtcctgaattggttcccattgagacgacgcaaagcgaggaggaggaaaagtctggcctcggcgccaagatcccagtcacaattatcaccgggtatttaggtgctgggaagacaacacttctgaactatattttgacagagcaacatagtaaaagagtagcggtcattttaaatgaatctggggaaggaagtgcgctggagaaatccttagctgtcagccaaggtggagagctctatgaagagtggctggaacttagaaacggttgcctctgctgttcagtgaaggacaatggccttagagctattgagaatttgatgcaaaagaaggggaaatttgatgacatactgttagagaccactggattagcagaccctggtgcagtggcttctatgtttngggttgatgctgaattagggagtgatatttaccttgatggtatcataactattgtggattcaaaatatggattaaaacatttaacagaagagaaacctgatggccttatcaatgaagctactaggcaagttgctttggcagatatcattctcattaataaaacagacttggttccagaagaagatgtaaagaaattaagaacgacaattagatccataaatggactaggacaaatcttagaaacacaaagatcaagagttgatctctctaatgtattagatcttcatgcctttgatagtctctctggaataagtttgcagaaaaaacttcagcatgtgccaggaacacaacctcaccttgatcagagtattgttacaatcacatttgaagtaccaggaaatgcaaaggaagaacatcttaatatgtttattcagaatctcctgtgggaaaagaatgtgagaaacaaggacaatcactgcatggaggtcataaggctgaaggcagaaatttagataaggatatccttaaacagctgtttatagctactgtgacagaaacagaaaagcagtggacaacacatttcaaagaagatcaagtttgtacataacactagtggcatttcttatcaaaaggattggataataaaaataagtttctactgggaaaaaaaaagcatttatttattactttagttacgaattccaatatactttaaaatggtatttgttttacagcatacataaaatgtagcaaatcagtactgtaaaacatttaacattcatacaattatatataatatccttttttttaaagaatggtatttcacaaaaatatcttttgaaattggctttggagtttacatatactgaacatgaaagtttataataatgatgatacaactttcaacattgtcattttttcttagaacttcagctgattgcagagatataatgattacattgttattaaatttttttaacacaagtaagtgtcaccattttatgacatgaaataaaaggttatgactgttattgatgttgatgttgacgacctgaaaaaaaaaaaaccaaaaacataaaaaataaaaaaaagaaaaaaaaaacataaaaacaacacaaccaataatccaaaaaaaatattatatcaacaaaccaanatcccacagggtggtgaactgggaaaaaaaacactcgggggggggtccccaacccaagtccctctaaaaaaaggctgacttttgcgcggcattggtgaacattttttcaatctgggaagggggaaaacacctgtgtttt

SEQ ID NO: 417095 - DNA, 514 bp, Homo sapiens
cgctctattagcgtaactatcgcggtgcagagaggaaaggaaaaaacctagctgcaacgactctcttaatttttccaccgctacacagtattgttacaatcacatttgaagtaccaggaaatgcaaaggaagaacatcttaatatgtttattcagaatctcctgtgggaaaagaatgtgagaaacaaggacaatcactgcatggaggtcataaggctgaagggattggtgtcaatcaaagacaaatcacaacaagtgattgtccagggtgtccatgagctctatgatctggaggagactccagtgagctggaaggatgacactgagagaacaaatcgattggtcctcattggcagaaatttagataaggatatccttaaacagctgtttatagctactgtgacagaaacagaaaagcagtggacaacacatttcaaagaagatcaagtttgtacataacactagtggcatttcttatcaaaaggattggataataaaaataagtttctactggg

SEQ ID NO: 417096 - DNA, 1162 bp, Homo sapiens
  misc_feature (512)..(512): n is a, c, g, or t
tgcgcgtacggcgtgttggtcccagcggttcagctgaggtagggacgtgccgtaggccggaatgttaccggctgttggatctgtggatgaggaagaggatcctgcggaggaggattgtcctgaattggttcccattgagacgacgcaaagcgaggaggaggaaaagtctggcctcggcgccaagatcccagtcacaattatcaccgggtatttaggtgctgggaagacaacacttctgaactatattttgacagagcaacatagtaaaagagtagcggtcattttaaatgaatctggggaaggaagtgcgctggagaaatccttagctgtcagccaaggtggagagctctatgaagagtggctggaacttagaaacggttgcctctgctgttcagtgaaggacaatggccttagagctattgagaatttgatgcaaaagaaggggaaatttgatgacatactgttagagaccactggattagcagaccctggtgcagtggcttctatgtttngggttgatgctgaattagggagtgatatttaccttgatggtatcataactattgtggattcaaaatatggattaaaagtgaaataccactaaaggcagaagagaatgaaatcatcccacccactgacccgttcccaatctgagcatatggatagggcccaaagcacatttaacagaagagaaacctgatggccttatcaatgaagctactaggcaagttgctttggcagatatcattctcattaataaaacagacttggttccagaagaagatgtaaagaaattaagaacgacaattagatccataaatggactaggacaaatcttagaaacacaaagatcaaggtactttaaaaaagctattcctattaataacaaatcattttagttattaataataaacattaagtaattgacaaatatgcttgattctgatataagaaagatctaagtgcatttaaaaagaattggatccaaaatgttgtttggaatgctcttaataagttagtttggcatatttggctagtacatttgcctgtcttcaaaactaagattacaaagccatgataacactgtgtaagtgtttgcttaatgaggaagaaaagacttccaaacactcgagagggtaactcagtacagaaatctgaagta

SEQ ID NO: 417097 - DNA, 3292 bp, Homo sapiens
aactccgtggagtccccgcaggcagagacgcggagtgggggtggcgggtcgccggatcgggtgggaagtaaaagacccccaggagtgggtgcgggctcactgatacggctgtgagcggcattggagtgtgcgtgggtcttctcgctacgctcgggcccgcaagaggggtgtgagagcggctaggtccaagcaggtgatgtttgcagacagaaaaagtaaactgtcaaggaattcagagcattgggtacttgttatttggaccagtttgaagcatctttgatttattggaccaactggcaacagaaaatgaaaagtagtgtggcacagataaaaccttcttctggtcatgacagaagggaaaaccttaattcatatcagaggaactcctctccagaagacagatatgaagaacaagaacgatccccccgggatagagattactttgattacagcagatcagactatgagcattcaagaagaggacgttcttatgatagtagcatggagtcacgaaacagggaccgagaaaaacgcagagaaagagaaagagatacggatcggaaaaggtctcggaaatccccatctcctgggaggagaaacccagaaacatcagtaactcagagttcctctgctcaggatgaacctgctacaaagaaaaagaaagatgagctggatcctcttcttactcgcactggtggagcatatattccccctgcaaagctcaggatgatgcaggaacagattacagataaaaacagcttagcataccagaggatgagttgggaggccctgaagaagtcaattaatggccttatcaacaaagtcaacatttccaacataagtattattattcaagagcttcttcaagaaaatatagttagaggaagaggactgctgtccaggtctgttttgcaagcacagagtgcttctccaatcttcacccatgtttatgcagcattagtggcaattatcaactcaaaatttccacaaattggagaattaatcctcaaaaggttaattcttaattttcgaaaaggctatcgaagaaatgacaagcaactttgcctgactgcttcaaaatttgtggcgcatcttattaaccaaaatgtggcacacgaagttttatgcttagagatgctcactttgctcctggaaagaccaacagatgatagcgttgaagtagctattggttttcttaaggaatgtggcctcaaattaacacaagtgtcaccaagaggaatcaatgctatatttgaacgccttcgaaacattctgcatgagtctgaaattgacaaaagagttcaatatatgattgaagtgatgtttgctgtacggaaagatggattcaaggaccaccccattatcctagaaggtcttgatttggtggaagaagatgatcaattcactcatatgctccctctggaggatgactataatccagaagatgttcttaatgttttcaagatggatcctaattttatggagaatgaagagaagtacaaagctattaagaaagaaattcttgatgagggagatactgactcgaacacagaccaggatgctgggagtagtgaagaggacgaggaagaagaagaggaagagggagaagaagatgaagaaggacaaaaagtaactattcatgacaaaacagaaattaacctggtctcatttcgtcgtacaatttatcttgctattcagtcaagtttagattttgaagaatgtgctcacaaattgctgaaaatggagtttcctgaaagccaaacaaaagaactctgcaacatgatacttgattgctgtgcccaacagaggacatacgaaaaattttttggcttattagctgggcgattttgcatgctaaagaaagagtacatggaatcctttgaaggtatattcaaagaacagtatgataccatccatcgcttggaaacaaacaagttgcgaaatgttgctaagatgtttgctcaccttttatacactgattcacttccatggagtgttcttgaatgtataaaactgagtgaagaaaccactacatcatccagtagaatttttgtcaaaatatttttccaggaactgtgtgaatacatgggtcttcctaaacttaatgcaagattaaaggatgaaactctgcagccattctttgaaggattattaccccgagataatccaagaaacactcggtttgccatcaacttctttacttctataggtcttggaggtttaacggatgaactgcgggagcatctcaaaaatacaccaaaggtcattgtggcgcagaaaccagatgttgagcaaaataaatcctccccatcctcttcctcttcagcgtcctcctcttcagagtctgactcatccgactctgattctgacagcagtgatagcagttcagagtcttccagtgaagagagcgactcttcatccatcagtagtcatagctctgcctcagctaatgatgtaagaaagaagggacatgggaagaccagaagtaaagaggtagataaattgatcagaaaccagcaaacaaatgataggaaacaaaaagaaagaagacaagaacacgggcaccaggaaacaaggactgagagagaaagaaggtcagaaaaacacagagatcaaaattcaagaggttcaaattggagagatcctataacaaagtacacatcagacaaagatgttccttctgaacgaaataactacagtagagttgcgaatgacagagaccaagaaatgcatatagatttggaaaataagcatggtgatcccaaaaagaagagaggagagagaagaaattctttttctgaaaatgagaagcatacacaccgaattaaagacagtgaaaatttcagaagaaaagatagatcaaagtcaaaggaaatgaatagaaagcactcaggctcaagaagtgatgaagatagatatcaaaatggtgccgagagacgatgggaaaaatctagcagatactctgaacaatccagagaatcaaagaaaaatcaggaccggcgaagagaaaagtctccagcaaaacaaaaataattctacaaaatgacataaactggacatgccttatattcagttgaaacaaattattttttactttgacgaactttatagagaattcttgtataaagtattggtttgtatttgtaaatttaaaaaatgttttcattttaacatgttttataattgatacatctcaaggccctacccataaaattatttgaaaactttcaccagaaagggatgtaagtctcgcttatattttgtgaataaaatgatcaaaagctcaaaaatt

SEQ ID NO: 417098 - DNA, 2546 bp, Homo sapiens
catttccgtcagcacaggcgctggatttcggactttgtagttcatgccaacttctcttttttgtcgccattttggcaacaagacagtgtgcctggatcgactactttgactctggtattatgatatggtatttgaaataaattaaagggataacgtgtcaagccaattgagcgtcaagtttttaaatatttcactattcgccttcttcctaccgtcggtgctcgggaagaggaagtgacgtacgtccggtgtaatggcggcgcggtggagctctaggtgatgtttgcagacagaaaaagtaaactgtcaaggaattcagagcattgggtacttgttatttggaccagtttgaagcatctttgatttattggaccaactggcaacagaaaatgaaaagtagtgtggcacagataaaaccttcttctggtcatgacagaagggaaaaccttaattcatatcagaggaactcctctccagaagacagatatgaagaacaagaacgatccccccgggatagagattactttgattacagcagatcagactatgagcattcaagaagaggacgttcttatgatagtagcatggagtcacgaaacagggaccgagaaaaacgcagagaaagagaaagagatacggatcggaaaaggtctcggaaatccccatctcctgggaggagaaacccagaaacatcagtaactcagagttcctctgctcaggatgaacctgctacaaagaaaaagaaagatgagctggatcctcttcttactcgcactggtggagcatatattccccctgcaaagctcaggatgatgcaggaacagattacagataaaaacagcttagcataccagaggatgagttgggaggccctgaagaagtcaattaatggccttatcaacaaagtcaacatttccaacataagtattattattcaagagcttcttcaagaaaatatagttagaggaagaggactgctgtccaggtctgttttgcaagcacagagtgcttctccaatcttcacccatgtttatgcagcattagtggcaattatcaactcaaaatttccacaaattggagaattaatcctcaaaaggttaattcttaattttcgaaaaggctatcgaagaaatgacaagcaactttgcctgactgcttcaaaatttgtggcgcatcttattaaccaaaatgtggcacacgaagttttatgcttagagatgctcactttgctcctggaaagaccaacagatgatagcgttgaagtagctattggttttcttaaggaatgtggcctcaaattaacacaagtgtcaccaagaggaatcaatgctatatttgaacgccttcgaaacattctgcatgagtctgaaattgacaaaagagttcaatatatgattgaagtgatgtttgctgtacggaaagatggattcaaggaccaccccattatcctagaaggtcttgatttggtggaagaagatgatcaattcactcatatgctccctctggaggatgactataatccagaagatgttcttaatgttttcaagatggatcctaattttatggagaatgaagagaagtacaaagctattaagaaagaaattcttgatgagggagatactgactcgaacacagaccaggatgctgggagtatgaagagagcgactcttcatccatcagtagtcatagctctgcctcagctaatgatgtaagaaagaagggacatgggaagaccagaagtaaagaggtagataaattgatcagaaaccagcaaacaaatgataggaaacaaaaagaaagaagacaagaacacgggcaccaggaaacaaggactgagagagaaagaaggtcagaaaaacacagagatcaaaattcaagaggttcaaattggagagatcctataacaaagtacacatcagacaaagatgttccttctgaacgaaataactacagtagagttgcgaatgacagagaccaagaaatgcatatagatttggaaaataagcatggtgatcccaaaaagaagagaggagagagaagaaattctttttctgaaaatgagaagcatacacaccgaattaaagacagtgaaaatttcagaagaaaagatagatcaaagtcaaaggaaatgaatagaaagcactcaggctcaagaagtgatgaagatagatatcaaaatggtgccgagagacgatgggaaaaatctagcagatactctgaacaatccagagaatcaaagaaaaatcaggaccggcgaagagaaaagtctccagcaaaacaaaaataattctacaaaatgacataaactggacatgccttatattcagttgaaacaaattattttttactttgacgaactttatagagaattcttgtataaagtattggtttgtatttgtaaatttaaaaaatgttttcattttaacatgttttataattgatacatctcaaggccctacccataaaattatttgaaaactttcaccagaaagggatgtaagtctcgcttatattttgtgaataaaatgatcaaaagctcaaaaatt

SEQ ID NO: 417099 - DNA, 1049 bp, Homo sapiens
  misc_feature (991)..(991): n is a, c, g, or t
catttccgtcagcacaggcgctggatttcggactttgtagttcatgccaacttctcttttttgtcgccattttggcaacaagacagtgtgcctggatcgactactttgactctggtattatgatatggtatttgaaataaattaaagggataacgtgtcaagccaattgagcgtcaagtttttaaatatttcactattcgccttcttcctaccgtcggtgctcgggaagaggaagtgacgtacgtccggtgtaatggcggcgcggtggagctctaggtgatgtttgcagacagaaaaagtaaactgtcaaggaattcagagcattgggtacttgttatttggaccagtttgaagcatctttgatttattggaccaactggcaacagaaaatgaaaagtagtgtggcacagataaaaccttcttctggtcatgacagaagggaaaaccttaattcatatcagaggaactcctctccagaagacagatatgaagaacaagaacgatccccccgggatagagattactttgattacagcagatcagactatgagcattcaagaagaggacgttcttatgatagtagcatggagtcacgaaacagggaccgagaaaaacgcagagaaagagaaagagatacggatcggaaaaggtctcggaaatccccatctcctgggaggagaaacccagaaacatcagtaactcagagttcctctgctcaggatgaacctgctacaaagaaaaagaaagatgagctggatcctcttcttactcgcactggtggagcatatattccccctgcaaagctcaggatgatgcaggaacagattacagataaaaacagcttagcataccagaggatgagttgggaggccctgaagaagtcaattaatggccttatcaacaaagtcaacatttccaacataagtattattattcaagagcttcttcaagaaaatatagttagaggaaggagggactgctgtcccaggtnctggtttttggcaagggcacaagaagtggctttcttcccaattcttttaaccccatgg

SEQ ID NO: 417100 - DNA, 3375 bp, Homo sapiens
catttccgtcagcacaggcgctggatttcggactttgtagttcatgccaacttctcttttttgtcgccattttggcaacaagacagtgtgcctggatcgactactttgactctggtattatgatatggtatttgaaataaattaaagggataacgtgtcaagccaattgagcgtcaagtttttaaatatttcactattcgccttcttcctaccgtcggtgctcgggaagaggaagtgacgtacgtccggtgtaatggcggcgcggtggagctctaggtgatgtttgcagacagaaaaagtaaactgtcaaggaattcagagcattgggtacttgttatttggaccagtttgaagcatctttgatttattggaccaactggcaacagaaaatgaaaagtagtgtggcacagataaaaccttcttctggtcatgacagaagggaaaaccttaattcatatcagaggaactcctctccagaagacagatatgaagaacaagaacgatccccccgggatagagattactttgattacagcagatcagactatgagcattcaagaagaggacgttcttatgatagtagcatggagtcacgaaacagggaccgagaaaaacgcagagaaagagaaagagatacggatcggaaaaggtctcggaaatccccatctcctgggaggagaaacccagaaacatcagtaactcagagttcctctgctcaggatgaacctgctacaaagaaaaagaaagatgagctggatcctcttcttactcgcactggtggagcatatattccccctgcaaagctcaggatgatgcaggaacagattacagataaaaacagcttagcataccagaggatgagttgggaggccctgaagaagtcaattaatggccttatcaacaaagtcaacatttccaacataagtattattattcaagagcttcttcaagaaaatatagttagaggaagaggactgctgtccaggtctgttttgcaagcacagagtgcttctccaatcttcacccatgtttatgcagcattagtggcaattatcaactcaaaatttccacaaattggagaattaatcctcaaaaggttaattcttaattttcgaaaaggctatcgaagaaatgacaagcaactttgcctgactgcttcaaaatttgtggcgcatcttattaaccaaaatgtggcacacgaagttttatgcttagagatgctcactttgctcctggaaagaccaacagatgatagcgttgaagtagctattggttttcttaaggaatgtggcctcaaattaacacaagtgtcaccaagaggaatcaatgctatatttgaacgccttcgaaacattctgcatgagtctgaaattgacaaaagagttcaatatatgattgaagtgatgtttgctgtacggaaagatggattcaaggaccaccccattatcctagaaggtcttgatttggtggaagaagatgatcaattcactcatatgctccctctggaggatgactataatccagaagatgttcttaatgttttcaagatggatcctaattttatggagaatgaagagaagtacaaagctattaagaaagaaattcttgatgagggagatactgactcgaacacagaccaggatgctgggagtagtgaagaggacgaggaagaagaagaggaagagggagaagaagatgaagaaggacaaaaagtaactattcatgacaaaacagaaattaacctggtctcatttcgtcgtacaatttatcttgctattcagtcaagtttagattttgaagaatgtgctcacaaattgctgaaaatggagtttcctgaaagccaaacaaaagaactctgcaacatgatacttgattgctgtgcccaacagaggacatacgaaaaattttttggcttattagctgggcgattttgcatgctaaagaaagagtacatggaatcctttgaaggtatattcaaagaacagtatgataccatccatcgcttggaaacaaacaagttgcgaaatgttgctaagatgtttgctcaccttttatacactgattcacttccatggagtgttcttgaatgtataaaactgagtgaagaaaccactacatcatccagtagaatttttgtcaaaatatttttccaggaactgtgtgaatacatgggtcttcctaaacttaatgcaagattaaaggatgaaactctgcagccattctttgaaggattattaccccgagataatccaagaaacactcggtttgccatcaacttctttacttctataggtcttggaggtttaacggatgaactgcgggagcatctcaaaaatacaccaaaggtcattgtggcgcagaaaccagatgttgagcaaaataaatcctccccatcctcttcctcttcagcgtcctcctcttcagagtctgactcatccgactctgattctgacagcagtgatagcagttcagagtcttccagtgaagagagcgactcttcatccatcagtagtcatagctctgcctcagctaatgatgtaagaaagaagggacatgggaagaccagaagtaaagaggtagataaattgatcagaaaccagcaaacaaatgataggaaacaaaaagaaagaagacaagaacacgggcaccaggaaacaaggactgagagagaaagaaggtcagaaaaacacagagatcaaaattcaagaggttcaaattggagagatcctataacaaagtacacatcagacaaagatgttccttctgaacgaaataactacagtagagttgcgaatgacagagaccaagaaatgcatatagatttggaaaataagcatggtgatcccaaaaagaagagaggagagagaagaaattctttttctgaaaatgagaagcatacacaccgaattaaagacagtgaaaatttcagaagaaaagatagatcaaagtcaaaggaaatgaatagaaagcactcaggctcaagaagtgatgaagatagatatcaaaatggtgccgagagacgatgggaaaaatctagcagatactctgaacaatccagagaatcaaagaaaaatcaggaccggcgaagagaaaagtctccagcaaaacaaaaataattctacaaaatgacataaactggacatgccttatattcagttgaaacaaattattttttactttgacgaactttatagagaattcttgtataaagtattggtttgtatttgtaaatttaaaaaatgttttcattttaacatgttttataattgatacatctcaaggccctacccataaaattatttgaaaactttcaccagaaagggatgtaagtctcgcttatattttgtgaataaaatgatcaaaagctcaaaaatt

SEQ ID NO: 417101 - DNA, 239 bp, Homo sapiens
gcggccgcctactactactactactgctcgaattcaagcttctaacgatgtacggggacatggataggtcgggtgttaaagttgttttgattatgtaccttttgatagatccacataaaaagaaatgtgaagttttcttttactatcttttcatttatcaagcagagacctttgttgggaggcggtttgggagaacacatttctaatttgaatgaaatgaaatctattttcagtgaaaa

SEQ ID NO: 417102 - DNA, 1141 bp, Homo sapiens
tgtttgatgctgctgagcggtaccagcaggcaggccttcccctgatcgttctggctggcaaagagtacggtgcaggcagctcccgagactgggcagctaagggccctttcctgctgggaatcaaagccgtcctggccgagagctacgagcgcattcaccgcagtaacctggttgggatgggtgtgatcccacttgaatatctccctggtgagaatgcagatgccctggggctcacagggcaagaacgatacactatcattattccagaaaacctcaaaccacaaatgaaagtccaggtcaagctggatactggcaagaccttccaggctgtcatgaggtttgacactgatgtggagctcacttatttcctcaacgggggcatcctcaactacatgatccgcaagatggccaagtaggagacgtgcacttggtgctgcgcccagggaggaagccgcaccaccagccagcgcaggccctggtggagaggcctccctggctgcctctgggaggggtgctgccttgtagatggagcaagtgagcactgagggtctggtgccaatcctgtaggcacaaaaccagaagtttctacattctctatttttgttaatcatcttctctttttccagaatttggaagctagaatggtgggaatgtcagtagtgccagaaagagagaaccaagcttgtctttaaagttactgatcacaggacgttgctttttcactgtttcctattaatcttcagctgaacacaagcaaaccttctcaggaggtgtctcctaccctcttattgttcctcttacgctctgctcaatgaaaccttcctcttgagggtcattttcctttctgtattaattataccagtgttaagtgacatagataagaactttgcacacttcaaatcagagcagtgattctctcttctctccccttttccttcagagtgaatcatccagactcctcatggataggtcgggtgttaaagttgttttgattatgtaccttttgatagatccacataaaaagaaatgtgaagttttcttttactatcttttcatttatcaagcagagacctttgttgggaggcggtttgggagaacacatttctaatttgaatgaaatgaaatctattttcagtgaaaa

SEQ ID NO: 417103 - DNA, 704 bp, Homo sapiens
acaggacgttgctttttcactgtttcctattaatcttcagctgaacacaagcaaaccttctcaggaggtgtctcctaccctcttattgttcctcttacgctctgctcaatgaaaccttcctcttgagggtcattttcctttctgtattaattataccagtgttaagtgacatagataagaactttgcacacttcaaatcagagcagtgattctctcttctctccccttttccttcagagtgaatcatccagactcctcatggataggtcgggtgttaaagttgttttgattatgtaccttttgatagatccacataaaaagaaatgtgaagttttcttttactatcttttcatttatcaagcagagacctttgttgggaggcggtttgggagaacacatttctaatttgaatgaaatgaaatctattttcagtgaaaacttgttgactttgagttttgctgtgtttgtggctagagttttgggatatttagtacagagtgaatctcacaccatatcattgggaagcctgaataaccttcatattctcccatttttacaactctatcagaactgtacgggtataacggaaatgtttaggaaccattatgctcgctcttccctgtttgggagcagacaagaaggaagagtagcctggtggcagtggcaacgatataagtacataaggaaaagcagataaacttcag

SEQ ID NO: 417104 - DNA, 2376 bp, Homo sapiens
aaaaagccggacgcttccggtggaagggagctgttgcggggcttgctgggatcatggcggagaatcactgcgagctcctgtcgccggcccggggcggcatcggggcggggctggggggcggcctgtgccgccgctgcagcgctgggctcggcgccctggcccagcgccctggcagcgtgtccaagtgggtccgactcaacgtcggcggcacctacttcctcaccactcggcagaccctgtgccgggacccgaaatccttcctgtaccgcttatgccaggccgatcccgacctggactcagacaaggatgaaacaggcgcctatttaatcgacagagaccccacctactttgggcctgtgctgaactacctgagacacggcaagctggtgattaacaaagacctcgcggaggaaggagtgttggaggaagcagaattttacaatatcacctcattaataaaacttgtaaaggacaaaattagagaacgagacagcaaaacatcgcaggtgcctgtgaagcatgtgtaccgtgtgctgcagtgccaggaggaggagctcacgcagatggtgtccaccatgtccgacggctggaagttcgagcagttggtcagcatcggctcctcttacaactatgggaacgaagaccaagccgagttcctctgtgtggtgtccaaggagctgcacaacaccccgtacggtacggccagcgagcccagcgagaaggccaagattttgcaagaacgaggctcaaggatgtgagggacacagtattgacagctgaagaaatgatttacgttttcccgagatgtaatgaactgccatgtccaggaagcttggctgtgagaagaaacctgcttttgatcatttttctagagatctgggtgtgaatccttttttgcctctgaggtgggtggtgagagacgggcccagctgtccaaggccagacgtccccaagttgggggagcacggcggccgggtgggcgctgcctcttgggggggcctcgctctgttttttccaagtgccacgtgggactgaggcagacactcccagtcagcccgctcgatcctgaagatcgtgtgaaggaagcgttcttggtgctacacacagtctggaaaagcagcctgggcttcactggcaggaagcggccgcagccgcgtcagtgtccagcacgtcgtggcctctggtccgaccaccaggccctagtctcggtcagggagtctgctctgcctcccaggcgggatcgctggtttctctcgacctcgcagagctcctgacaaaggcggcttctgcgtcgtcactgcttcccggcgccattccgaggccgggccttcttctgacacgggctccaaccccacctgaccaagcccgggacagtcaaggcttctcaatttgtattttccaggcaagagaactttgtaccccttctctgtgtggatagactccccagcgtttttcctctggaaatgcccacagggcttgccgcgtggagactgatctgttccatccgttagcgcgaggtagcagtgtcgcctcgcccctcccactgcgggctcacggggagctggcgtctgtcagtgccttgtcacgcctggcatagaggttgggctggaggcctgtccactggcttctggagctgaaggtctgcgtcacggtgaaaattcgggatgtttacagagcatcacaaatgcctctctctcgccgctctctcattttctttgtataactatgcagccttccctctctttctgggatgtttgggacttcactcgacctgcacgggctctgcccgacatgccgtgggagctgctgggattcctttagaaaccgctgcccgcatgctttgaaaacagacctttctcagctggctgtggggacctgtcagagtctggggactcggcgtgcagggcgggctccaagcgctttgcttccggaactccggcttcccaaggggtactgtgcagactgaccaccggcctcccgcctgcaggtcagaggctctgacactgtctggtttccaatgcttctggagacttcctgcctaggcctcatcctcctctttgccagtcacctgattaaccaattctccagcattaggacttacctccttctttttgtaaggtctcttgtatgttgttaaatgtttggcttaaacaatttataaaagcctttctagaaggcagacttagccccagcagagcctgggaggaaggcggccgctggggctcctgggcatcctctctggggagctgctggccgcttagcgttgtttgatttttgaccttgacatagtagataggcttgtggtttttttaatagagatttagcctgattttactctaataatatttatgggggggttattacttttactccttt

SEQ ID NO: 417105 - DNA, 2369 bp, Homo sapiens
aaaaagccggacgcttccggtggaagggagctgttgcggggcttgctgggatcatggcggagaatcactgcgagctcctgtcgccggcccggggcggcatcggggcggggctggggggcggcctgtgccgccgctgcagcgctgggctcggcgccctggcccagcgccctggcagcgtgtccaagtgggtccgactcaacgtcggcggcacctacttcctcaccactcggcagaccctgtgccgggacccgaaatccttcctgtaccgcttatgccaggccgatcccgacctggactcagacaaggatgaaacaggcgcctatttaatcgacagagaccccacctactttgggcctgtgctgaactacctgagacacggcaagctggtgattaacaaagacctcgcggaggaaggtgcctgtgaagcatgtgtaccgtgtgctgcagtgccaggaggaggagctcacgcagatggtgtccaccatgtccgacggctggaagttcgagcagttggtcagcatcggctcctcttacaactatgggaacgaagaccaagccgagttcctctgtgtggtgtccaaggagctgcacaacaccccgtacggtacggccagcgagcccagcgagaaggccaagattttgcaagaacgaggctcaaggatgtgagggacacagtattgacagctgaagaaatgatttacgttttcccgagatgtaatgaactgccatgtccaggaagcttggctgtgagaagaaacctgcttttgatcatttttctagagatctgggtgtgaatccttttttgcctctgaggtgggtggtgagagacgggcccagctgtccaaggccagacgtccccaagttgggggagcacggcggccgggtgggcgctgcctcttgggggggcctcgctctgttttttccaagtgccacgtgggactgaggcagacactcccagtcagcccgctcgatcctgaagatcgtgtgaaggaagcgttcttggtgctacacacagtctggaaaagcagcctgggcttcactggcaggaagcggccgcagccgcgtcagtgtccagcacgtcgtggcctctggtccgaccaccaggccctagtctcggtcagggagtctgctctgcctcccaggcgggatcgctggtttctctcgacctcgcagagctcctgacaaaggcggcttctgcgtcgtcactgcttcccggcgccattccgaggccgggccttcttctgacacgggctccaaccccacctgaccaagcccgggacagtcaaggcttctcaatttgtattttccaggcaagagaactttgtaccccttctctgtgtggatagactccccagcgtttttcctctggaaatgcccacagggcttgccgcgtggagactgatctgttccatccgttagcgcgaggtagcagtgtcgcctcgcccctcccactgcgggctcacggggagctggcgtctgtcagtgccttgtcacgcctggcatagaggttgggctggaggcctgtccactggcttctggagctgaaggtctgcgtcacggtgaaaattcgggatgtttacagagcatcacaaatgcctctctctcgccgctctctcattttctttgtataactatgcagccttccctctctttctgggatgtttgggacttcactcgacctgcacgggctctgcccgacatgccgtgggagctgctgggattcctttagaaaccgctgcccgcatgctttgaaaacagacctttctcagctggctgtggggacctgtcagagtctggggactcggcgtgcagggcgggctccaagcgctttgcttccggaactccggcttcccaaggggtactgtgcagactgaccaccggcctcccgcctgcaggtcagaggctctgacactgtctggtttccaatgcttctggagacttcctgcctaggcctcatcctcctctttgccagtcacctgattaaccaattctccagcattaggacttacctccttctttttgtaaggtctcttgtatgttgttaaatgtttggcttaaacaatttataaaagcctttctagaaggcagacttagccccagcagagcctgggaggaaggcggccgctggggctcctgggcatcctctctggggagctgctggccgcttagcgttgtttgatttttgaccttgacatagtagataggcttgtggtttttttaatttaaagatattaagacttaattcactaaaatttattctaaggggatatttatacttttatacttttttaggtatcgtattttatcagcttacagtttaatgcctaagtttcccctggaaatagcaaataaaattgtgtatttatgaa

SEQ ID NO: 417106 - DNA, 1899 bp, Homo sapiens
gtcctgggcctgccagctgagtccccaagaccctggccagtgccgctgggttcccggggctccccgagctaaccccaggcctgtgggctctgttttctggagcaggcgcctggtcagggacacctcctcagcccaagtcctcattttatgcatttggtgtttttcaattttgcaagaacgaggctcaaggatgtgagggacacagtattgacagctgaagaaatgatttacgttttcccgagatgtaatgaactgccatgtccaggaagcttggctgtgagaagaaacctgcttttgatcatttttctagagatctgggtgtgaatccttttttgcctctgaggtgggtggtgagagacgggcccagctgtccaaggccagacgtccccaagttgggggagcacggcggccgggtgggcgctgcctcttgggggggcctcgctctgttttttccaagtgccacgtgggactgaggcagacactcccagtcagcccgctcgatcctgaagatcgtgtgaaggaagcgttcttggtgctacacacagtctggaaaagcagcctgggcttcactggcaggaagcggccgcagccgcgtcagtgtccagcacgtcgtggcctctggtccgaccaccaggccctagtctcggtcagggagtctgctctgcctcccaggcgggatcgctggtttctctcgacctcgcagagctcctgacaaaggcggcttctgcgtcgtcactgcttcccggcgccattccgaggccgggccttcttctgacacgggctccaaccccacctgaccaagcccgggacagtcaaggcttctcaatttgtattttccaggcaagagaactttgtaccccttctctgtgtggatagactccccagcgtttttcctctggaaatgcccacagggcttgccgcgtggagactgatctgttccatccgttagcgcgaggtagcagtgtcgcctcgcccctcccactgcgggctcacggggagctggcgtctgtcagtgccttgtcacgcctggcatagaggttgggctggaggcctgtccactggcttctggagctgaaggtctgcgtcacggtgaaaattcgggatgtttacagagcatcacaaatgcctctctctcgccgctctctcattttctttgtataactatgcagccttccctctctttctgggatgtttgggacttcactcgacctgcacgggctctgcccgacatgccgtgggagctgctgggattcctttagaaaccgctgcccgcatgctttgaaaacagacctttctcagctggctgtggggacctgtcagagtctggggactcggcgtgcagggcgggctccaagcgctttgcttccggaactccggcttcccaaggggtactgtgcagactgaccaccggcctcccgcctgcaggtcagaggctctgacactgtctggtttccaatgcttctggagacttcctgcctaggcctcatcctcctctttgccagtcacctgattaaccaattctccagcattaggacttacctccttctttttgtaaggtctcttgtatgttgttaaatgtttggcttaaacaatttataaaagcctttctagaaggcagacttagccccagcagagcctgggaggaaggcggccgctggggctcctgggcatcctctctggggagctgctggccgcttagcgttgtttgatttttgaccttgacatagtagataggcttgtggtttttttaatttaaagatattaagacttaattcactaaaatttattctaaggggatatttatacttttatacttttttaggtatcgtattttatcagcttacagtttaatgcctaagtttcccctggaaatagcaaataaaattgtgtatttatgaa

SEQ ID NO: 417107 - DNA, 2414 bp, Homo sapiens
aaaaagccggacgcttccggtggaagggagctgttgcggggcttgctgggatcatggcggagaatcactgcgagctcctgtcgccggcccggggcggcatcggggcggggctggggggcggcctgtgccgccgctgcagcgctgggctcggcgccctggcccagcgccctggcagcgtgtccaagtgggtccgactcaacgtcggcggcacctacttcctcaccactcggcagaccctgtgccgggacccgaaatccttcctgtaccgcttatgccaggccgatcccgacctggactcagacaaggatgaaacaggcgcctatttaatcgacagagaccccacctactttgggcctgtgctgaactacctgagacacggcaagctggtgattaacaaagacctcgcggaggaaggagtgttggaggaagcagaattttacaatatcacctcattaataaaacttgtaaaggacaaaattagagaacgagacagcaaaacatcgcaggtgcctgtgaagcatgtgtaccgtgtgctgcagtgccaggaggaggagctcacgcagatggtgtccaccatgtccgacggctggaagttcgagcagttggtcagcatcggctcctcttacaactatgggaacgaagaccaagccgagttcctctgtgtggtgtccaaggagctgcacaacaccccgtacggtacggccagcgagcccagcgagaaggccaagattttgcaagaacgaggctcaaggatgtgagggacacagtattgacagctgaagaaatgatttacgttttcccgagatgtaatgaactgccatgtccaggaagcttggctgtgagaagaaacctgcttttgatcatttttctagagatctgggtgtgaatccttttttgcctctgaggtgggtggtgagagacgggcccagctgtccaaggccagacgtccccaagttgggggagcacggcggccgggtgggcgctgcctcttgggggggcctcgctctgttttttccaagtgccacgtgggactgaggcagacactcccagtcagcccgctcgatcctgaagatcgtgtgaaggaagcgttcttggtgctacacacagtctggaaaagcagcctgggcttcactggcaggaagcggccgcagccgcgtcagtgtccagcacgtcgtggcctctggtccgaccaccaggccctagtctcggtcagggagtctgctctgcctcccaggcgggatcgctggtttctctcgacctcgcagagctcctgacaaaggcggcttctgcgtcgtcactgcttcccggcgccattccgaggccgggccttcttctgacacgggctccaaccccacctgaccaagcccgggacagtcaaggcttctcaatttgtattttccaggcaagagaactttgtaccccttctctgtgtggatagactccccagcgtttttcctctggaaatgcccacagggcttgccgcgtggagactgatctgttccatccgttagcgcgaggtagcagtgtcgcctcgcccctcccactgcgggctcacggggagctggcgtctgtcagtgccttgtcacgcctggcatagaggttgggctggaggcctgtccactggcttctggagctgaaggtctgcgtcacggtgaaaattcgggatgtttacagagcatcacaaatgcctctctctcgccgctctctcattttctttgtataactatgcagccttccctctctttctgggatgtttgggacttcactcgacctgcacgggctctgcccgacatgccgtgggagctgctgggattcctttagaaaccgctgcccgcatgctttggactcggcgtgcagggcgggctccaagcgctttgcttccggaactccggcttcccaaggggtactgtgcagactgaccaccggcctcccgcctgcaggtcagaggctctgacactgtctggtttccaatgcttctggagacttcctgcctaggcctcatcctcctctttgccagtcacctgattaaccaattctccagcattaggacttacctccttctttttgtaaggtctcttgtatgttgttaaatgtttggcttaaacaatttataaaagcctttctagaaggcagacttagccccagcagagcctgggaggaaggcggccgctggggctcctgggcatcctctctggggagctgctggccgcttagcgttgtttgatttttgaccttgacatagtagataggcttgtggtttttttaatttaaagatattaagacttaattcactaaaatttattctaaggggatatttatacttttatacttttttaggtatcgtattttatcagcttacagtttaatgcctaagtttcccctggaaatagcaaataaaattgtgtatttatgaa

SEQ ID NO: 417108 - DNA, 2346 bp, Homo sapiens
aaaaagccggacgcttccggtggaagggagctgttgcggggcttgctgggatcatggcggagaatcactgcgagctcctgtcgccggcccggggcggcatcggggcggggctggggggcggcctgtgccgccgctgcagcgctgggctcggcgccctggcccagcgccctggcagcgtgtccaagtgggtccgactcaacgtcggcggcacctacttcctcaccactcggcagaccctgtgccgggacccgaaatccttcctgtaccgcttatgccaggccgatcccgacctggactcagacaaggatgaaacaggcgcctatttaatcgacagagaccccacctactttgggcctgtgctgaactacctgagacacggcaagctggtgattaacaaagacctcgcggaggaaggagtgttggaggaagcagaattttacaatatcacctcattaataaaacttgtaaaggacaaaattagagaacgagacagcaaaacatcgcaggtgcctgtgaagcatgtgtaccgtgtgctgcagtgccaggaggaggagctcacgcagatggtgtccaccatgtccgacggctggaagttcgagcagttggtcagcatcggctcctcttacaactatgggaacgaagaccaagccgagttcctctgtgtggtgtccaaggagctgcacaacaccccgtacggtacggccagcgagcccagcgagaaggccaagattttgcaagaacgaggctcaaggatgtgagggacacagtattgacagctgaagaaatgatttacgttttcccgagatgtaatgaactgccatgtccaggaagcttggctgtgagaagaaacctgcttttgatcatttttctagagatctgggtgtgaatccttttttgcctctgaggtgggtggtgagagacgggcccagctgtccaaggccagacgtccccaagttgggggagcacggcggccgggtgggcgctgcctcttgggggggcctcgctctgttttttccaagtgccacgtgggactgaggcagacactcccagtcagcccgctcgatcctgaagatcgtgtgaaggaagcgttcttggtgctacacacagtctggaaaagcagcctgggcttcactggcaggaagcggccgcagccgcgtcagtgtccagcacgtcgtggcctctggtccgaccaccaggccctagtctcggtcagggagtctgctctgcctcccaggcgggatcgctggtttctctcgacctcgcagagctcctgacaaaggcggcttctgcgtcgtcactgcttcccggcgccattccgaggccgggccttcttctgacacgggctccaaccccacctgaccaagcccgggacagtcaaggcttctcaatttgtattttccaggcaagagaactttgtaccccttctctgtgtggatagactccccagcgtttttcctctggaaatgcccacagggcttgccgcgtggagactgatctgttccatccgttagcgcgaggtagcagtgtcgcctcgcccctcccactgcgggctcacggggagctggcgtctgtcagtgccttgtcacgcctggcatagaggttgggctggaggcctgtccactggcttctggagctgaaggtctgcgtcacggtgaaaattcgggatgtttacagagcatcacaaatgcctctctctcgccgctctctcattttctttgtataactatgcagccttccctctctttctgggatgtttgggacttcactcgacctgcacgggctctgcccgacatgccgtgggagctgctgggattcctttagaaaccgctgcccgcatgctttgaaaacagacctttctcagctggctgtggggacctgtcagagtctggtgtctggtttccaatgcttctggagacttcctgcctaggcctcatcctcctctttgccagtcacctgattaaccaattctccagcattaggacttacctccttctttttgtaaggtctcttgtatgttgttaaatgtttggcttaaacaatttataaaagcctttctagaaggcagacttagccccagcagagcctgggaggaaggcggccgctggggctcctgggcatcctctctggggagctgctggccgcttagcgttgtttgatttttgaccttgacatagtagataggcttgtggtttttttaatttaaagatattaagacttaattcactaaaatttattctaaggggatatttatacttttatacttttttaggtatcgtattttatcagcttacagtttaatgcctaagtttcccctggaaatagcaaataaaattgtgtatttatgaa

SEQ ID NO: 417109 - DNA, 2183 bp, Homo sapiens
aaaaagccggacgcttccggtggaagggagctgttgcggggcttgctgggatcatggcggagaatcactgcgagctcctgtcgccggcccggggcggcatcggggcggggctggggggcggcctgtgccgccgctgcagcgctgggctcggcgccctggcccagcgccctggcagcgtgtccaagtgggtccgactcaacgtcggcggcacctacttcctcaccactcggcagaccctgtgccgggacccgaaatccttcctgtaccgcttatgccaggccgatcccgacctggactcagacaaggatgaaacaggcgcctatttaatcgacagagaccccacctactttgggcctgtgctgaactacctgagacacggcaagctggtgattaacaaagacctcgcggaggaaggagtgttggaggaagcagaattttacaatatcacctcattaataaaacttgtaaaggacaaaattagagaacgagacagcaaaacatcgcaggtgcctgtgaagcatgtgtaccgtgtgctgcagtgccaggaggaggagctcacgcagatggtgtccaccatgtccgacggctggaagttcgagcagttggtcagcatcggctcctcttacaactatgggaacgaagaccaagccgagttcctctgtgtggtgtccaaggagctgcacaacaccccgtacggtacggccagcgagcccagcgagaaggccaagattttgcaagaacgaggctcaaggatgtgagggacacagtattgacagctgaagaaatgatttacgttttcccgagatgtaatgaactgccatgtccaggaagcttggctgtgagaagaaacctgcttttgatcatttttctagagatctgggtgtgaatccttttttgcctctgaggtgggtggtgagagacgggcccagctgtccaaggccagacgtccccaagttgggggagcacggcggccgggtgggcgctgcctcttgggggggcctcgctctgttttttccaagtgccacgtgggactgaggcagacactcccagtcagcccgctcgatcctgaagatcgtgtgaaggaagcgttcttggtgctacacacagtctggaaaagcagcctgggcttcactggcaggaagcggccgcagccgcgtcagtgtccagcacgtcgtggcctctggtccgaccaccaggccctagtctcggtcagggagtctgctctgcctcccaggcgggatcgctggtttctctcgacctcgcagagctcctgacaaaggcggcttctgcgtcgtcactgcttcccggcgccattccgaggccgggccttcttctgacacgggctccaaccccacctgaccaagcccgggacagtcaaggcttctcaatttgtattttccaggcaagagaactttgtaccccttctctgtgtggatagactccccagcgtttttcctctggaaatgcccacagggcttgccgcgtggagactgatctgttccatccgttagcgcgaggtagcagtgtcgcctcgcccctcccactgcgggctcacggggagctggcgtctgtcagtgccttgtcacgcctggcatagaggttgggctggaggcctgtccactggcttctggagctgaaggtctgcgtcacggtgaaaattcgggatgtttacagagcatcacaaatgcctctctctcgccgctctctcattttctttgtataactatgcagccttccctctctttctggagacttcctgcctaggcctcatcctcctctttgccagtcacctgattaaccaattctccagcattaggacttacctccttctttttgtaaggtctcttgtatgttgttaaatgtttggcttaaacaatttataaaagcctttctagaaggcagacttagccccagcagagcctgggaggaaggcggccgctggggctcctgggcatcctctctggggagctgctggccgcttagcgttgtttgatttttgaccttgacatagtagataggcttgtggtttttttaatttaaagatattaagacttaattcactaaaatttattctaaggggatatttatacttttatacttttttaggtatcgtattttatcagcttacagtttaatgcctaagtttcccctggaaatagcaaataaaattgtgtatttatgaa

SEQ ID NO: 417110 - DNA, 2461 bp, Homo sapiens
aaaaagccggacgcttccggtggaagggagctgttgcggggcttgctgggatcatggcggagaatcactgcgagctcctgtcgccggcccggggcggcatcggggcggggctggggggcggcctgtgccgccgctgcagcgctgggctcggcgccctggcccagcgccctggcagcgtgtccaagtgggtccgactcaacgtcggcggcacctacttcctcaccactcggcagaccctgtgccgggacccgaaatccttcctgtaccgcttatgccaggccgatcccgacctggactcagacaaggatgaaacaggcgcctatttaatcgacagagaccccacctactttgggcctgtgctgaactacctgagacacggcaagctggtgattaacaaagacctcgcggaggaaggagtgttggaggaagcagaattttacaatatcacctcattaataaaacttgtaaaggacaaaattagagaacgagacagcaaaacatcgcaggtgcctgtgaagcatgtgtaccgtgtgctgcagtgccaggaggaggagctcacgcagatggtgtccaccatgtccgacggctggaagttcgagcagttggtcagcatcggctcctcttacaactatgggaacgaagaccaagccgagttcctctgtgtggtgtccaaggagctgcacaacaccccgtacggtacggccagcgagcccagcgagaaggccaagattttgcaagaacgaggctcaaggatgtgagggacacagtattgacagctgaagaaatgatttacgttttcccgagatgtaatgaactgccatgtccaggaagcttggctgtgagaagaaacctgcttttgatcatttttctagagatctgggtgtgaatccttttttgcctctgaggtgggtggtgagagacgggcccagctgtccaaggccagacgtccccaagttgggggagcacggcggccgggtgggcgctgcctcttgggggggcctcgctctgttttttccaagtgccacgtgggactgaggcagacactcccagtcagcccgctcgatcctgaagatcgtgtgaaggaagcgttcttggtgctacacacagtctggaaaagcagcctgggcttcactggcaggaagcggccgcagccgcgtcagtgtccagcacgtcgtggcctctggtccgaccaccaggccctagtctcggtcagggagtctgctctgcctcccaggcgggatcgctggtttctctcgacctcgcagagctcctgacaaaggcggcttctgcgtcgtcactgcttcccggcgccattccgaggccgggccttcttctgacacgggctccaaccccacctgaccaagcccgggacagtcaaggcttctcaatttgtattttccaggcaagagaactttgtaccccttctctgtgtggatagactccccagcgtttttcctctggaaatgcccacagggcttgccgcgtggagactgatctgttccatccgttagcgcgaggtagcagtgtcgcctcgcccctcccactgcgggctcacggggagctggcgtctgtcagtgccttgtcacgcctggcatagaggttgggctggaggcctgtccactggcttctggagctgaaggtctgcgtcacggtgaaaattcgggatgtttacagagcatcacaaatgcctctctctcgccgctctctcattttctttgtataactatgcagccttccctctctttctgggatgtttgggacttcactcgacctgcacgggctctgcccgacatgccgtgggagctgctgggattcctttagaaaccgctgcccgcatgctttgaaaacagacctttctcagctggctgtggggacctgtcagagtctggggactcggcgtgcagggcgggctccaagcgctttgcttccggaactccggcttcccaaggggtactgtgcagactgaccaccggcctcccgcctgcaggtcagaggctctgacactgtctggtttccaatgcttctggagacttcctgcctaggcctcatcctcctctttgccagtcacctgattaaccaattctccagcattaggacttacctccttctttttgtaaggtctcttgtatgttgttaaatgtttggcttaaacaatttataaaagcctttctagaaggcagacttagccccagcagagcctgggaggaaggcggccgctggggctcctgggcatcctctctggggagctgctggccgcttagcgttgtttgatttttgaccttgacatagtagataggcttgtggtttttttaatttaaagatattaagacttaattcactaaaatttattctaaggggatatttatacttttatacttttttaggtatcgtattttatcagcttacagtttaatgcctaagtttcccctggaaatagcaaataaaattgtgtatttatgaa

SEQ ID NO: 417111 - DNA, 2844 bp, Homo sapiens
ctgatgaaagaatgtcccaggagattcctcctaattaaatgctgactgaggaatctgaggagggggggaaggggtgtcaggagtgggaggccattaatgacacgttggaagacaaacaggatgttgattcacctgtaaagatctccaaggcctgacctcagagttgagattaaggaaagaatattcctcgagttggacttaagcatggatctggtggaagagtccctgcctggattattagacttgtgtggagtgagcacctgggcttgcagagtgtgggggtctggagaggagttgggtggggagatttaagggggaggagttcccaagaaaccacagaagctttgggtgcctgagaggttgggagagcaccctgctaaagcatcctatctggtagggaggggagctcttgacagacgggttgttagggagggtggtgaaagccacgcacatcaaggggctggcttgattgccctctggccccacatctaagcttctgggctgtgactgcccccaaccaagtcctcagagcccagcttgggacccaccacccgccatactccacgctcccaagcccttactctgctgttccaagggccgacctgctgccacaaagttctctttctagacagcccggtgtgaattctcacttcctcctgggacttcctccagcaggactgtggctgtggatgaaacaggcgcctatttaatcgacagagaccccacctactttgggcctgtgctgaactacctgagacacggcaagctggtgattaacaaagacctcgcggaggaaggagtgttggaggaagcagaattttacaatatcacctcattaataaaacttgtaaaggacaaaattagagaacgagacagcaaaacatcgcaggtgcctgtgaagcatgtgtaccgtgtgctgcagtgccaggaggaggagctcacgcagatggtgtccaccatgtccgacggctggaagttcgagcagttggtcagcatcggctcctcttacaactatgggaacgaagaccaagccgagttcctctgtgtggtgtccaaggagctgcacaacaccccgtacggtacggccagcgagcccagcgagaaggccaagattttgcaagaacgaggctcaaggatgtgagggacacagtattgacagctgaagaaatgatttacgttttcccgagatgtaatgaactgccatgtccaggaagcttggctgtgagaagaaacctgcttttgatcatttttctagagatctgggtgtgaatccttttttgcctctgaggtgggtggtgagagacgggcccagctgtccaaggccagacgtccccaagttgggggagcacggcggccgggtgggcgctgcctcttgggggggcctcgctctgttttttccaagtgccacgtgggactgaggcagacactcccagtcagcccgctcgatcctgaagatcgtgtgaaggaagcgttcttggtgctacacacagtctggaaaagcagcctgggcttcactggcaggaagcggccgcagccgcgtcagtgtccagcacgtcgtggcctctggtccgaccaccaggccctagtctcggtcagggagtctgctctgcctcccaggcgggatcgctggtttctctcgacctcgcagagctcctgacaaaggcggcttctgcgtcgtcactgcttcccggcgccattccgaggccgggccttcttctgacacgggctccaaccccacctgaccaagcccgggacagtcaaggcttctcaatttgtattttccaggcaagagaactttgtaccccttctctgtgtggatagactccccagcgtttttcctctggaaatgcccacagggcttgccgcgtggagactgatctgttccatccgttagcgcgaggtagcagtgtcgcctcgcccctcccactgcgggctcacggggagctggcgtctgtcagtgccttgtcacgcctggcatagaggttgggctggaggcctgtccactggcttctggagctgaaggtctgcgtcacggtgaaaattcgggatgtttacagagcatcacaaatgcctctctctcgccgctctctcattttctttgtataactatgcagccttccctctctttctgggatgtttgggacttcactcgacctgcacgggctctgcccgacatgccgtgggagctgctgggattcctttagaaaccgctgcccgcatgctttgaaaacagacctttctcagctggctgtggggacctgtcagagtctggggactcggcgtgcagggcgggctccaagcgctttgcttccggaactccggcttcccaaggggtactgtgcagactgaccaccggcctcccgcctgcaggtcagaggctctgacactgtctggtttccaatgcttctggagacttcctgcctaggcctcatcctcctctttgccagtcacctgattaaccaattctccagcattaggacttacctccttctttttgtaaggtctcttgtatgttgttaaatgtttggcttaaacaatttataaaagcctttctagaaggcagacttagccccagcagagcctgggaggaaggcggccgctggggctcctgggcatcctctctggggagctgctggccgcttagcgttgtttgatttttgaccttgacatagtagataggcttgtggtttttttaatttaaagatattaagacttaattcactaaaatttattctaaggggatatttatacttttatacttttttaggtatcgtattttatcagcttacagtttaatgcctaagtttcccctggaaatagcaaataaaattgtgtatttatgaa

SEQ ID NO: 417112 - DNA, 2089 bp, Homo sapiens
aaaaagccggacgcttccggtggaagggagctgttgcggggcttgctgggatcatggcggagaatcactgcgagctcctgtcgccggcccggggcggcatcggggcggggctggggggcggcctgtgccgccgctgcagcgctgggctcggcgccctggcccagcgccctggcagcgtgtccaagtgggtccgactcaacgtcggcggcacctacttcctcaccactcggcagaccctgtgccgggacccgaaatccttcctgtaccgcttatgccaggccgatcccgacctggactcagacaaggatgaaacaggcgcctatttaatcgacagagaccccacctactttgggcctattttgcaagaacgaggctcaaggatgtgagggacacagtattgacagctgaagaaatgatttacgttttcccgagatgtaatgaactgccatgtccaggaagcttggctgtgagaagaaacctgcttttgatcatttttctagagatctgggtgtgaatccttttttgcctctgaggtgggtggtgagagacgggcccagctgtccaaggccagacgtccccaagttgggggagcacggcggccgggtgggcgctgcctcttgggggggcctcgctctgttttttccaagtgccacgtgggactgaggcagacactcccagtcagcccgctcgatcctgaagatcgtgtgaaggaagcgttcttggtgctacacacagtctggaaaagcagcctgggcttcactggcaggaagcggccgcagccgcgtcagtgtccagcacgtcgtggcctctggtccgaccaccaggccctagtctcggtcagggagtctgctctgcctcccaggcgggatcgctggtttctctcgacctcgcagagctcctgacaaaggcggcttctgcgtcgtcactgcttcccggcgccattccgaggccgggccttcttctgacacgggctccaaccccacctgaccaagcccgggacagtcaaggcttctcaatttgtattttccaggcaagagaactttgtaccccttctctgtgtggatagactccccagcgtttttcctctggaaatgcccacagggcttgccgcgtggagactgatctgttccatccgttagcgcgaggtagcagtgtcgcctcgcccctcccactgcgggctcacggggagctggcgtctgtcagtgccttgtcacgcctggcatagaggttgggctggaggcctgtccactggcttctggagctgaaggtctgcgtcacggtgaaaattcgggatgtttacagagcatcacaaatgcctctctctcgccgctctctcattttctttgtataactatgcagccttccctctctttctgggatgtttgggacttcactcgacctgcacgggctctgcccgacatgccgtgggagctgctgggattcctttagaaaccgctgcccgcatgctttgaaaacagacctttctcagctggctgtggggacctgtcagagtctggggactcggcgtgcagggcgggctccaagcgctttgcttccggaactccggcttcccaaggggtactgtgcagactgaccaccggcctcccgcctgcaggtcagaggctctgacactgtctggtttccaatgcttctggagacttcctgcctaggcctcatcctcctctttgccagtcacctgattaaccaattctccagcattaggacttacctccttctttttgtaaggtctcttgtatgttgttaaatgtttggcttaaacaatttataaaagcctttctagaaggcagacttagccccagcagagcctgggaggaaggcggccgctggggctcctgggcatcctctctggggagctgctggccgcttagcgttgtttgatttttgaccttgacatagtagataggcttgtggtttttttaatttaaagatattaagacttaattcactaaaatttattctaaggggatatttatacttttatacttttttaggtatcgtattttatcagcttacagtttaatgcctaagtttcccctggaaatagcaaataaaattgtgtatttatgaa

SEQ ID NO: 417113 - DNA, 263 bp, Homo sapiens
tggaggaaggaaattacccacctctggccatcctgtcccatgtaagggtggtgatgggagggagggctgagaagctcttgtgaaggtcacagcccagaggcacaggctccctaaaggactcagacctaatcacaggactacagaacctttccccttcccacacatgttacttatagtactgcaggcctctttacagcagttacagttacttttacctggtacatcacatctggttatcaagaaaaaatttcagctggacctat

SEQ ID NO: 417114 - DNA, 302 bp, Homo sapiens
agccaagtgcagggctgggacaggacttcacaaccagaaggatcaagagtggcctgcaagtcttggagtcgctcctggggaggccctgagtttgttgttctggcaaggccccaccccagggatgtgcttgccacccggtggaaggctttaaatgaaacaagcagtcaagaacatgggctctgggccaggtgtggtggctcaggcctgtaattccagcactcggggaggccgagacgggaggattacttgagcccaggagttcgaaaccagcctggacaacatggcaagacgtcatcaatatt

SEQ ID NO: 417115 - DNA, 994 bp, Homo sapiens
  misc_feature (244)..(244): n is a, c, g, or t
  misc_feature (822)..(822): n is a, c, g, or t
  misc_feature (958)..(958): n is a, c, g, or t
cagtgcggcacctgtcctggcaggcactgtatccaccagaggagagaccctcggcaaaccctcagacggccaggagggtcagcgcgggcactggtgcccacttggggtgaagacttgggttactgtctgctgggccttgcgaggggcttgggagggtcatgggggcactgcacttccctgagcagggagcacggggttagaaggggcagggctgccgcgaggggctggaggctggagggaggtntggggtgcctctggtgggtgaagctgggagcagagaccgtcgcattgggtgtgtcggagccgttcgagggtgggggtgccagcaactgctgtgccagggaccttgaactggctgagcatggaatggaaatctgggcctcggtgcctggaggggcctgagagctggggtcctctgcagacgtcctcggcagcacccagcacagtcgggccttaggactggaggtacacagcggccaccctgagctcccacagcagtgctgtctctcaggcacctctcccttcaggaacccaagccctgaaccccaacacccctgagctcggaccccaaatccagccctggcctaggagatggtggccttttgctctccccactttaaggaaagctttggggtggaagtgacactgtgctccttgctgaggaagaggttgggttccacagcagcagacgtgcggggccttggaagttggggggtggggaagctcctctcgattaaatgctgagcctgtcgttttccccaggtcagtggccccgcgtccccaacgtggtggtgtgcagccccaggggccagcagagggcgngcttgcttttctcctttaagtccgaaactgactcccggagaatttatagacatgtgggagcccactggcctcgccgctggtgtgtggccgcgtttgtgggtgctggtcaacaccttgctccacaaggaaatacttntgtgagttgtgacgaaaatatactttttgcaatgcg

SEQ ID NO: 417116 - DNA, 345 bp, Homo sapiens
gaggaaatgatacttaatctgacatcagaaaggtgaatgagatttatctaaataaggtgggtgtaaagataatgaatgtggaaggtaggttgtatcattataattaatgtttgctcattaacaatgtacccaaataagaggtaccaaataagtctgggatctaagagaattatttatagttaaggagagaattaaaataagccaataaatagagttaatttgggagctatttcatgtaatgtattgagtatgcttttattcttgaaaatctatttctataaatgtagtaaactgaactttatacatttcacatagctcgatatttattcttcagaagaatttttt

SEQ ID NO: 417117 - DNA, 443 bp, Homo sapiens
ccttaagacattgtaggaaggtgcttagtttattcttctttaagctatgatgagaaatgagatttctggtataaaaaatctaaaccaaactccctcaaaaatatgagtttaagccaattaaatcctcccttaattggcaataactcaataaacattcaatctccttttaagtattggaaaatgtttaatctctactaagttttcctttttctggaataagctgtccctactgttttagtctttccctctgggcttttgggttattttccccactgtgaactgctccctatttgaacttaatctcttggggctttgtagattcttagttttattaatgtcattctaatccttgaggaataatttattatctttgataaatttacaactatttctactcagtgaattcatgattacatatttcattcagcaaaattgtattttag

SEQ ID NO: 417118 - DNA, 150 bp, Homo sapiens
aggctcacgtactttcctaactgccttgctgcggcttactgccaacgtccaacatcttcttgctcttctctgctatctccaaagttatttcacttatcttcaatgaatgtctgttaatctgatacctgcatgactcaatactactttact

SEQ ID NO: 417119 - DNA, 611 bp, Homo sapiens
gaatttcattctgttcctgacagcgtccttgactagctgtttgatcaccccgagcaaagttacataccagctttcaaccgttgggagggcagcggcgtcctttttctcaagtgccttctcctgggtcgggctttatgcctgcagcagggcgtttcaaacggctgaggccatcccttgttagggagagaaacctcccgggcaggggtctccctcaatgaggaagccctccacttccccccactcgtcccactgttcgtgattttaatctgcttttgtggcgcaggaagaaagaaaattaattttcgcccgtctgtgtgtagggagcatttcagtggaaacccggtttgaaatgcatgttctgttgatttcggcagcctgcgccggctggggttttgagatgcagcattctcaggggaagaggtgatgggccacaggccttcgtggggtgggaactcaggctccccgtgggccctggacggggtcctcatgtcctgtgctccgtcttggcaggagtaagagttgatgatgttcatgctctcccaactcacccatctctgccatggttgcttttttttttttttttggttaaagcaagcatattttgctgttgc

SEQ ID NO: 417120 - DNA, 440 bp, Homo sapiens
agagcaacgtctgtctcagagcgactcccacagcgtccttagcaaccagccttggttcccagcggctcagagcgcagcggaatttatggatttatgaatatgcctgttaacaaatcaccttatgattaatacatgtggaggcatatcttccccttatcatgaagagctctggaaattaaattttcaacatttaagtggagaaaggggtcataaatcaagattatttccttgggataaagtttctacaatgagtgcaagagcaattgaaaagaactttcacaaagactttacagtcacaaataatatactttttctagttgttttctgtgctatccttgtcccaataccatagtgatccatattgtaaaaaaaagtagcaggagaagttgttatccacctagaatcctacagagaagaaaataaaattcaaaatatatcat

SEQ ID NO: 417121 - DNA, 343 bp, Homo sapiens
tggccagggctgctgcactggggaccctggtggaggatttcgctggaaacgcaggtgggaccagaccatgaagagtctcaaacacagacttgaggactctgacctttatcctgggggcagcaagaagccatgttaggtgaaggaacaaggctgtttctccctcagcactagtgcaaggaaaggccagggaggccctcagtggaagcttgctgctggatttgttgatgtgccttttctcctgcctgcactggggtcagaatggccttgggtactgcacacttcctaccaggaatagaaggccccacagctatagcacctctcttccttttagttctttggaagg

SEQ ID NO: 417122 - DNA, 1552 bp, Homo sapiens
  misc_feature (421)..(421): n is a, c, g, or t
  misc_feature (540)..(540): n is a, c, g, or t
  misc_feature (1041)..(1041): n is a, c, g, or t
gagaattcatacaggtgagaaaccctacaaatgtaatgagtgtgaaaaaaccttcagccacagatcatcccttctttctcatcagagaattcatactggagagaaaccttacaagtgtaatgaatgtgagaaggcatttagcaacagttcaacccttatcaaacatctgagagtgcatactggagagaaaccgtatcgatgtagggaatgtggtaaagcctttagccagtgttcaaccctcactgtacatcagagaattcatactggagagaaactctataaatgcggcgaatgtgagaaggccttcaactgtagagcaaaacttcacaggcatcaaagaatccatacaggtgagaaaccctataaatgtagtgagtgtgggaagggatacagccagtttacatctctagctgaacatcanaggtttcatactggagaacaactgtatacatgcttggaatgtgggagaaccttcacacgtattgtaacccttatcgaacatcagcgaattcacactggacaaaaaccttatcagtgcancgaatgtgagaaagccttcaaccagtattcatcctttaatgaacatcggaaaattcatactggggaaaaactttatacatgtgaggaatgtgggaaagcctttggttgcaaatctaacctttataggcatcagagaattcatactggagagaaaccgtatcagtgtaatcagtgtggaaaggccttcagccagtattcatttttaaccgaacatgagaggatccacactggagagaaactgtataaatgtatggaatgtgggaaagcctacagttacagatcaaacctttgtagacacaaaaaagttcacacgaaagagaaactctataagtggaaggaatatgggaaacctttcatctgcagctcctcacttacccagtatcagagattttttaaaggagataaagcctatgaggtttagttcatctctcaaataatccaagacttctcactggggaataagggaataataaatagggtacaaactcctaatagatttgncttttttacttctcctgaaggaaatatgttagttgccactaagtcatgataaaattgatcagtgagactatgaagagcactgacttgttaaattttaaaagaaccataaattctaaggtatctaaaaacctatgagtatttaattcatagaaaaaatgtaaaaggtctttttaaaaatcatgaaaaatagttgaatatacattttgtttctctcataagaccatattccctttaaaagagtaagcttcaatatgtgaattttcttttaaaaacagtcactgagttaataatgtaaataagtgtgtggccttctttaaaatagctggctaacataggaggcacttcttttcataaagagaagctaaacataaaaaggaattttaaatttaactcttcacatggaaataataaagctctttatatgagctgtcccaccagcaacttatatatgtaaacatacatatatacacatatgcatgtgtgtgtgtaaacataaaagtcctttattatt

SEQ ID NO: 417123 - DNA, 679 bp, Homo sapiens
aaggaaatgaatttgatagcagattgttagagattaattacctatcatatgccaaagccacttcctacatgtcagtgctaaggaatcccctagagatggaattcctaggttcaactgaaaattaattgtaattaatataataggttaattcattgtaattatttttaagccttttggcaatgagttaattccacaagatccacattgcttgaagtgtcacagagaacacttgatgagaatgttctagtaataaaccttaaccctctggggaaaaaatcctactgtctttccttctggcttcgtttcttctggaacatattttggtggcatttgatttctggagaacaaagggatccctacaaggtgatgcataaacatgcgtggcccagatggactgtgctcattggagacagggaaaacaaaaggcctttgattgtgcctcgttttctttggaagtgtgtcttgcttcagactaacagaatgcctttgctcctagaataaaatgtaatggaactgaaaattgaagaatctgggcctttttccctttcctaattatttccacttgactcacttaatcttggacgattattcagtcatatctgaaatgagaaaatgacgggagtaaaatttccatctcttgttacaagggcttataaacattaacagaataatcctgtac

SEQ ID NO: 417124 - DNA, 501 bp, Homo sapiens
aggaatattaatttggaaccaaattaacagccaaaatagaagacactgcttgtgaatgggagtgaaagtagctcagcaagatggagatagacacaaggatggcataagataataaataatactaatataatggtagataatgacaatacgtcatgctggtatggtgctttctatttctcacaggtcatttaagttcccctttgttcctcagaacattcctgcgtggtagatagggtgtgtattcctgatcttagagatgaggagactgaaatgagatctttaataactcacccaagatcatccaaacttagtagtggagtcaggatcattactacttgaactgtggcttcctaactgaaaaaaatacattgtacctgtgtttatcaattgttgtattccatgaagggtgctaagaactgtggcatgaagcattgatcacattggtttgaacggactacggttataaaagtcttattgatggaaataaacttattaattttt

SEQ ID NO: 417125 - DNA, 7826 bp, Homo sapiens
ccagcaccccggggctgcgcactgcagctccccaggccacccaccacccttctggtctctgagcccaggatgcgaggatggccagaccatctctgtgcaccctggctcgtctgggccctgagtgcttgcgccccttcacccgggagtcactggcagccatagaacagcgggcggtggaggaggaggcccggctgcagcggaataagcagatggagattgaggagcccgaacggaagccacgaagtgacttggaggctggcaagaacctacccatgatctacggagaccccccgccggaggtcatcggcatccccctggaggacctggatccctactacagcaataagaagaccttcatcgtactcaacaagggcaaggccatcttccgcttctccgccacacctgctctctacctgctgagccccttcagcgtagtcaggcgcggggccatcaaggtgctcatccatgcgctgttcagcatgttcatcatgatcaccatcttgaccaactgcgtattcatgaccatgagtgacccgcctccctggtccaagaatgtggagtacaccttcacagggatctacacctttgagtccctcatcaagatactggcccgaggcttctgtgtcgacgacttcacattcctccgggacccctggaactggctggacttcagtgtcatcatgatggcgtacctgacagagtttgtggacttgggcaacatctcagccctgaggaccttccgggtgctgcgggccctcaaaaccatcacggtcatcccagggctgaagacgatcgtgggggccctgatccagtcggtgaagaagctgtcggatgtgatgatcctcactgtcttctgcctgagcgtctttgcgctggtaggactgcagctcttcatgggaaacctgaggcagaagtgtgtgcgctggcccccgccgttcaacgacaccaacaccacgtggtacagcaatgacacgtggtacggcaatgacacatggtatggcaatgagatgtggtacggcaatgactcatggtatgccaacgacacgtggaacagccatgcaagctgggccaccaacgatacctttgattgggacgcctacatcagtgatgaagggaacttctacttcctggagggctccaacgatgccctgctctgtgggaacagcagtgatgctgggcactgccctaagggttatgagtgcatcaagaccgggcggaaccccaactatggctacaccagctatgacaccttcagctgggccttcttggctctcttccgcctcatgacacaggactattgggagaacctcttccagctgacccttcgagcagctggcaagacctacatgatcttcttcgtggtcatcatcttcctgggctctttctacctcatcaatctgatcctggccgtggtggccatggcatatgccgagcagaatgaggccaccctggccgaggataaggagaaagaggaggagtttcagcagatgcttgagaagttcaaaaagcaccaggaggagctggagaaggccaaggccgcccaagctctggaaggtggggaggcagatggggacccagcccatggcaaagactgcaatggcagcctggacacatcgcaaggggagaagggagccccgaggcagagcggcagcggagacagcggcatctccgacgccatggaagaactggaagaggcccaccaaaagtgcccaccatggtggtacaagtgcgcccacaaagtgctcatatgggactgctgcgccccgtggctgaagttcaagaacatcatccacctgatcgtcatggacccgttcgtggacctgggcatcaccatctgcatcgtgctcaacaccctcttcatggccatggaacattaccccatgacggagcactttgacaacgtgctcactgtgggcaacctggtcttcacaggcatcttcacagcagagatggttctgaagctgattgccatggacccctacgagtatttccagcagggttggaatatcttcgacagcatcatcgtcaccctcagcctggtagagctaggcctggccaacgtacagggactgtctgtgctacgctccttccgtctgctgcgggtcttcaagctggccaagtcgtggccaacgctgaacatgctcatcaagatcattggcaattcagtgggggcgctgggtaacctgacgctggtgctggctatcatcgtgttcatcttcgccgtggtgggcatgcagctgtttggcaagagctacaaggagtgcgtgtgcaagattgccttggactgcaacctgccgcgctggcacatgcatgatttcttccactccttcctcatcgtcttccgcatcctgtgcggggagtggatcgagaccatgtgggactgcatggaggtggccggccaagccatgtgcctcaccgtcttcctcatggtcatggtcatcggcaatcttgtggtcctgaacctgttcctggctctgctgctgagctccttcagcgccgacagtctggcagcctcggatgaggatggcgagatgaacaacctgcagattgccatcgggcgcatcaagttgggcatcggctttgccaaggccttcctcctggggctgctgcatggcaagatcctgagccccaaggacatcatgctcagcctcggggaggctgacggggccggggaggctggagaggcgggggagactgcccccgaggatgagaagaaggagccgcccgaggaggacctgaagaaggacaatcacatcctgaaccacatgggcctggctgacggccccccatccagcctcgagctggaccaccttaacttcatcaacaacccctacctgaccatacaggtgcccatcgcctccgaggagtccgacctggagatgcccaccgaggaggaaaccgacactttctcagagcctgaggatagcaagaagccgccgcagcctctctatgatgggaactcgtccgtctgcagcacagctgactacaagccccccgaggaggaccctgaggagcaggcagaggagaaccccgagggggagcagcctgaggagtgcttcactgaggcctgcgtgcagcgctggccctgcctctacgtggacatctcccagggccgtgggaagaagtggtggactctgcgcagggcctgcttcaagattgtcgagcacaactggttcgagaccttcattgtcttcatgatcctgctcagcagtggggctctggccttcgaggacatctacattgagcagcggcgagtcattcgcaccatcctagaatatgccgacaaggtcttcacctacatcttcatcatggagatgctgctcaaatgggtggcctacggctttaaggtgtacttcaccaacgcctggtgctggctcgacttcctcatcgtggatgtctccatcatcagcttggtggccaactggctgggctactcggagctgggacccatcaaatccctgcggacactgcgggccctgcgtcccctgagggcactgtcccgattcgagggcatgagggtggtggtgaacgccctcctaggcgccatcccctccatcatgaatgtgctgcttgtctgcctcatcttctggctgatcttcagcatcatgggtgtcaacctgtttgccggcaagttctactactgcatcaacaccaccacctctgagaggttcgacatctccgaggtcaacaacaagtctgagtgcgagagcctcatgcacacaggccaggtccgctggctcaatgtcaaggtcaactacgacaacgtgggtctgggctacctctccctcctgcaggtggccaccttcaagggttggatggacatcatgtatgcagccgtggactcccgggagaaggaggagcagccgcagtacgaggtgaacctctacatgtacctctactttgtcatcttcatcatctttggctccttcttcaccctcaacctcttcattggcgtcatcattgacaacttcaaccagcagaagaagaagttaggggggaaagacatctttatgacggaggaacagaagaaatactataacgccatgaagaagcttggctccaagaagcctcagaagccaattccccggccccagaacaagatccagggcatggtgtatgacctcgtgacgaagcaggccttcgacatcaccatcatgatcctcatctgcctcaacatggtcaccatgatggtggagacagacgaccagagccagctcaaggtggacatcctgtacaacatcaacatgatcttcatcatcatcttcacaggggagtgcgtgctcaagatgctcgccctgcgccagtactacttcaccgttggctggaacatctttgacttcgtggtcgtcatcctgtccattgtgggccttgccctctctgacctgatccagaagtacttcgtgtcacccacgctgttccgtgtgatccgcctggcgcggattgggcgtgtcctgcggctgatccgcggggccaagggcatccggacgctgctgttcgccctcatgatgtcgctgcctgccctcttcaacatcggcctcctcctcttcctggtcatgttcatctactccatcttcggcatgtccaactttgcctacgtcaagaaggagtcgggcatcgatgatatgttcaacttcgagaccttcggcaacagcatcatctgcctgttcgagatcaccacgtcggccggctgggacgggctcctcaaccccatcctcaacagcgggcccccagactgtgaccccaacctggagaacccgggcaccagtgtcaagggtgactgcggcaacccctccatcggcatctgcttcttctgcagctatatcatcatctccttcctcatcgtggtcaacatgtacatcgccatcatcctggagaacttcaatgtggccacagaggagagcagcgagccccttggtgaagatgactttgagatgttctacgagacatgggagaagttcgaccccgacgccacccagttcatcgcctacagccgcctctcagacttcgtggacaccctgcaggaaccgctgaggattgccaagcccaacaagatcaagctcatcacactggacttgcccatggtgccaggggacaagatccactgcctggacatcctctttgccctgaccaaagaggtcctgggtgactctggggaaatggacgccctcaagcagaccatggaggagaagttcatggcagccaacccctccaaggtgtcctacgagcccatcaccaccaccctcaagaggaagcacgaggaggtgtgcgccatcaagatccagagggcctaccgccggcacctgctacagcgctccatgaagcaggcatcctacatgtaccgccacagccacgacggcagcggggatgacgcccctgagaaggaggggctgcttgccaacaccatgagcaagatgtatggccacgagaatgggaacagcagctcgccaagcccggaggagaagggcgaggcaggggacgccggacccactatggggctgatgcccatcagcccctcagacactgcctggcctcccgcccctcccccagggcagactgtgcgcccaggtgtcaaggagtctcttgtctagcaggcagcatcggggtggccccactgagtctcggcatagtccccagagctcccccgtggtgcctgcacacagagtgagggaggagggctttgaatctgggactgtgcctggctccctgatgggggacaggatttggccacactggggctgacacccaggcccgagcgcctgcgttcccagaccatgggaaatgggaattgcgctcaggggctccatgctgggtctgaggcccctgcctccaagatttaacctgcaagttgctctgacctcctctgggccctgtcgcccctccttttggcctgggggaggtcagaacattcgaatctctgcccctcacttgaggaggagctggcctgcggtggagggatcagttgccccccatcaccagagtcttaagggtcactggcctctccccaggaagtgggctcagacccccctcagccccagcccagacaaagatgtcttaacctcagggagtgcagacacctaaccccagggcactgccagcccaccccctttgactctggggtgcagcttcacccaccaggccagctcaggaattccctggaaaagggaaatgtgactggttcagaaatagctcctcaaagcctcaaaacctgattggccactggatcctgctgctttgggctgggatggtgactcctgaaacctcttcctaggccacgtccaggtccgtagctcccctggctggctcctaggggaagagcagaaggaaggatgccacttgggaatgaattgtccttttctaggaagcacgggggagtgagacaggctgggtcctgccagctggatcgctgcacatggcctgagcatccagacctgagcgggagtcagggacctgctgctcagtaagaagattctcgccccttccctctctccctgcctcactcctccgtgagcaccaccagggctccaggagcctcatccagcctcagagatctcccttctcatctccccacgccccgtctctttctcacctttcccacctctctccccaaagtgatcctaagaatgtacagttgagctcaggttagatatttcgaccctggggcgtgcagcagggaaggcccaactggttcaggctcaaccttccaacttcctgtggcctgaagaagcacttctgctgcatcgctgttctgggcatggcagggccaggcctctgctggctcaggaggaggggtgagagacctgctcaggcgtcgctggatttattcacttgtgtgtgtacctgtggctgtgtgtctgcttgtatgcttttataggcctgtgtgtatagctgtgtgtgtgttcaagtgcgtgactgtatgtgtgtgtgtgaaccactgtgtgaaccactgtgtactggagcctgcattatgcacgtgtctgggtatctttgtatatatgtgtatatatgtgtgccctggactgtttcaaggtccatggagtacggctggtgtgtcatactgtgcaggcctgtccctgggagtgttcccgtgcctgggagagtggacctgtgctgtgagtgtgtggatgcgtgtgaacgcatgtggtaaggtgtgtactcagggcattctgttggcctaagtgcctcttctttttcttcttgtttctcatgaaaagtttgattaaaattcaggaagcagcaaaaccttcaaaacaagacatgtatgtgtgcttgagtgtgtgaacacgtgtgtgtgtgtgcacatctacatgccatgcctatgggccagagttgtctttattgtccaccatgctctctcacctgcttcccagtcctgcctgaacagccctctctctcactcccctctcctccccttcctgtttctcgttgtcacacccatggcctcagccctgctccctgcctcctgcctatgtctcctctatggaaggaggcctccactccttccatctcttccttcagaagtttcgtctaatgggggcagtctccccttcctggcacattgcccctctgccttgccctcctgggccctgggctggcacagcccctggagcctcagaaatctgtttgattggatattctcctcggactgtgtgcaggttgcagaggaagagtagatgagccgggtccggcctctccctgcctgtggcccctcccctgcagacggatgcccattcctgcctggtccagtggggaacaggtcccacgccaggccagcaggcgggctcctttgtacagttcttacaataaaccctccttggtgcctctggtat

SEQ ID NO: 417126 - DNA, 2421 bp, Homo sapiens
  misc_feature (278)..(278): n is a, c, g, or t
  misc_feature (328)..(328): n is a, c, g, or t
ctttcatcctggatcccaggaaatttggtccaggaaaattcaccggagtgtgcttacagctggtgttgtccaccgagccagctctcctctctggccccaggtttccctgccagaaattcccagcatctgtgttgtacatttgattttctagatgtggataacactgaggtgggtttagagatcccctaccctccattaaatgtcccttactctgtgacctgtgaatacaaaatgtttaacttaatcatagccttttgcaagtcagtcctagattactnaagaacaaataattttgcttaccgctccactgaaacacccagtgaccgcntaatagcagtctcaatttcacctcatttttttcctttcagctgcagagcttaccagtcatgtgtgattattatttttaaaatcatctcaaaattttagtatattttcagttatggaaccataattgtagtctaaatttatttattttaaaaaatgtaaatgcatctttaatagacaaataataattttgtacatttatgtatgaggcacagtgtgatgttttgatctaagtatgcatggtgtaaagatccagtcaagctaatgaacacatttgtcacctcaccaacttatcactttttggtggccactttttaaaacttcttcctgccacagttctctcctggttttcctttcaactacgtgacagtgacagttttctcaggccctgtttcccttcctagccagagccgtgttgcatttatctctatgcttccagcaaccagcacagaacctggtctgcatttgcttcagtaagcatttgtagggtgacaagatgatgaaatcatttaaatgtactcattctttacttgtgtgtttttttccctctttgaaacataattttaaaaaaatcttggtaccatccagaattaagtttaatattctctcttctggattgtgttatcactctaattattcatagttcccatttgataaaaataccatatacattataaatgttgacaaataattattaaacataaaattagaattttattgaaaaggcctctctcaaggatatgtatggacctttttttccacatagtttatgtatctatgaatgaaaactacttattcttagaatgacagagggttctacattaattcggtcctaactttctgttttttaactattttatattatagcaattttatatatttgctaatagagagattagtataatacaatcatcatttttcctctttttatggttgcctataaattgtactgtctagatgtatgtaaactatctagcctatgtaagtcttggattagtcaacttttattgagtgaatgatgtagacagctgtcctcacttgacttctttaattgttatacacaaaatttcagtcttatttttattagactgttggaatgttgactatatgattgtatgtatgaccacagtctatacatataggctgtatgacctcactccttcttggcggccatggcagatttactgatctatcagataattgttttctgtggagctcagaatccattttaacatggtgttccagacaactgtcacaaaccaaccagagtggttatgggagccaaaatcaattttatttttttaaaattgtatgaaaatctttttaaaaagaatgtcatctttgctatttttttcccaaatatggtacatgctaagaataaaaatcaagaaaccagcacagaatctggttctagtgaaaagttcacagaaaaaaagtaaaatctcatctaaaattcttcctcccggctgggtgcagtggctcacatctgtaatcctagcagtttgggaggctgaggcaggtggatcacctgaggtcaggagtttgagaccagccagaccaacatggaaaaaccccatctctactaaagatacaaaattagccaggcatggtggcacatgcctataatcccaactactagggaggctgaggcaggagaattgcttgaacccaggaggtggaggttgcagtgagctgagatcgtgccactgcactctagcctgggcaacaagagtgaaactctgtttcaaaaaaaaaaaattattcctccaagagattagcattgtgatttttatagagtattgttttgtacacctgtctttgaaaacacaaattaagctgagtacaaataattttataaagatgggattttttatatgcagatcatttaaattataacattttttcttgaattgaatggaaggaagaaacagaatgaattgctgaacctcagattgtgtctttacaagggaatgtcattctttaaaggtacctcaaaggctaagaaaaacagtaaaaacctgcacgttgggcacatgtacgttgtgcacatatacctaaagtgtaataaaaataaaataaaataaaattatcattagt

SEQ ID NO: 417127 - DNA, 241 bp, Homo sapiens
attctttgcttttaggaaatccagtataggaaaatctaaagttggaaaacagataaccctcaaggtgattatttatatgatcaaataattggttactttccaaaagtccctttcaatgaaaaaaaaaaaaaacaataaaaaactaaatcaaatccataaatataaactaagtacctaatcttatgagcaagaaagaggagaatgaatatacaaagaagaccaagattaatttggggtattt

SEQ ID NO: 417128 - DNA, 3650 bp, Homo sapiens
  misc_feature (153)..(153): n is a, c, g, or t
  misc_feature (169)..(169): n is a, c, g, or t
gcgctcggcgcccaccaggcggacgcccaggagaacccctgcctccgtcgcggctcctggagagctgatcgttcacctgccccggcccgcctgaggacgggggtgccttcatgcggcccccacactcctcaccccgccgccgccgccgtcccngagctccgcacagtgngccccagccccagcagggcgcacaactttggaagtctcgcggcgctccgagaggcggcagagtccgcgccccagccccgggccgggccgggccagaaccgcagcgtctgggggaagccagagagtcggtaatcgcttcggggatgtaaggcgacagacataggacccccgagctcgcatcagcacccttcggctgcctcccggggtgggggcgggccccgcacacggtaagacctcttgctttcgctcaggctcaagattcaagatacagatattgatatgtatatatatatttaatttcctgtcatccttccaagttatcaggccaccgatgatttttgttctcccttcttgaagaataaatctctctttacccatcggctctccctactctctcccgccgcttagaaataaaacttggctgtattaggagctcggagcaagaaggcgcccaccgagagcgtctgaagcgcgagccaggcgcagttcgcgggacccgggccatgggccgctagcggtcctccagttcgggcccggcctccctgcggccccctccctatgtgagccgcagccaggcgagcggggcgccggaggaagaggaggacccacgggcgccgggccggaaggcagctggcagcaggcccaggccagcgggcgcccgcgttcatgttccgccaggagcagccgttggccgagggcagctttgcgcccatgggctccctgcagccggacgcgggcaacgcgagctggaacgggaccgaggcgccggggggcggcgcccgggccaccccttactccctgcaggtgacgctgacgctggtgtgcctggccggcctgctcatgctgctcaccgtgttcggcaacgtgctcgtcatcatcgccgtgttcacgagccgcgcgctcaaggcgccccaaaacctcttcctggtgtctctggcctcggccgacatcctggtggccacgctcgtcatccctttctcgctggccaacgaggtcatgggctactggtacttcggcaaggcttggtgcgagatctacctggcgctcgacgtgctcttctgcacgtcgtccatcgtgcacctgtgcgccatcagcctggaccgctactggtccatcacacaggccatcgagtacaacctgaagcgcacgccgcgccgcatcaaggccatcatcatcaccgtgtgggtcatctcggccgtcatctccttcccgccgctcatctccatcgagaagaagggcggcggcggcggcccgcagccggccgagccgcgctgcgagatcaacgaccagaagtggtacgtcatctcgtcgtgcatcggctccttcttcgctccctgcctcatcatgatcctggtctacgtgcgcatctaccagatcgccaagcgtcgcacccgcgtgccacccagccgccggggtccggacgccgtcgccgcgccgccggggggcaccgagcgcaggcccaacggtctgggccccgagcgcagcgcgggcccggggggcgcagaggccgaaccgctgcccacccagctcaacggcgcccctggcgagcccgcgccggccgggccgcgcgacaccgacgcgctggacctggaggagagctcgtcttccgaccacgccgagcggcctccagggccccgcagacccgagcgcggtccccggggcaaaggcaaggcccgagcgagccaggtgaagccgggcgacagcctgccgcggcgcgggccgggggcgacggggatcgggacgccggctgcagggccgggggaggagcgcgtcggggctgccaaggcgtcgcgctggcgcgggcggcagaaccgcgagaagcgcttcacgttcgtgctggccgtggtcatcggagtgttcgtggtgtgctggttccccttcttcttcacctacacgctcacggccgtcgggtgctccgtgccacgcacgctcttcaaattcttcttctggttcggctactgcaacagctcgttgaacccggtcatctacaccatcttcaaccacgatttccgccgcgccttcaagaagatcctctgtcggggggacaggaagcggatcgtgtgaggtttccgctggcgcccgcgtagactcacgctgactgcaggcagcggggggcatcgaggggtgcttagccccagggcactcagaaacccgggcgctgcctgctctgcgtttcctcgtctggggtggctctgcagcctcctgcgggcgggcgtctgctgctcctacaagggaagcttcttgctgccaggcccacacatccccagttgttggtttggccactcttgacctggagccatcttcctagtgggccacccctaatcactattgcttcctaaaggtattttcaccctcttcgcctggtacagccctcacagctcttcagagcaagcactggactacaagggcatggctcacaaaaggttaatggatgggggttacctagccctggctaattccccttccattcccaactctctctctctttttaaagaaaaatgctaagggcagccctgcctgccctccccatcccccgctgtaaatatacactatttttgatagcacacatggggcccccatatctcttggccttggttttgatgttgaaatcctggccttgggagagatgccttccaggcagacacagctgtctggttcaggccaagcccctttgcaatgcaagccctttctggtgttatgaagtccctctatgtcgtcgttttcaccagcaactggtgactgtcccttcgacacggacctgctttgagatttcctgacagggaaaagatttctgtccatttttttcctgtgcctaacagcataattgccttttcctatgtaaatattatgatggtggatcaagacataagtaaatgagcctttctgcctcacatcagccctgtgtataaagccattattctctgatgcactgtttgccccagtaactcactttaaaacctctctttccagtgttccctctctccctccagggccactgcttgaagaagaatatgtatgtttctatcttgtatgtctgtgtgcccctcctgccccgaaagtgctgactatggggaaatcttttagctgctgtttttagactccaaggagtggaaattatgtggaagaagcaaacctgatacaatttgcccaaggtaaacagtttgaaaagacaaatgggcctgccaaactgtacagtttcttccccaagagctgttaggtatcaaaatgttgtcctttcccccctccgtgcttttctggttgagatcatgtcattgatgaactgccaaagtcaggggaggagggcagagactttgtgtttacatctgcatttctacatgttttagacagagacaatttaaggcctgcactcttatttcactaaagaaaaactaatgtcagcacatgttgctaatgacagtggatttttttttaaataaaaaagtttacagatcaaatgtgaaataaatatgaatggagtggtc

SEQ ID NO: 417129 - DNA, 3741 bp, Homo sapiens
  misc_feature (153)..(153): n is a, c, g, or t
  misc_feature (169)..(169): n is a, c, g, or t
gcgctcggcgcccaccaggcggacgcccaggagaacccctgcctccgtcgcggctcctggagagctgatcgttcacctgccccggcccgcctgaggacgggggtgccttcatgcggcccccacactcctcaccccgccgccgccgccgtcccngagctccgcacagtgngccccagccccagcagggcgcacaactttggaagtctcgcggcgctccgagaggcggcagagtccgcgccccagccccgggccgggccgggccagaaccgcagcgtctgggggaagccagagagtcggtaatcgcttcggggatgtaaggcgacagacataggacccccgagctcgcatcagcacccttcggctgcctcccggggtgggggcgggccccgcacacggtaagacctcttgctttcgctcaggctcaagattcaagatacagatattgatatgtatatatatatttaatttcctgtcatccttccaagttatcaggccaccgatgatttttgttctcccttcttgaagaataaatctctctttacccatcggctctccctactctctcccgccgcttagaaataaaacttggctgtattaggagctcggagcaagaaggcgcccaccgagagcgtctgaagcgcgagccaggcgcagttcgcgggacccgggccatgggccgctagcggtcctccagttcgggcccggcctccctgcggccccctccctatgtgagccgcagccaggcgagcggggcgccggaggaagaggaggacccacgggcgccgggccggaaggcagctggcagcaggcccaggccagcgggcgcccgcgttcatgttccgccaggagcagccgttggccgagggcagctttgcgcccatgggctccctgcagccggacgcgggcaacgcgagctggaacgggaccgaggcgccggggggcggcgcccgggccaccccttactccctgcaggtgacgctgacgctggtgtgcctggccggcctgctcatgctgctcaccgtgttcggcaacgtgctcgtcatcatcgccgtgttcacgagccgcgcgctcaaggcgccccaaaacctcttcctggtgtctctggcctcggccgacatcctggtggccacgctcgtcatccctttctcgctggccaacgaggtcatgggctactggtacttcggcaaggcttggtgcgagatctacctggcgctcgacgtgctcttctgcacgtcgtccatcgtgcacctgtgcgccatcagcctggaccgctactggtccatcacacaggccatcgagtacaacctgaagcgcacgccgcgccgcatcaaggccatcatcatcaccgtgtgggtcatctcggccgtcatctccttcccgccgctcatctccatcgagaagaagggcggcggcggcggcccgcagccggccgagccgcgctgcgagatcaacgaccagaagtggtacgtcatctcgtcgtgcatcggctccttcttcgctccctgcctcatcatgatcctggtctacgtgcgcatctaccagatcgccaagcgtcgcacccgcgtgccacccagccgccggggtccggacgccgtcgccgcgccgccggggggcaccgagcgcaggcccaacggtctgggccccgagcgcagcgcgggcccggggggcgcagaggccgaaccgctgcccacccagctcaacggcgcccctggcgagcccgcgccggccgggccgcgcgacaccgacgcgctggacctggaggagagctcgtcttccgaccacgccgagcggcctccagggccccgcagacccgagcgcggtccccggggcaaaggcaaggcccgagcgagccaggtgaagccgggcgacagcctgccgcggcgcgggccgggggcgacggggatcgggacgccggctgcagggccgggggaggagcgcgtcggggctgccaaggcgtcgcgctggcgcgggcggcagaaccgcgagaagcgcttcacgttcgtgctggccgtggtcatcggagtgttcgtggtgtgctggttccccttcttcttcacctacacgctcacggccgtcgggtgctccgtgccacgcacgctcttcaaattcttcttctggttcggctactgcaacagctcgttgaacccggtcatctacaccatcttcaaccacgatttccgccgcgccttcaagaagatcctctgtcggggggacaggaagcggatcgtgtgaggtttccgctggcgcccgcgtagactcacgctgactgcaggcagcggggggcatcgaggggtgcttagccccagggcactcagaaacccgggcgctgcctgctctgcgtttcctcgtctggggtggctctgcagcctcctgcgggcgggcgtctgctgctcctacaagggaagcttcttgctgccaggcccacacatccccagttgttggtttggccactcttgacctggagccatcttcctagtgggccacccctaatcactattgcttcctaaaggtattttcaccctcttcgcctggtacagccctcacagctcttcagagcaagcactggactacaagggcatggctcacaaaaggttaatggatgggggttacctagccctggctaattccccttccattcccaactctctctctctttttaaagaaaaatgctaagggcagccctgcctgccctccccatcccccgctgtaaatatacactatttttgatagcacacatggggcccccatatctcttggccttggttttgatgttgaaatcctggccttgggagagatgccttccaggcagacacagctgtctggttcaggccaagcccctttgcaatgcaagccctttctggtgttatgaagtccctctatgtcgtcgttttcaccagcaactggtgactgtcccttcgacacggacctgctttgagatttcctgacagggaaaagatttctgtccatttttttcctgtgcctaacagcataattgccttttcctatgtaaatattatgatggtggatcaagacataagtaaatgagcctttctgcctcacatcagccctgtgtataaagccattattctctgatgcactgtttgccccagtaactcactttaaaacctctctttccagtgttccctctctccctccagggccactgcttgaagaagaatatgtatgtttctatcttgtatgtctgtgtgcccctcctgccccgaaagtgctgactatggggaaatcttttagctgctgtttttagactccaaggagtggaaattatgtggaagaagcaaacctgatacaatttgcccaaggtaaacagtttgaaaagacaaatgggcctgccaaactgtacagtttcttccccaagagctgttaggtatcaaaatgttgtcctttcccccctccgtgcttttctggttgagatcatgtcattgatgaactgccaaagtcaggggaggagggcagagactttgtgtttacatctgcatttctacatgttttagacagagacaatttaaggcctgcactcttatttcactaaagaaaaactaatgtcagcacatgttgctaatgacagtggatttttttttaaataaaaaagtttacagatcaaatgtgaaataaatatgaatggagtggtcctcttgtctgttatctgagttttcaaaagctttaagactctgggaacatctgattttatggattttttaaaaataaaaaatgtacattata

SEQ ID NO: 417130 - DNA, 3594 bp, Homo sapiens
  misc_feature (153)..(153): n is a, c, g, or t
  misc_feature (169)..(169): n is a, c, g, or t
gcgctcggcgcccaccaggcggacgcccaggagaacccctgcctccgtcgcggctcctggagagctgatcgttcacctgccccggcccgcctgaggacgggggtgccttcatgcggcccccacactcctcaccccgccgccgccgccgtcccngagctccgcacagtgngccccagccccagcagggcgcacaactttggaagtctcgcggcgctccgagaggcggcagagtccgcgccccagccccgggccgggccgggccagaaccgcagcgtctgggggaagccagagagtcggtaatcgcttcggggatgtaaggcgacagacataggacccccgagctcgcatcagcacccttcggctgcctcccggggtgggggcgggccccgcacacggtaagacctcttgctttcgctcaggctcaagattcaagatacagatattgatatgtatatatatatttaatttcctgtcatccttccaagttatcaggccaccgatgatttttgttctcccttcttgaagaataaatctctctttacccatcggctctccctactctctcccgccgcttagaaataaaacttggctgtattaggagctcggagcaagaaggcgcccaccgagagcgtctgaagcgcgagccaggcgcagttcgcgggacccgggccatgggccgctagcggtcctccagttcgggcccggcctccctgcggccccctccctatgtgagccgcagccaggcgagcggggcgccggaggaagaggaggacccacgggcgccgggccggaaggcagctggcagcaggcccaggccagcgggcgcccgcgttcatgttccgccaggagcagccgttggccgagggcagctttgcgcccatgggctccctgcagccggacgcgggcaacgcgagctggaacgggaccgaggcgccggggggcggcgcccgggccaccccttactccctgcaggtgacgctgacgctggtgtgcctggccggcctgctcatgctgctcaccgtgttcggcaacgtgctcgtcatcatcgccgtgttcacgagccgcgcgctcaaggcgccccaaaacctcttcctggtgtctctggcctcggccgacatcctggtggccacgctcgtcatccctttctcgctggccaacgaggtcatgggctactggtacttcggcaaggcttggtgcgagatctacctggcgctcgacgtgctcttctgcacgtcgtccatcgtgcacctgtgcgccatcagcctggaccgctactggtccatcacacaggccatcgagtacaacctgaagcgcacgccgcgccgcatcaaggccatcatcatcaccgtgtgggtcatctcggccgtcatctccttcccgccgctcatctccatcgagaagaagggcggcggcggcggcccgcagccggccgagccgcgctgcgagatcaacgaccagaagtggtacgtcatctcgtcgtgcatcggctccttcttcgctccctgcctcatcatgatcctggtctacgtgcgcatctaccagatcgccaagcgtcgcacccgcgtgccacccagccgccggggtccggacgccgtcgccgcgccgccggggggcaccgagcgcaggcccaacggtctgggccccgagcgcagcgcgggcccggggggcgcagaggccgaaccgctgcccacccagctcaacggcgcccctggcgagcccgcgccggccgggccgcgcgacaccgacgcgctggacctggaggagagctcgtcttccgaccacgccgagcggcctccagggccccgcagacccgagcgcggtccccggggcaaaggcaaggcccgagcgagccaggtgaagccgggcgacagcctgccgcggcgcgggccgggggcgacggggatcgggacgccggctgcagggccgggggaggagcgcgtcggggctgccaaggcgtcgcgctggcgcgggcggcagaaccgcgagaagcgcttcacgttcgtgctggccgtggtcatcggagtgttcgtggtgtgctggttccccttcttcttcacctacacgctcacggccgtcgggtgctccgtgccacgcacgctcttcaaattcttcttctggttcggctactgcaacagctcgttgaacccggtcatctacaccatcttcaaccacgatttccgccgcgccttcaagaagatcctctgtcggggggacaggaagcggatcgtgtgaggtttccgctggcgcccgcgtagactcacgctgactgcaggcagcggggggcatcgaggggtgcttagccccagggcactcagaaacccgggcgctgcctgctctgcgtttcctcgtctggggtggctctgcagcctcctgcgggcgggcgtctgctgctcctacaagggaagcttcttgctgccaggcccacacatccccagttgttggtttggccactcttgacctggagccatcttcctagtgggccacccctaatcactattgcttcctaaaggtattttcaccctcttcgcctggtacagccctcacagctcttcagagcaagcactggactacaagggcatggctcacaaaaggttaatggatgggggttacctagccctggctaattccccttccattcccaactctctctctctttttaaagaaaaatgctaagggcagccctgcctgccctccccatcccccgctgtaaatatacactatttttgatagcacacatggggcccccatatctcttggccttggttttgatgttgaaatcctggccttgggagagatgccttccaggcagacacagctgtctggttcaggccaagcccctttgcaatgcaagccctttctggtgttatgaagtccctctatgtcgtcgttttcaccagcaactggtgactgtcccttcgacacggacctgctttgagatttcctgacagggaaaagatttctgtccatttttttcctgtgcctaacagcataattgccttttcctatgtaaatattatgatggtggatcaagacataagtaaatgagcctttctgcctcacatcagccctgtgtataaagccattattctctgatgcactgtttgccccagtaactcactttatatgtatgtttctatcttgtatgtctgtgtgcccctcctgccccgaaagtgctgactatggggaaatcttttagctgctgtttttagactccaaggagtggaaattatgtggaagaagcaaacctgatacaatttgcccaaggtaaacagtttgaaaagacaaatgggcctgccaaactgtacagtttcttccccaagagctgttaggtatcaaaatgttgtcctttcccccctccgtgcttttctggttgagatcatgtcattgatgaactgccaaagtcaggggaggagggcagagactttgtgtttacatctgcatttctacatgttttagacagagacaatttaaggcctgcactcttatttcactaaagaaaaactaatgtcagcacatgttgctaatgacagtggatttttttttaaataaaaaagtttacagatcaaatgtgaaataaatatgaatggagtggtc

SEQ ID NO: 417131 - DNA, 3756 bp, Homo sapiens
agcgggtcagagtgagcccggatggggcggcgggcttcgggagcgcccgggctgatccgagccgagcgggccgtatctccttgtcggcgccgctgattcccggctctgcggaggcctctaggcagccgcgcagcttccgtgtttgctgcgcccgcactgcgatttacaaccctgaagaatctccctatccctattttgtccccctgcagtaataaatcccattatggagatctcgaaactttataaagggatatagtttgaattctatggagtgtaattttgtgtatgaattatatttttaaaacattgaagagttttcagaaagaaggctagtagagttgattactgatactttatgctaagcagtacttttttggtagtacaatattttgttaggcgtttctgataacactagaaaggacaagttttatcttgtgataaattgattaatgtttacaacatgactgataattatagctgaatagtccttaaatgatgaacaggttatttagtttttaaatgcagtgtaaaaagtgtgctgtggaaattttatggctaactaagtttatggagaaaataccttcagttgatcaagaataatagtggtatacaaagttaggaagaaagtcaacatgatgctgcaggaaatggaaacaaatacaaatgatatttaacaaagatagagtttacagtttttgaactttaagccaaattcatttgacatcaagcactatagcaggcacaggttcaacaaagcttgtgggtattgacttcccccaaaagttgtcagctgaagtaatttagcccacttaagtaaatactatgatgataagctgtgtgaacttagcttttaaatagtgtgaccatatgaaggttttaattacttttgtttattggaataaaatgagattttttgggttgtcatgttaaagtgcttatagggaaagaagcctgcatataattttttaccttgtggcataatcagtaattggtctgttattcaggcttcatagcttgtaaccaaatataaataaaaggcataatttaggtattctatagttgcttagaattttgttaatataaatctctgtgaaaaatcaaggagttttaatattttcagaagtgcatccacctttcagggctttaagttagtattactcaagattatgaacaaatagcacttaggttacctgaaagagttactacaaccccaaagagttgtgttctaagtagtatcttggtaattcagagagatactcatcctacctgaatataaactgagataaatccagtaaagaaagtgtagtaaattctacataagagtctatcattgatttctttttgtggtaaaaatcttagttcatgtgaagaaatttcatgtgaatgttttagctatcaaacagtactgtcacctactcatgcacaaaactgcctcccaaagacttttcccaggtccctcgtatcaaaacattaagagtataatggaagatagcacgatcttgtcagattggacaaacagcaacaaacaaaaaatgaagtatgacttttcctgtgaactctacagaatgtctacatattcaactttccccgccggggtgcctgtctcagaaaggagtcttgctcgtgctggtttttattatactggtgtgaatgacaaggtcaaatgcttctgttgtggcctgatgctggataactggaaactaggagacagtcctattcaaaagcataaacagctatatcctagctgtagctttattcagaatctggtttcagctagtctgggatccacctctaagaatacgtctccaatgagaaacagttttgcacattcattatctcccaccttggaacatagtagcttgttcagtggttcttactccagcctttctccaaaccctcttaattctagagcagttgaagacatctcttcatcgaggactaacccctacagttatgcaatgagtactgaagaagccagatttcttacctaccatatgtggccattaacttttttgtcaccatcagaattggcaagagctggtttttattatataggacctggagatagggtagcctgctttgcctgtggtgggaagctcagtaactgggaaccaaaggatgatgctatgtcagaacaccggaggcattttcccaactgtccatttttggaaaattctctagaaactctgaggtttagcatttcaaatctgagcatgcagacacatgcagctcgaatgagaacatttatgtactggccatctagtgttccagttcagcctgagcagcttgcaagtgctggtttttattatgtgggtcgcaatgatgatgtcaaatgcttttgttgtgatggtggcttgaggtgttgggaatctggagatgatccatgggtagaacatgccaagtggtttccaaggtgtgagttcttgatacgaatgaaaggccaagagtttgttgatgagattcaaggtagatatcctcatcttcttgaacagctgttgtcaacttcagataccactggagaagaaaatgctgacccaccaattattcattttggacctggagaaagttcttcagaagatgctgtcatgatgaatacacctgtggttaaatctgccttggaaatgggctttaatagagacctggtgaaacaaacagttcaaagtaaaatcctgacaactggagagaactataaaacagttaatgatattgtgtcagcacttcttaatgctgaagatgaaaaaagagaagaggagaaggaaaaacaagctgaagaaatggcatcagatgatttgtcattaattcggaagaacagaatggctctctttcaacaattgacatgtgtgcttcctatcctggataatcttttaaaggccaatgtaattaataaacaggaacatgatattattaaacaaaaaacacagatacctttacaagcgagagaactgattgataccattttggttaaaggaaatgctgcggccaacatcttcaaaaactgtctaaaagaaattgactctacattgtataagaacttatttgtggataagaatatgaagtatattccaacagaagatgtttcaggtctgtcactggaagaacaattgaggaggttgcaagaagaacgaacttgtaaagtgtgtatggacaaagaagtttctgttgtatttattccttgtggtcatctggtagtatgccaggaatgtgccccttctctaagaaaatgccctatttgcaggggtataatcaagggtactgttcgtacatttctctcttaaagaaaaatagtctatattttaacctgcataaaaaggtctttaaaatattgttgaacacttgaagccatctaaagtaaaaagggaattatgagtttttcaattagtaacattcatgttctagtctgctttggtactaataatcttgtttctgaaaagatggtatcatatatttaatcttaatctgtttatttacaagggaagatttatgtttggtgaactatattagtatgtatgtgtacctaagggagtagtgtcactgcttgttatgcatcatttcaggagttactggatttgttgttctttcagaaagctttgaatactaaattatagtgtagaaaagaactggaaaccaggaactctggagttcatcagagttatggtgccgaattgtctttggtgcttttcacttgtgttttaaaataaggatttttctcttatttctccccctagtttgtgagaaacatctcaataaagtgcttta

SEQ ID NO: 417132 - DNA, 3629 bp, Homo sapiens
gttttctaaaatactttttgttttttcttttcagatttacaaccctgaagaatctccctatccctattttgtccccctgcagtaataaatcccattatggagatctcgaaactttataaagggatatagtttgaattctatggagtgtaattttgtgtatgaattatatttttaaaacattgaagagttttcagaaagaaggctagtagagttgattactgatactttatgctaagcagtacttttttggtagtacaatattttgttaggcgtttctgataacactagaaaggacaagttttatcttgtgataaattgattaatgtttacaacatgactgataattatagctgaatagtccttaaatgatgaacaggttatttagtttttaaatgcagtgtaaaaagtgtgctgtggaaattttatggctaactaagtttatggagaaaataccttcagttgatcaagaataatagtggtatacaaagttaggaagaaagtcaacatgatgctgcaggaaatggaaacaaatacaaatgatatttaacaaagatagagtttacagtttttgaactttaagccaaattcatttgacatcaagcactatagcaggcacaggttcaacaaagcttgtgggtattgacttcccccaaaagttgtcagctgaagtaatttagcccacttaagtaaatactatgatgataagctgtgtgaacttagcttttaaatagtgtgaccatatgaaggttttaattacttttgtttattggaataaaatgagattttttgggttgtcatgttaaagtgcttatagggaaagaagcctgcatataattttttaccttgtggcataatcagtaattggtctgttattcaggcttcatagcttgtaaccaaatataaataaaaggcataatttaggtattctatagttgcttagaattttgttaatataaatctctgtgaaaaatcaaggagttttaatattttcagaagtgcatccacctttcagggctttaagttagtattactcaagattatgaacaaatagcacttaggttacctgaaagagttactacaaccccaaagagttgtgttctaagtagtatcttggtaattcagagagatactcatcctacctgaatataaactgagataaatccagtaaagaaagtgtagtaaattctacataagagtctatcattgatttctttttgtggtaaaaatcttagttcatgtgaagaaatttcatgtgaatgttttagctatcaaacagtactgtcacctactcatgcacaaaactgcctcccaaagacttttcccaggtccctcgtatcaaaacattaagagtataatggaagatagcacgatcttgtcagattggacaaacagcaacaaacaaaaaatgaagtatgacttttcctgtgaactctacagaatgtctacatattcaactttccccgccggggtgcctgtctcagaaaggagtcttgctcgtgctggtttttattatactggtgtgaatgacaaggtcaaatgcttctgttgtggcctgatgctggataactggaaactaggagacagtcctattcaaaagcataaacagctatatcctagctgtagctttattcagaatctggtttcagctagtctgggatccacctctaagaatacgtctccaatgagaaacagttttgcacattcattatctcccaccttggaacatagtagcttgttcagtggttcttactccagcctttctccaaaccctcttaattctagagcagttgaagacatctcttcatcgaggactaacccctacagttatgcaatgagtactgaagaagccagatttcttacctaccatatgtggccattaacttttttgtcaccatcagaattggcaagagctggtttttattatataggacctggagatagggtagcctgctttgcctgtggtgggaagctcagtaactgggaaccaaaggatgatgctatgtcagaacaccggaggcattttcccaactgtccatttttggaaaattctctagaaactctgaggtttagcatttcaaatctgagcatgcagacacatgcagctcgaatgagaacatttatgtactggccatctagtgttccagttcagcctgagcagcttgcaagtgctggtttttattatgtgggtcgcaatgatgatgtcaaatgcttttgttgtgatggtggcttgaggtgttgggaatctggagatgatccatgggtagaacatgccaagtggtttccaaggtgtgagttcttgatacgaatgaaaggccaagagtttgttgatgagattcaaggtagatatcctcatcttcttgaacagctgttgtcaacttcagataccactggagaagaaaatgctgacccaccaattattcattttggacctggagaaagttcttcagaagatgctgtcatgatgaatacacctgtggttaaatctgccttggaaatgggctttaatagagacctggtgaaacaaacagttcaaagtaaaatcctgacaactggagagaactataaaacagttaatgatattgtgtcagcacttcttaatgctgaagatgaaaaaagagaagaggagaaggaaaaacaagctgaagaaatggcatcagatgatttgtcattaattcggaagaacagaatggctctctttcaacaattgacatgtgtgcttcctatcctggataatcttttaaaggccaatgtaattaataaacaggaacatgatattattaaacaaaaaacacagatacctttacaagcgagagaactgattgataccattttggttaaaggaaatgctgcggccaacatcttcaaaaactgtctaaaagaaattgactctacattgtataagaacttatttgtggataagaatatgaagtatattccaacagaagatgtttcaggtctgtcactggaagaacaattgaggaggttgcaagaagaacgaacttgtaaagtgtgtatggacaaagaagtttctgttgtatttattccttgtggtcatctggtagtatgccaggaatgtgccccttctctaagaaaatgccctatttgcaggggtataatcaagggtactgttcgtacatttctctcttaaagaaaaatagtctatattttaacctgcataaaaaggtctttaaaatattgttgaacacttgaagccatctaaagtaaaaagggaattatgagtttttcaattagtaacattcatgttctagtctgctttggtactaataatcttgtttctgaaaagatggtatcatatatttaatcttaatctgtttatttacaagggaagatttatgtttggtgaactatattagtatgtatgtgtacctaagggagtagtgtcactgcttgttatgcatcatttcaggagttactggatttgttgttctttcagaaagctttgaatactaaattatagtgtagaaaagaactggaaaccaggaactctggagttcatcagagttatggtgccgaattgtctttggtgcttttcacttgtgttttaaaataaggatttttctcttatttctccccctagtttgtgagaaacatctcaataaagtgcttta

SEQ ID NO: 417133 - DNA, 4226 bp, Homo sapiens
agcgggtcagagtgagcccggatggggcggcgggcttcgggagcgcccgggctgatccgagccgagcgggccgtatctccttgtcggcgccgctgattcccggctctgcggaggcctctaggcagccgcgcagcttccgtgtttgctgcgcccgcactgcggtgagtgctgctccttccgggctcgggcggcgtggggcgggtggggacgcgagggcccgcgggggcccacttccctgatgtggcggccgaacgaggaaggacggggcctgaggcccttcggccaagggtcgagggtcgccgggggctctctgctttctactctcgccaaggttttattggattcggaagccccaacttcgagacttgcagtcaaagcgatttttaaaatgacttgttttcaagcctctggccgccgcccactcttctggcccttggactttgaccaagatgttttctcgcagtttttgcaaggttttaaacttagccctcggcgttcttttaatgtaatacattgaaacgaagatatttcggtggcggcgatatttcatatttcatagttgccactgcgctctgtcattccagtagtcgtctgttgtgtattgtgagaagcaactctgggaaattattggatttacaaccctgaagaatctccctatccctattttgtccccctgcagtaataaatcccattatggagatctcgaaactttataaagggatatagtttgaattctatggagtgtaattttgtgtatgaattatatttttaaaacattgaagagttttcagaaagaaggctagtagagttgattactgatactttatgctaagcagtacttttttggtagtacaatattttgttaggcgtttctgataacactagaaaggacaagttttatcttgtgataaattgattaatgtttacaacatgactgataattatagctgaatagtccttaaatgatgaacaggttatttagtttttaaatgcagtgtaaaaagtgtgctgtggaaattttatggctaactaagtttatggagaaaataccttcagttgatcaagaataatagtggtatacaaagttaggaagaaagtcaacatgatgctgcaggaaatggaaacaaatacaaatgatatttaacaaagatagagtttacagtttttgaactttaagccaaattcatttgacatcaagcactatagcaggcacaggttcaacaaagcttgtgggtattgacttcccccaaaagttgtcagctgaagtaatttagcccacttaagtaaatactatgatgataagctgtgtgaacttagcttttaaatagtgtgaccatatgaaggttttaattacttttgtttattggaataaaatgagattttttgggttgtcatgttaaagtgcttatagggaaagaagcctgcatataattttttaccttgtggcataatcagtaattggtctgttattcaggcttcatagcttgtaaccaaatataaataaaaggcataatttaggtattctatagttgcttagaattttgttaatataaatctctgtgaaaaatcaaggagttttaatattttcagaagtgcatccacctttcagggctttaagttagtattactcaagattatgaacaaatagcacttaggttacctgaaagagttactacaaccccaaagagttgtgttctaagtagtatcttggtaattcagagagatactcatcctacctgaatataaactgagataaatccagtaaagaaagtgtagtaaattctacataagagtctatcattgatttctttttgtggtaaaaatcttagttcatgtgaagaaatttcatgtgaatgttttagctatcaaacagtactgtcacctactcatgcacaaaactgcctcccaaagacttttcccaggtccctcgtatcaaaacattaagagtataatggaagatagcacgatcttgtcagattggacaaacagcaacaaacaaaaaatgaagtatgacttttcctgtgaactctacagaatgtctacatattcaactttccccgccggggtgcctgtctcagaaaggagtcttgctcgtgctggtttttattatactggtgtgaatgacaaggtcaaatgcttctgttgtggcctgatgctggataactggaaactaggagacagtcctattcaaaagcataaacagctatatcctagctgtagctttattcagaatctggtttcagctagtctgggatccacctctaagaatacgtctccaatgagaaacagttttgcacattcattatctcccaccttggaacatagtagcttgttcagtggttcttactccagcctttctccaaaccctcttaattctagagcagttgaagacatctcttcatcgaggactaacccctacagttatgcaatgagtactgaagaagccagatttcttacctaccatatgtggccattaacttttttgtcaccatcagaattggcaagagctggtttttattatataggacctggagatagggtagcctgctttgcctgtggtgggaagctcagtaactgggaaccaaaggatgatgctatgtcagaacaccggaggcattttcccaactgtccatttttggaaaattctctagaaactctgaggtttagcatttcaaatctgagcatgcagacacatgcagctcgaatgagaacatttatgtactggccatctagtgttccagttcagcctgagcagcttgcaagtgctggtttttattatgtgggtcgcaatgatgatgtcaaatgcttttgttgtgatggtggcttgaggtgttgggaatctggagatgatccatgggtagaacatgccaagtggtttccaaggtgtgagttcttgatacgaatgaaaggccaagagtttgttgatgagattcaaggtagatatcctcatcttcttgaacagctgttgtcaacttcagataccactggagaagaaaatgctgacccaccaattattcattttggacctggagaaagttcttcagaagatgctgtcatgatgaatacacctgtggttaaatctgccttggaaatgggctttaatagagacctggtgaaacaaacagttcaaagtaaaatcctgacaactggagagaactataaaacagttaatgatattgtgtcagcacttcttaatgctgaagatgaaaaaagagaagaggagaaggaaaaacaagctgaagaaatggcatcagatgatttgtcattaattcggaagaacagaatggctctctttcaacaattgacatgtgtgcttcctatcctggataatcttttaaaggccaatgtaattaataaacaggaacatgatattattaaacaaaaaacacagatacctttacaagcgagagaactgattgataccattttggttaaaggaaatgctgcggccaacatcttcaaaaactgtctaaaagaaattgactctacattgtataagaacttatttgtggataagaatatgaagtatattccaacagaagatgtttcaggtctgtcactggaagaacaattgaggaggttgcaagaagaacgaacttgtaaagtgtgtatggacaaagaagtttctgttgtatttattccttgtggtcatctggtagtatgccaggaatgtgccccttctctaagaaaatgccctatttgcaggggtataatcaagggtactgttcgtacatttctctcttaaagaaaaatagtctatattttaacctgcataaaaaggtctttaaaatattgttgaacacttgaagccatctaaagtaaaaagggaattatgagtttttcaattagtaacattcatgttctagtctgctttggtactaataatcttgtttctgaaaagatggtatcatatatttaatcttaatctgtttatttacaagggaagatttatgtttggtgaactatattagtatgtatgtgtacctaagggagtagtgtcactgcttgttatgcatcatttcaggagttactggatttgttgttctttcagaaagctttgaatactaaattatagtgtagaaaagaactggaaaccaggaactctggagttcatcagagttatggtgccgaattgtctttggtgcttttcacttgtgttttaaaataaggatttttctcttatttctccccctagtttgtgagaaacatctcaataaagtgcttta

SEQ ID NO: 417134 - DNA, 3702 bp, Homo sapiens
agcgggtcagagtgagcccggatggggcggcgggcttcgggagcgcccgggctgatccgagccgagcgggccgtatctccttgtcggcgccgctgattcccggctctgcggaggcctctaggcagccgcgcagcttccgtgtttgctgcgcccgcactgcgatttacaaccctgaagaatctccctatccctattttgtccccctgcagtaataaatcccattatggagatctcgaaactttataaagggatatagtttgaattctatggagtgtaattttgtgtatgaattatatttttaaaacattgaagagttttcagaaagaaggctagtagagttgattactgatactttatgctaagcagtacttttttggtagtacaatattttgttaggcgtttctgataacactagaaaggacaagttttatcttgtgataaattgattaatgtttacaacatgactgataattatagctgaatagtccttaaatgatgaacaggttatttagtttttaaatgcagtgtaaaaagtgtgctgtggaaattttatggctaactaagtttatggagaaaataccttcagttgatcaagaataatagtggtatacaaagttaggaagaaagtcaacatgatgctgcaggaaatggaaacaaatacaaatgatatttaacaaagatagagtttacagtttttgaactttaagccaaattcatttgacatcaagcactatagcaggcacaggttcaacaaagcttgtgggtattgacttcccccaaaagttgtcagctgaagtaatttagcccacttaagtaaatactatgatgataagctgtgtgaacttagcttttaaatagtgtgaccatatgaaggttttaattacttttgtttattggaataaaatgagattttttgggttgtcatgttaaagtgcttatagggaaagaagcctgcatataattttttaccttgtggcataatcagtaattggtctgttattcaggcttcatagcttgtaaccaaatataaataaaaggcataatttaggtattctatagttgcttagaattttgttaatataaatctctgtgaaaaatcaaggagttttaatattttcagaagtgcatccacctttcagggctttaagttagtattactcaagattatgaacaaatagcacttaggttacctgaaagagttactacaaccccaaagagttgtgttctaagtagtatcttggtaattcagagagatactcatcctacctgaatataaactgagataaatccagtaaagaaagtgtagtaaattctacataagagtctatcattgatttctttttgtggtaaaaatcttagttcatgtgaagaaatttcatgtgaatgttttagctatcaaacagtactgtcacctactcatgcacaaaactgcctcccaaagacttttcccaggtccctcgtatcaaaacattaagagtataatggaagatagcacgatcttgtcagattggacaaacagcaacaaacaaaaaatgaagtatgacttttcctgtgaactctacagaatgtctacatattcaactttccccgccggggtgcctgtctcagaaaggagtcttgctcgtgctggtttttattatactggtgtgaatgacaaggtcaaatgcttctgttgtggcctgatgctggataactggaaactaggagacagtcctattcctagtctgggatccacctctaagaatacgtctccaatgagaaacagttttgcacattcattatctcccaccttggaacatagtagcttgttcagtggttcttactccagcctttctccaaaccctcttaattctagagcagttgaagacatctcttcatcgaggactaacccctacagttatgcaatgagtactgaagaagccagatttcttacctaccatatgtggccattaacttttttgtcaccatcagaattggcaagagctggtttttattatataggacctggagatagggtagcctgctttgcctgtggtgggaagctcagtaactgggaaccaaaggatgatgctatgtcagaacaccggaggcattttcccaactgtccatttttggaaaattctctagaaactctgaggtttagcatttcaaatctgagcatgcagacacatgcagctcgaatgagaacatttatgtactggccatctagtgttccagttcagcctgagcagcttgcaagtgctggtttttattatgtgggtcgcaatgatgatgtcaaatgcttttgttgtgatggtggcttgaggtgttgggaatctggagatgatccatgggtagaacatgccaagtggtttccaaggtgtgagttcttgatacgaatgaaaggccaagagtttgttgatgagattcaaggtagatatcctcatcttcttgaacagctgttgtcaacttcagataccactggagaagaaaatgctgacccaccaattattcattttggacctggagaaagttcttcagaagatgctgtcatgatgaatacacctgtggttaaatctgccttggaaatgggctttaatagagacctggtgaaacaaacagttcaaagtaaaatcctgacaactggagagaactataaaacagttaatgatattgtgtcagcacttcttaatgctgaagatgaaaaaagagaagaggagaaggaaaaacaagctgaagaaatggcatcagatgatttgtcattaattcggaagaacagaatggctctctttcaacaattgacatgtgtgcttcctatcctggataatcttttaaaggccaatgtaattaataaacaggaacatgatattattaaacaaaaaacacagatacctttacaagcgagagaactgattgataccattttggttaaaggaaatgctgcggccaacatcttcaaaaactgtctaaaagaaattgactctacattgtataagaacttatttgtggataagaatatgaagtatattccaacagaagatgtttcaggtctgtcactggaagaacaattgaggaggttgcaagaagaacgaacttgtaaagtgtgtatggacaaagaagtttctgttgtatttattccttgtggtcatctggtagtatgccaggaatgtgccccttctctaagaaaatgccctatttgcaggggtataatcaagggtactgttcgtacatttctctcttaaagaaaaatagtctatattttaacctgcataaaaaggtctttaaaatattgttgaacacttgaagccatctaaagtaaaaagggaattatgagtttttcaattagtaacattcatgttctagtctgctttggtactaataatcttgtttctgaaaagatggtatcatatatttaatcttaatctgtttatttacaagggaagatttatgtttggtgaactatattagtatgtatgtgtacctaagggagtagtgtcactgcttgttatgcatcatttcaggagttactggatttgttgttctttcagaaagctttgaatactaaattatagtgtagaaaagaactggaaaccaggaactctggagttcatcagagttatggtgccgaattgtctttggtgcttttcacttgtgttttaaaataaggatttttctcttatttctccccctagtttgtgagaaacatctcaataaagtgcttta

SEQ ID NO: 417135 - DNA, 3850 bp, Homo sapiens
agcgggtcagagtgagcccggatggggcggcgggcttcgggagcgcccgggctgatccgagccgagcgggccgtatctccttgtcggcgccgctgattcccggctctgcggaggcctctaggcagccgcgcagcttccgtgtttgctgcgcccgcactgcgatttacaaccctgaagaatctccctatccctattttgtccccctgcagtaataaatcccattatggagatctcgaaactttataaagggatatagtttgaattctatggagtgtaattttgtgtatgaattatatttttaaaacattgaagagttttcagaaagaaggctagtagagttgattactgatactttatgctaagcagtacttttttggtagtacaatattttgttaggcgtttctgataacactagaaaggacaagttttatcttgtgataaattgattaatgtttacaacatgactgataattatagctgaatagtccttaaatgatgaacaggttatttagtttttaaatgcagtgtaaaaagtgtgctgtggaaattttatggctaactaagtttatggagaaaataccttcagttgatcaagaataatagtggtatacaaagttaggaagaaagtcaacatgatgctgcaggaaatggaaacaaatacaaatgatatttaacaaagatagagtttacagtttttgaactttaagccaaattcatttgacatcaagcactatagcaggcacaggttcaacaaagcttgtgggtattgacttcccccaaaagttgtcagctgaagtaatttagcccacttaagtaaatactatgatgataagctgtgtgaacttagcttttaaatagtgtgaccatatgaaggttttaattacttttgtttattggaataaaatgagattttttgggttgtcatgttaaagtgcttatagggaaagaagcctgcatataattttttaccttgtggcataatcagtaattggtctgttattcaggcttcatagcttgtaaccaaatataaataaaaggcataatttaggtattctatagttgcttagaattttgttaatataaatctctgtgaaaaatcaaggagttttaatattttcagaagtgcatccacctttcagggctttaagttagtattactcaagattatgaacaaatagcacttaggttacctgaaagagttactacaaccccaaagagttgtgttctaagtagtatcttggtaattcagagagatactcatcctacctgaatataaactgagataaatccagtaaagaaagtgtagtaaattctacataagagtctatcattgatttctttttgtggtaaaaatcttagttcatgtgaagaaatttcatgtgaatgttttagctatcaaacagtactgtcacctactcatgcacaaaactgcctcccaaagacttttcccaggtccctcgtatcaaaacattaagagtataatggaagatagcacgatcttgtcagattggacaaacagcaacaaacaaaaaatgaagtatgacttttcctgtgaactctacagaatgtctacatattcaactttccccgccggggtgcctgtctcagaaaggagtcttgctcgtgctggtttttattatactggtgtgaatgacaaggtcaaatgcttctgttgtggcctgatgctggataactggaaactaggagacagtcctattcaaaagcataaacagctatatcctagctgtagctttattcagaatctggtttcagctagtctgggatccacctctaagaatacgtctccaatgagaaacagttttgcacattcattatctcccaccttggaacatagtagcttgttcagtggttcttactccagcctttctccaaaccctcttaattctagagcagttgaagacatctcttcatcgaggactaacccctacagttatgcaatgagtactgaagaagccagatttcttacctaccatatgtggccattaacttttttgtcaccatcagaattggcaagagctggtttttattatataggacctggagatagggtagcctgctttgcctgtggtgggaagctcagtaactgggaaccaaaggatgatgctatgtcagaacaccggaggcattttcccaactgtccatttttggaaaattctctagaaactctgaggtttagcatttcaaatctgagcatgcagacacatgcagctcgaatgagaacatttatgtactggccatctagtgttccagttcagcctgagcagcttgcaagtgctggtttttattatgtgggtaagaagcaaataactatacattttatcattttattttaatttacatattagaacatacgtgttttcaatatttagtcttttttttcctgaaggtcgcaatgatgatgtcaaatgcttttgttgtgatggtggcttgaggtgttgggaatctggagatgatccatgggtagaacatgccaagtggtttccaaggtgtgagttcttgatacgaatgaaaggccaagagtttgttgatgagattcaaggtagatatcctcatcttcttgaacagctgttgtcaacttcagataccactggagaagaaaatgctgacccaccaattattcattttggacctggagaaagttcttcagaagatgctgtcatgatgaatacacctgtggttaaatctgccttggaaatgggctttaatagagacctggtgaaacaaacagttcaaagtaaaatcctgacaactggagagaactataaaacagttaatgatattgtgtcagcacttcttaatgctgaagatgaaaaaagagaagaggagaaggaaaaacaagctgaagaaatggcatcagatgatttgtcattaattcggaagaacagaatggctctctttcaacaattgacatgtgtgcttcctatcctggataatcttttaaaggccaatgtaattaataaacaggaacatgatattattaaacaaaaaacacagatacctttacaagcgagagaactgattgataccattttggttaaaggaaatgctgcggccaacatcttcaaaaactgtctaaaagaaattgactctacattgtataagaacttatttgtggataagaatatgaagtatattccaacagaagatgtttcaggtctgtcactggaagaacaattgaggaggttgcaagaagaacgaacttgtaaagtgtgtatggacaaagaagtttctgttgtatttattccttgtggtcatctggtagtatgccaggaatgtgccccttctctaagaaaatgccctatttgcaggggtataatcaagggtactgttcgtacatttctctcttaaagaaaaatagtctatattttaacctgcataaaaaggtctttaaaatattgttgaacacttgaagccatctaaagtaaaaagggaattatgagtttttcaattagtaacattcatgttctagtctgctttggtactaataatcttgtttctgaaaagatggtatcatatatttaatcttaatctgtttatttacaagggaagatttatgtttggtgaactatattagtatgtatgtgtacctaagggagtagtgtcactgcttgttatgcatcatttcaggagttactggatttgttgttctttcagaaagctttgaatactaaattatagtgtagaaaagaactggaaaccaggaactctggagttcatcagagttatggtgccgaattgtctttggtgcttttcacttgtgttttaaaataaggatttttctcttatttctccccctagtttgtgagaaacatctcaataaagtgcttta

SEQ ID NO: 417136 - DNA, 1486 bp, Homo sapiens
ctataatgtctggccctctattgaacaagcactgagctgagtgggttatatgtgggtcgcagatatgtcctgcttgtgtgatgtgctaggtgttgggaatctggagatgatccatgggtagaacatgccaagtggtttccaaggtgtgagttcttgatacgaatgaaaggccaagagtttgttgatgagattcaaggtagatatcctcatcttcttgaacagctgttgtcaacttcagataccactggagaagaaaatgctgacccaccaattattcattttggacctggagaaagttcttcagaagatgctgtcatgatgaatacacctgtggttaaatctgccttggaaatgggctttaatagagacctggtgaaacaaacagttcaaagtaaaatcctgacaactggagagaactataaaacagttaatgatattgtgtcagcacttcttaatgctgaagatgaaaaaagagaagaggagaaggaaaaacaagctgaagaaatggcatcagatgatttgtcattaattcggaagaacagaatggctctctttcaacaattgacatgtgtgcttcctatcctggataatcttttaaaggccaatgtaattaataaacaggaacatgatattattaaacaaaaaacacagatacctttacaagcgagagaactgattgataccattttggttaaaggaaatgctgcggccaacatcttcaaaaactgtctaaaagaaattgactctacattgtataagaacttatttgtggataagaatatgaagtatattccaacagaagatgtttcaggtctgtcactggaagaacaattgaggaggttgcaagaagaacgaacttgtaaagtgtgtatggacaaagaagtttctgttgtatttattccttgtggtcatctggtagtatgccaggaatgtgccccttctctaagaaaatgccctatttgcaggggtataatcaagggtactgttcgtacatttctctcttaaagaaaaatagtctatattttaacctgcataaaaaggtctttaaaatattgttgaacacttgaagccatctaaagtaaaaagggaattatgagtttttcaattagtaacattcatgttctagtctgctttggtactaataatcttgtttctgaaaagatggtatcatatatttaatcttaatctgtttatttacaagggaagatttatgtttggtgaactatattagtatgtatgtgtacctaagggagtagtgtcactgcttgttatgcatcatttcaggagttactggatttgttgttctttcagaaagctttgaatactaaattatagtgtagaaaagaactggaaaccaggaactctggagttcatcagagttatggtgccgaattgtctttggtgcttttcacttgtgttttaaaataaggatttttctcttatttctccccctagtttgtgagaaacatctcaataaagtgcttta

SEQ ID NO: 417137 - DNA, 1504 bp, Homo sapiens
agcgggtcagagtgagcccggatggggcggcgggcttcgggagcgcccgggctgatccgagccgagcgggccgtatctccttgtcggcgccgctgattcccggctctgcggaggcctctaggcagccgcgcagcttccgtgtttgctgcgcccgcactgcggtgtgagttcttgatacgaatgaaaggccaagagtttgttgatgagattcaaggtagatatcctcatcttcttgaacagctgttgtcaacttcagataccactggagaagaaaatgctgacccaccaattattcattttggacctggagaaagttcttcagaagatgctgtcatgatgaatacacctgtggttaaatctgccttggaaatgggctttaatagagacctggtgaaacaaacagttcaaagtaaaatcctgacaactggagagaactataaaacagttaatgatattgtgtcagcacttcttaatgctgaagatgaaaaaagagaagaggagaaggaaaaacaagctgaagaaatggcatcagatgatttgtcattaattcggaagaacagaatggctctctttcaacaattgacatgtgtgcttcctatcctggataatcttttaaaggccaatgtaattaataaacaggaacatgatattattaaacaaaaaacacagatacctttacaagcgagagaactgattgataccattttggttaaaggaaatgctgcggccaacatcttcaaaaactgtctaaaagaaattgactctacattgtataagaacttatttgtggataagaatatgaagtatattccaacagaagatgtttcaggtctgtcactggaagaacaattgaggaggttgcaagaagaacgaacttgtaaagtgtgtatggacaaagaagtttctgttgtatttattccttgtggtcatctggtagtatgccaggaatgtgccccttctctaagaaaatgccctatttgcaggggtataatcaagggtactgttcgtacatttctctcttaaagaaaaatagtctatattttaacctgcataaaaaggtctttaaaatattgttgaacacttgaagccatctaaagtaaaaagggaattatgagtttttcaattagtaacattcatgttctagtctgctttggtactaataatcttgtttctgaaaagatggtatcatatatttaatcttaatctgtttatttacaagggaagatttatgtttggtgaactatattagtatgtatgtgtacctaagggagtagtgtcactgcttgttatgcatcatttcaggagttactggatttgttgttctttcagaaagctttgaatactaaattatagtgtagaaaagaactggaaaccaggaactctggagttcatcagagttatggtgccgaattgtctttggtgcttttcacttgtgttttaaaataaggatttttctcttatttctccccctagtttgtgagaaacatctcaataaagtgcttta

SEQ ID NO: 417138 - DNA, 3484 bp, Homo sapiens
agcgggtcagagtgagcccggatggggcggcgggcttcgggagcgcccgggctgatccgagccgagcgggccgtatctccttgtcggcgccgctgattcccggctctgcggaggcctctaggcagccgcgcagcttccgtgtttgctgcgcccgcactgcgatttacaaccctgaagaatctccctatccctattttgtccccctgcagtaataaatcccattatggagatctcgaaactttataaagggatatagtttgaattctatggagtgtaattttgtgtatgaattatatttttaaaacattgaagagttttcagaaagaaggctagtagagttgattactgatactttatgctaagcagtacttttttggtagtacaatattttgttaggcgtttctgataacactagaaaggacaagttttatcttgtgataaattgattaatgtttacaacatgactgataattatagctgaatagtccttaaatgatgaacaggttatttagtttttaaatgcagtgtaaaaagtgtgctgtggaaattttatggctaactaagtttatggagaaaataccttcagttgatcaagaataatagtggtatacaaagttaggaagaaagtcaacatgatgctgcaggaaatggaaacaaatacaaatgatatttaacaaagatagagtttacagtttttgaactttaagccaaattcatttgacatcaagcactatagcaggcacaggttcaacaaagcttgtgggtattgacttcccccaaaagttgtcagctgaagtaatttagcccacttaagtaaatactatgatgataagctgtgtgaacttagcttttaaatagtgtgaccatatgaaggttttaattacttttgtttattggaataaaatgagattttttgggttgtcatgttaaagtgcttatagggaaagaagcctgcatataattttttaccttgtggcataatcagtaattggtctgttattcaggcttcatagcttgtaaccaaatataaataaaaggcataatttaggtattctatagttgcttagaattttgttaatataaatctctgtgaaaaatcaaggagttttaatattttcagaagtgcatccacctttcagggctttaagttagtattactcaagattatgaacaaatagcacttaggttacctgaaagagttactacaaccccaaagagttgtgttctaagtagtatcttggtaattcagagagatactcatcctacctgaatataaactgagataaatccagtaaagaaagtgtagtaaattctacataagagtctatcattgatttctttttgtggtaaaaatcttagttcatgtgaagaaatttcatgtgaatgttttagctatcaaacagtactgtcacctactcatgcacaaaactgcctcccaaagacttttcccaggtccctcgtatcaaaacattaagagtataatggaagatagcacgatcttgtcagattggacaaacagcaacaaacaaaaaatgaagtatgacttttcctgtgaactctacagaatgtctacatattcaactttccccgccggggtgcctgtctcagaaaggagtcttgctcgtgctggtttttattatactggtgtgaatgacaaggtcaaatgcttctgttgtggcctgatgctggataactggaaactaggagacagtcctattcaaaagcataaacagctatatcctagctgtagctttattcagaatctggtttcagctagtctgggatccacctctaagaatacgtctccaatgagaaacagttttgcacattcattatctcccaccttggaacatagtagcttgttcagtggttcttactccagcctttctccaaaccctcttaattctagagcagttgaagacatctcttcatcgaggactaacccctacagttatgcaatgagtactgaagaagccagatttcttacctaccatatgtggccattaacttttttgtcaccatcagaattggcaagagctggtttttattatataggacctggagatagggtagcctgctttgcctgtggtgggaagctcagtaactgggaaccaaaggatgatgctatgtcagaacaccggaggcattttcccaactgtccatttttggaaaattctctagaaactctgaggtttagcatttcaaatctgagcatgcagacacatgcagctcgaatgagaacatttatgtactggccatctagtgttccagttcagcctgagcagcttgcaagtgctggtttttattatgtgggtcgcaatgatgatgtcaaatgcttttgttgtgatggtggcttgaggtgttgggaatctggagatgatccatgggtagaacatgccaagtggtttccaaggtgtgagttcttgatacgaatgaaaggccaagagtttgttgatgagattcaaggtagatatcctcatcttcttgaacagctgttgtcaacttcagataccactggagaagaaaatgctgacccaccaattattcattttggacctggagaaagttcttcagaagatgctgtcatgatgaatacacctgtggttaaatctgccttggaaatgggctttaatagagacctggtgaaacaaacagttcaaagtaaaatcctgacaactggagagaactataaaacagttaatgatattgtgtcagcacttcttaatgctgaagatgaaaaaagagaagaggagaaggaaaaacaagctgaagaaatggcatcagatgatttgtcattaattcggaagaacagaatggctctctttcaacaattgacatgtgtgcttcctatcctggataatcttttaaaggccaatgtaattaataaacaggaacatgatattattaaacaaaaaacacagatacctttacaagcgagagaactgattgataccattttggttaaaggaaatgctgcggccaacatcttcaaaaactgtctaaaagaaattgactctacattgtataagaacttatttgtggataagaatatgaagtatattccaacagaagatgtttcaggtctgtcactggaagaacaattgaggaggttgcaagaagaacgaacttgtaaagtgtgtatggacaaagaagtttctgttgtatttattccttgtggtcatctggtagtatgccaggaatgtgccccttctctaagaaaatgccctatttgcaggggtataatcaagggtactgttcgtacatttctctcttaaagaaaaatagtctatattttaacctgcggattggcgaccatttcaaccaatagacctggccgtacgcctaaccactaacattactgcagcacacctactcatgcacctaattggaagcgccaccctagcaatatcaaccattaaccttccctctacacttatcatcttcacaattctaattctactgactatccttgaaatgtccccat

SEQ ID NO: 417139 - DNA, 971 bp, Homo sapiens
cgactcagccattattcggagaggaacatatgggctctcttcacccaatcgacatgtgagctctctatcgtgaatgggaccttagacgtctttgcatttacttgacagaagcatgatgttgttgcacaacctcggccatacctttgcctgcagagagaactgagggttccttatgggccatcggatatgctgtgtttctcatttttactgactgggtacttgactttgactgtacatggtctcataactgattactggacacgagtataaggactctccgacagaagatggttcatgtctgtcactggaagaacaattgaggaggttgcaagaagaacgaacttgtaaagtgtgtatggacaaagaagtttctgttgtatttattccttgtggtcatctggtagtatgccaggaatgtgccccttctctaagaaaatgccctatttgcaggggtataatcaagggtactgttcgtacatttctctcttaaagaaaaatagtctatattttaacctgcataaaaaggtctttaaaatattgttgaacacttgaagccatctaaagtaaaaagggaattatgagtttttcaattagtaacattcatgttctagtctgctttggtactaataatcttgtttctgaaaagatggtatcatatatttaatcttaatctgtttatttacaagggaagatttatgtttggtgaactatattagtatgtatgtgtacctaagggagtagtgtcactgcttgttatgcatcatttcaggagttactggatttgttgttctttcagaaagctttgaatactaaattatagtgtagaaaagaactggaaaccaggaactctggagttcatcagagttatggtgccgaattgtctttggtgcttttcacttgtgttttaaaataaggatttttctcttatttctccccctagtttgtgagaaacatctcaataaagtgcttta

SEQ ID NO: 417140 - DNA, 1111 bp, Homo sapiens
agcgggtcagagtgagcccggatggggcggcgggcttcgggagcgcccgggctgatccgagccgagcgggccgtatctccttgtcggcgccgctgattcccggctctgcggaggcctctaggcagccgcgcagcttccgtgtttgctgcgcccgcactgcggtgagtgctgctccttccgggctcgggcggcgtggggcgggtggggacgcgagggcccgcgggggcccacttccctgatgtggcggccgaacgaggaaggacggggcctgaggcccttcggccaagggtcgagggtcgccgggggctctctgctttctactctcgccaaggttttattggattcggaagccccaacttcgagacttgcagtcaaagcgatttttaaaatgacttgttttcaagcctctggccgccgcccactcttctggcccttggactttgaccaagatgttttctcgcagtttttgcaaggttttaaacttagccctcggcgttcttttaatgtaatacattgaaacgaagatatttcggtggcggcgatatttcatatttcatagttgccactgcgctctgtcattccagtagtcgtctgttgtgtattgtgagaagcaactctgggaaattattgggtaaatcccatagtttctattcttttcccttccatcctatcccctgcccagctgcaatttgcgtaaagagaatgcagcagtgcggtgcacgtagataaaaatctttcatttaaagataggatataagaccgggtgtaattaaagcaatcatgccagtggtcgtagtgccggagccactgtttcacaggccactgtgttaggttttgttttcgagttgctttctgtggtcgttgctttgaaattgtaagggaatggcagagtttaagagtttatattaatgaactcgtggtgcattttactgcagttttcctagtcgtggagagacttgatattacaaactaacgttgctgtcttaattcctgctgtactgctgctgacagggtgtagtggagtgtctgtctgtctttttaaccaatgtgcctttgcctccagcagagtgccagagttacctttaggccagaaaaggggaggagagcaagg

SEQ ID NO: 417141 - DNA, 3703 bp, Homo sapiens
agcgggtcagagtgagcccggatggggcggcgggcttcgggagcgcccgggctgatccgagccgagcgggccgtatctccttgtcggcgccgctgattcccggctctgcggaggcctctaggcagccgcgcagcttccgtgtttgctgcgcccgcactgcgatttacaaccctgaagaatctccctatccctattttgtccccctgcagtaataaatcccattatggagatctcgaaactttataaagggatatagtttgaattctatggagtgtaattttgtgtatgaattatatttttaaaacattgaagagttttcagaaagaaggctagtagagttgattactgatactttatgctaagcagtacttttttggtagtacaatattttgttaggcgtttctgataacactagaaaggacaagttttatcttgtgataaattgattaatgtttacaacatgactgataattatagctgaatagtccttaaatgatgaacaggttatttagtttttaaatgcagtgtaaaaagtgtgctgtggaaattttatggctaactaagtttatggagaaaataccttcagttgatcaagaataatagtggtatacaaagttaggaagaaagtcaacatgatgctgcaggaaatggaaacaaatacaaatgatatttaacaaagatagagtttacagtttttgaactttaagccaaattcatttgacatcaagcactatagcaggcacaggttcaacaaagcttgtgggtattgacttcccccaaaagttgtcagctgaagtaatttagcccacttaagtaaatactatgatgataagctgtgtgaacttagcttttaaatagtgtgaccatatgaaggttttaattacttttgtttattggaataaaatgagattttttgggttgtcatgttaaagtgcttatagggaaagaagcctgcatataattttttaccttgtggcataatcagtaattggtctgttattcaggcttcatagcttgtaaccaaatataaataaaaggcataatttaggtattctatagttgcttagaattttgttaatataaatctctgtgaaaaatcaaggagttttaatattttcagaagtgcatccacctttcagggctttaagttagtattactcaagattatgaacaaatagcacttaggttacctgaaagagttactacaaccccaaagagttgtgttctaagtagtatcttggtaattcagagagatactcatcctacctgaatataaactgagataaatccagtaaagaaagtgtagtaaattctacataagagtctatcattgatttctttttgtggtaaaaatcttagttcatgtgaagaaatttcatgtgaatgttttagctatcaaacagtactgtcacctactcatgcacaaaactgcctcccaaagacttttcccaggtccctcgtatcaaaacattaagagtataatggaagatagcacgatcttgtcagattggacaaacagcaacaaacaatttccccgccggggtgcctgtctcagaaaggagtcttgctcgtgctggtttttattatactggtgtgaatgacaaggtcaaatgcttctgttgtggcctgatgctggataactggaaactaggagacagtcctattcaaaagcataaacagctatatcctagctgtagctttattcagaatctggtttcagctagtctgggatccacctctaagaatacgtctccaatgagaaacagttttgcacattcattatctcccaccttggaacatagtagcttgttcagtggttcttactccagcctttctccaaaccctcttaattctagagcagttgaagacatctcttcatcgaggactaacccctacagttatgcaatgagtactgaagaagccagatttcttacctaccatatgtggccattaacttttttgtcaccatcagaattggcaagagctggtttttattatataggacctggagatagggtagcctgctttgcctgtggtgggaagctcagtaactgggaaccaaaggatgatgctatgtcagaacaccggaggcattttcccaactgtccatttttggaaaattctctagaaactctgaggtttagcatttcaaatctgagcatgcagacacatgcagctcgaatgagaacatttatgtactggccatctagtgttccagttcagcctgagcagcttgcaagtgctggtttttattatgtgggtcgcaatgatgatgtcaaatgcttttgttgtgatggtggcttgaggtgttgggaatctggagatgatccatgggtagaacatgccaagtggtttccaaggtgtgagttcttgatacgaatgaaaggccaagagtttgttgatgagattcaaggtagatatcctcatcttcttgaacagctgttgtcaacttcagataccactggagaagaaaatgctgacccaccaattattcattttggacctggagaaagttcttcagaagatgctgtcatgatgaatacacctgtggttaaatctgccttggaaatgggctttaatagagacctggtgaaacaaacagttcaaagtaaaatcctgacaactggagagaactataaaacagttaatgatattgtgtcagcacttcttaatgctgaagatgaaaaaagagaagaggagaaggaaaaacaagctgaagaaatggcatcagatgatttgtcattaattcggaagaacagaatggctctctttcaacaattgacatgtgtgcttcctatcctggataatcttttaaaggccaatgtaattaataaacaggaacatgatattattaaacaaaaaacacagatacctttacaagcgagagaactgattgataccattttggttaaaggaaatgctgcggccaacatcttcaaaaactgtctaaaagaaattgactctacattgtataagaacttatttgtggataagaatatgaagtatattccaacagaagatgtttcaggtctgtcactggaagaacaattgaggaggttgcaagaagaacgaacttgtaaagtgtgtatggacaaagaagtttctgttgtatttattccttgtggtcatctggtagtatgccaggaatgtgccccttctctaagaaaatgccctatttgcaggggtataatcaagggtactgttcgtacatttctctcttaaagaaaaatagtctatattttaacctgcataaaaaggtctttaaaatattgttgaacacttgaagccatctaaagtaaaaagggaattatgagtttttcaattagtaacattcatgttctagtctgctttggtactaataatcttgtttctgaaaagatggtatcatatatttaatcttaatctgtttatttacaagggaagatttatgtttggtgaactatattagtatgtatgtgtacctaagggagtagtgtcactgcttgttatgcatcatttcaggagttactggatttgttgttctttcagaaagctttgaatactaaattatagtgtagaaaagaactggaaaccaggaactctggagttcatcagagttatggtgccgaattgtctttggtgcttttcacttgtgttttaaaataaggatttttctcttatttctccccctagtttgtgagaaacatctcaataaagtgcttta

SEQ ID NO: 417142 - DNA, 3702 bp, Homo sapiens
agcgggtcagagtgagcccggatggggcggcgggcttcgggagcgcccgggctgatccgagccgagcgggccgtatctccttgtcggcgccgctgattcccggctctgcggaggcctctaggcagccgcgcagcttccgtgtttgctgcgcccgcactgcgatttacaaccctgaagaatctccctatccctattttgtccccctgcagtaataaatcccattatggagatctcgaaactttataaagggatatagtttgaattctatggagtgtaattttgtgtatgaattatatttttaaaacattgaagagttttcagaaagaaggctagtagagttgattactgatactttatgctaagcagtacttttttggtagtacaatattttgttaggcgtttctgataacactagaaaggacaagttttatcttgtgataaattgattaatgtttacaacatgactgataattatagctgaatagtccttaaatgatgaacaggttatttagtttttaaatgcagtgtaaaaagtgtgctgtggaaattttatggctaactaagtttatggagaaaataccttcagttgatcaagaataatagtggtatacaaagttaggaagaaagtcaacatgatgctgcaggaaatggaaacaaatacaaatgatatttaacaaagatagagtttacagtttttgaactttaagccaaattcatttgacatcaagcactatagcaggcacaggttcaacaaagcttgtgggtattgacttcccccaaaagttgtcagctgaagtaatttagcccacttaagtaaatactatgatgataagctgtgtgaacttagcttttaaatagtgtgaccatatgaaggttttaattacttttgtttattggaataaaatgagattttttgggttgtcatgttaaagtgcttatagggaaagaagcctgcatataattttttaccttgtggcataatcagtaattggtctgttattcaggcttcatagcttgtaaccaaatataaataaaaggcataatttaggtattctatagttgcttagaattttgttaatataaatctctgtgaaaaatcaaggagttttaatattttcagaagtgcatccacctttcagggctttaagttagtattactcaagattatgaacaaatagcacttaggttacctgaaagagttactacaaccccaaagagttgtgttctaagtagtatcttggtaattcagagagatactcatcctacctgaatataaactgagataaatccagtaaagaaagtgtagtaaattctacataagagtctatcattgatttctttttgtggtaaaaatcttagttcatgtgaagaaatttcatgtgaatgttttagctatcaaacagtactgtcacctactcatgcacaaaactgcctcccaaagacttttcccaggtccctcgtatcaaaacattaagagtataatggaagatagcacgatcttgtcagattggacaaacagcaacaaacaaaaaatgaagtatgacttttcctgtgaactctacagaatgtctacatattcaactttccccgccggggtgcctgtctcagaaaggagtcttgctcgtgctggtttttattatactggtgtgaatgacaaggtcaaatgcttctgttgtggcctgatgctggataactggaaactaggagacagtcctattcaaaagcataaacagctatatcctagctgtagctttattcagaatctggtttcagctagtctgggatccacctctaagaatacgtctccaatgagtggttcttactccagcctttctccaaaccctcttaattctagagcagttgaagacatctcttcatcgaggactaacccctacagttatgcaatgagtactgaagaagccagatttcttacctaccatatgtggccattaacttttttgtcaccatcagaattggcaagagctggtttttattatataggacctggagatagggtagcctgctttgcctgtggtgggaagctcagtaactgggaaccaaaggatgatgctatgtcagaacaccggaggcattttcccaactgtccatttttggaaaattctctagaaactctgaggtttagcatttcaaatctgagcatgcagacacatgcagctcgaatgagaacatttatgtactggccatctagtgttccagttcagcctgagcagcttgcaagtgctggtttttattatgtgggtcgcaatgatgatgtcaaatgcttttgttgtgatggtggcttgaggtgttgggaatctggagatgatccatgggtagaacatgccaagtggtttccaaggtgtgagttcttgatacgaatgaaaggccaagagtttgttgatgagattcaaggtagatatcctcatcttcttgaacagctgttgtcaacttcagataccactggagaagaaaatgctgacccaccaattattcattttggacctggagaaagttcttcagaagatgctgtcatgatgaatacacctgtggttaaatctgccttggaaatgggctttaatagagacctggtgaaacaaacagttcaaagtaaaatcctgacaactggagagaactataaaacagttaatgatattgtgtcagcacttcttaatgctgaagatgaaaaaagagaagaggagaaggaaaaacaagctgaagaaatggcatcagatgatttgtcattaattcggaagaacagaatggctctctttcaacaattgacatgtgtgcttcctatcctggataatcttttaaaggccaatgtaattaataaacaggaacatgatattattaaacaaaaaacacagatacctttacaagcgagagaactgattgataccattttggttaaaggaaatgctgcggccaacatcttcaaaaactgtctaaaagaaattgactctacattgtataagaacttatttgtggataagaatatgaagtatattccaacagaagatgtttcaggtctgtcactggaagaacaattgaggaggttgcaagaagaacgaacttgtaaagtgtgtatggacaaagaagtttctgttgtatttattccttgtggtcatctggtagtatgccaggaatgtgccccttctctaagaaaatgccctatttgcaggggtataatcaagggtactgttcgtacatttctctcttaaagaaaaatagtctatattttaacctgcataaaaaggtctttaaaatattgttgaacacttgaagccatctaaagtaaaaagggaattatgagtttttcaattagtaacattcatgttctagtctgctttggtactaataatcttgtttctgaaaagatggtatcatatatttaatcttaatctgtttatttacaagggaagatttatgtttggtgaactatattagtatgtatgtgtacctaagggagtagtgtcactgcttgttatgcatcatttcaggagttactggatttgttgttctttcagaaagctttgaatactaaattatagtgtagaaaagaactggaaaccaggaactctggagttcatcagagttatggtgccgaattgtctttggtgcttttcacttgtgttttaaaataaggatttttctcttatttctccccctagtttgtgagaaacatctcaataaagtgcttta

SEQ ID NO: 417143 - DNA, 3702 bp, Homo sapiens
agcgggtcagagtgagcccggatggggcggcgggcttcgggagcgcccgggctgatccgagccgagcgggccgtatctccttgtcggcgccgctgattcccggctctgcggaggcctctaggcagccgcgcagcttccgtgtttgctgcgcccgcactgcgatttacaaccctgaagaatctccctatccctattttgtccccctgcagtaataaatcccattatggagatctcgaaactttataaagggatatagtttgaattctatggagtgtaattttgtgtatgaattatatttttaaaacattgaagagttttcagaaagaaggctagtagagttgattactgatactttatgctaagcagtacttttttggtagtacaatattttgttaggcgtttctgataacactagaaaggacaagttttatcttgtgataaattgattaatgtttacaacatgactgataattatagctgaatagtccttaaatgatgaacaggttatttagtttttaaatgcagtgtaaaaagtgtgctgtggaaattttatggctaactaagtttatggagaaaataccttcagttgatcaagaataatagtggtatacaaagttaggaagaaagtcaacatgatgctgcaggaaatggaaacaaatacaaatgatatttaacaaagatagagtttacagtttttgaactttaagccaaattcatttgacatcaagcactatagcaggcacaggttcaacaaagcttgtgggtattgacttcccccaaaagttgtcagctgaagtaatttagcccacttaagtaaatactatgatgataagctgtgtgaacttagcttttaaatagtgtgaccatatgaaggttttaattacttttgtttattggaataaaatgagattttttgggttgtcatgttaaagtgcttatagggaaagaagcctgcatataattttttaccttgtggcataatcagtaattggtctgttattcaggcttcatagcttgtaaccaaatataaataaaaggcataatttaggtattctatagttgcttagaattttgttaatataaatctctgtgaaaaatcaaggagttttaatattttcagaagtgcatccacctttcagggctttaagttagtattactcaagattatgaacaaatagcacttaggttacctgaaagagttactacaaccccaaagagttgtgttctaagtagtatcttggtaattcagagagatactcatcctacctgaatataaactgagataaatccagtaaagaaagtgtagtaaattctacataagagtctatcattgatttctttttgtggtaaaaatcttagttcatgtgaagaaatttcatgtgaatgttttagctatcaaacagtactgtcacctactcatgcacaaaactgcctcccaaagacttttcccaggtccctcgtatcaaaacattaagagtataatggaagatagcacgatcttgtcagattggacaaacagcaacaaacaaaaaatgaagtatgacttttcctgtgaactctacagaatgtctacatattcaactttccccgccggggtgcctgtctcagaaaggagtcttgctcgtgctggtttttattatactggtgtgaatgacaaggtcaaatgcttctgttgtggcctgatgctggataactggaaactaggagacagtcctattcaaaagcataaacagctatatcctagctgtagctttattcagaatctggtttcagctagtctgggatccacctctaagaatacgtctccaatgagaaacagttttgcacattcattatctcccaccttggaacatagtagcttgttcagtggttcttactccagcctttctccaaaccctcttaattctagagcagttgaagacatctcttcatcgaggactaacccctacagttatgcaatgagtactgaagaagccagatttcttacctaccatatgtggccattaacttttttgtcaccatcagaattggcaagagctggtttttattatataggacctggagatagggtagcctgctttgcctgtggtgggaagctcagtaactgggaaccaaaggatgatgctatgtcagaacaccggaggcattttcccaactgtccatttttggaaaattctctagaaactctgaggtttagcatttcaaatctgagcatgcagacacatgcagctcgaatgagaacatttatgtactggccatctagtgttccagttcagcctgagcagcttgcaagtgctggtttttattatgtgggtcgcaatgatgatgtcaaatgcttttgttgtgatggtggcttgaggtgttgggaatctggagatgatccatgggtagaacatgccaagtggtttccaaggtgtgagttcttgatacgaatgaaaggccaagagtttgttgatgagattcaaggtagatatcctcatcttcttgaacagctgttgtcaacttcagataccactggagaagaaaatgctgacccaccaattattcattttggacctggagaaagttcttcagaagatgctgtcatgatgaatacacctgtggttaaatctgccttggaaatgggctttaatagagacctggtgaaacaaacagttcaaacacttcttaatgctgaagatgaaaaaagagaagaggagaaggaaaaacaagctgaagaaatggcatcagatgatttgtcattaattcggaagaacagaatggctctctttcaacaattgacatgtgtgcttcctatcctggataatcttttaaaggccaatgtaattaataaacaggaacatgatattattaaacaaaaaacacagatacctttacaagcgagagaactgattgataccattttggttaaaggaaatgctgcggccaacatcttcaaaaactgtctaaaagaaattgactctacattgtataagaacttatttgtggataagaatatgaagtatattccaacagaagatgtttcaggtctgtcactggaagaacaattgaggaggttgcaagaagaacgaacttgtaaagtgtgtatggacaaagaagtttctgttgtatttattccttgtggtcatctggtagtatgccaggaatgtgccccttctctaagaaaatgccctatttgcaggggtataatcaagggtactgttcgtacatttctctcttaaagaaaaatagtctatattttaacctgcataaaaaggtctttaaaatattgttgaacacttgaagccatctaaagtaaaaagggaattatgagtttttcaattagtaacattcatgttctagtctgctttggtactaataatcttgtttctgaaaagatggtatcatatatttaatcttaatctgtttatttacaagggaagatttatgtttggtgaactatattagtatgtatgtgtacctaagggagtagtgtcactgcttgttatgcatcatttcaggagttactggatttgttgttctttcagaaagctttgaatactaaattatagtgtagaaaagaactggaaaccaggaactctggagttcatcagagttatggtgccgaattgtctttggtgcttttcacttgtgttttaaaataaggatttttctcttatttctccccctagtttgtgagaaacatctcaataaagtgcttta

SEQ ID NO: 417144 - DNA, 1497 bp, Homo sapiens
ttgttcctgttagatatgtatgtgttctgggttgtgacgtaaaatgtttttactatggagtacaatgaaagatttgaaagccatttttctagaatgatcaggttatatttgatatgaaacaattttaaaaaataattttcctcatatgttttaggtgtgagttcttgatacgaatgaaaggccaagagtttgttgatgagattcaaggtagatatcctcatcttcttgaacagctgttgtcaacttcagataccactggagaagaaaatgctgacccaccaattattcattttggacctggagaaagttcttcagaagatgctgtcatgatgaatacacctgtggttaaatctgccttggaaatgggctttaatagagacctggtgaaacaaacagttcaaagtaaaatcctgacaactggagagaactataaaacagttaatgatattgtgtcagcacttcttaatgctgaagatgaaaaaagagaagaggagaaggaaaaacaagctgaagaaatggcatcagatgatttgtcattaattcggaagaacagaatggctctctttcaacaattgacatgtgtgcttcctatcctggataatcttttaaaggccaatgtaattaataaacaggaacatgatattattaaacaaaaaacacagatacctttacaagcgagagaactgattgataccattttggttaaaggaaatgctgcggccaacatcttcaaaaactgtctaaaagaaattgactctacattgtataagaacttatttgtggataagaatatgaagtatattccaacagaagatgtttcaggtctgtcactggaagaacaattgaggaggttgcaagaagaacgaacttgtaaagtgtgtatggacaaagaagtttctgttgtatttattccttgtggtcatctggtagtatgccaggaatgtgccccttctctaagaaaatgccctatttgcaggggtataatcaagggtactgttcgtacatttctctcttaaagaaaaatagtctatattttaacctgcataaaaaggtctttaaaatattgttgaacacttgaagccatctaaagtaaaaagggaattatgagtttttcaattagtaacattcatgttctagtctgctttggtactaataatcttgtttctgaaaagatggtatcatatatttaatcttaatctgtttatttacaagggaagatttatgtttggtgaactatattagtatgtatgtgtacctaagggagtagtgtcactgcttgttatgcatcatttcaggagttactggatttgttgttctttcagaaagctttgaatactaaattatagtgtagaaaagaactggaaaccaggaactctggagttcatcagagttatggtgccgaattgtctttggtgcttttcacttgtgttttaaaataaggatttttctcttatttctccccctagtttgtgagaaacatctcaataaagtgcttta

SEQ ID NO: 417145 - DNA, 2954 bp, Homo sapiens
agcgggtcagagtgagcccggatggggcggcgggcttcgggagcgcccgggctgatccgagccgagcgggccgtatctccttgtcggcgccgctgattcccggctctgcggaggcctctaggcagccgcgcagcttccgtgtttgctgcgcccgcactgcgatttacaaccctgaagaatctccctatccctattttgtccccctgcagtaataaatcccattatggagatctcgaaactttataaagggatatagtttgaattctatggagtgtaattttgtgtatgaattatatttttaaaacattgaagagttttcagaaagaaggctagtagagttgattactgatactttatgctaagcagtacttttttggtagtacaatattttgttaggcgtttctgataacactagaaaggacaagttttatcttgtgataaattgattaatgtttacaacatgactgataattatagctgaatagtccttaaatgatgaacaggttatttagtttttaaatgcagtgtaaaaagtgtgctgtggaaattttatggctaactaagtttatggagaaaataccttcagttgatcaagaataatagtggtatacaaagttaggaagaaagtcaacatgatgctgcaggaaatggaaacaaatacaaatgatatttaacaaagatagagtttacagtttttgaactttaagccaaattcatttgacatcaagcactatagcaggcacaggttcaacaaagcttgtgggtattgacttcccccaaaagttgtcagctgaagtaatttagcccacttaagtaaatactatgatgataagctgtgtgaacttagcttttaaatagtgtgaccatatgaaggttttaattacttttgtttattggaataaaatgagattttttgggttgtcatgttaaagtgcttatagggaaagaagcctgcatataattttttaccttgtggcataatcagtaattggtctgttattcaggcttcatagcttgtaaccaaatataaataaaaggcataatttaggtattctatagttgcttagaattttgttaatataaatctctgtgaaaaatcaaggagttttaatattttcagaagtgcatccacctttcagggctttaagttagtattactcaagattatgaacaaatagcacttaggttacctgaaagagttactacaaccccaaagagttgtgttctaagtagtatcttggtaattcagagagatactcatcctacctgaatataaactgagataaatccagtaaagaaagtgtagtaaattctacataagagtctatcattgatttctttttgtggtaaaaatcttagttcatgtgaagaaatttcatgtgaatgttttagctatcaaacagtactgtcacctactcatgcacaaaactgcctcccaaagacttttcccaggtccctcgtatcaaaacattaagagtataatggaagatagcacgatcttgtcagattggacaaacagcaacaaacaaaaaatgaagtatgacttttcctgtgaactctacagaatgtctacatattcaactttccccgccggggtgcctgtctcagaaaggagtcttgctcgtgctggtttttattatactggtgtgaatgacaaggtcaaatgcttctgttgtggcctgatgctggataactggaaactaggagacagtcctattcaaaagcataaacagctatatcctagctgtagctttattcagaatctggtttcagctagtctgggatccacctctaagaatacgtctccaatgagaaacagttttgcacattcattatctcccaccttggaacatagtagcttgttcagtggttcttactccagcctttctccaaaccctcttaattctagagcagttgaagacatctcttcatcgaggactaacccctacagttatgcaatgagtactgaagaagccagatttcttacctaccatatgtggccattaacttttttgtcaccatcagaattggcaagagctggtttttattatataggacctggagatagggtagcctgctttgcctgtggtgggaagctcagtaactgggaaccaaaggatgatgctatgtcagaacaccggaggcattttcccaactgtccatttttggaaaattctctagaaactctgaggtttagcatttcaaatctgagcatgcagacacatgcagctcgaatgagaacatttatgtactggccatctagtgttccagttcagcctgagcagcttgcaagtgctggtttttattatgtgggtaagaagcaaataactatacattttatcattttattttaatttacatattagaacatacgtgttttcaatatttagtcttttttttcctgaaggtcgcaatgatgatgtcaaatgcttttgttgtgatggtggcttgaggtgttgggaatctggagatgatccatgggtagaacatgccaagtggtttccaaggtaattgttttgaaaaaggtatttgtacaaaaaactctgtgcttaaaagaagtaggcatgcctacatgattttgtttacctttaaattataacaaagcctcttttatgccattggggaattatccttctaaaagatcacattttaactttaattattttgttgaaaaatattctgcagtcttctgtgtacttttgtaagtcagttacaagtatgaccgtacattttatttatttcccatttcttttaaagagtacttaaggattacaggcgtgagccaccgcgtccagcccttgtttgtttttttgaggtggagtctcactcccagcctgggcgacagagaaagaccccatctcaaaacaacaggaaaaacaacaaaaccgggtgggcgtgccttcccatcggacacccgactcgcaagactgtcattcaaagtctcactctcgtgc

SEQ ID NO: 417146 - DNA, 547 bp, Homo sapiens
tcaggaagaccagatgttattccaaggggctgaaagttgtctacataacaggctcaattcatataatgaaatgaagagctgctagcagttgcctgatttatttagttggtaatatttgcagttacttcacacacacaaacatacacacgcgcacaaataggtatatataacatgtattaagaacaaatggtaaataatatatatgtatattttttaaaatttatatttttggtttaggaattaaggttttaaattgaatgctggttttagaaatgcatatcctgagctgtgtttttctctttcctggtttgctgtttattttttattttcacattctatatttttgtttagcctgtgagaggctaaagttttctttgatcatatcactcaatgtggccattaatatttctggagaagacacaaacctatttataatactttttaaaaatccgaagtgataataagaatgtttttacattgaaagtaatacttaagtgtttacataacattctgtatgcactcaagaaaataaagttttgttaataca

SEQ ID NO: 417147 - DNA, 488 bp, Homo sapiens
tctgcttaccttgtttccttttaattgataagctccaagtagttgctaattttttgacaactttaaatgagtttcattcacttcttttacttaatgttttaagtatagtaccaataatttcattaacctgttctcaagtggtttagctaccattctgccatttttaatttttatttaattttatttgcttgagcacactgatcaaccactgaactgccttcttccattgtcctgcaatgatataagggttacatttttgtgtatatggctttcatagttgggatttcagagcactgataccagatattttcagtttgttctctgggggaatttcatttgcatctatgtttttagctatctgtgataacttgttaaatattaaaaagatattttgcttctattggaacatttgtatactcgcaactatatttctgtaaacagctgcagtcaaaaataaaacactgaaagttttcattttgcagtggata

SEQ ID NO: 417148 - DNA, 2031 bp, Homo sapiens
ttagtagaggtggggtttcatcatgttagccaggatggtctcgatctgctgacctcgtgatcagcccacctcggcctcccaaagtgctgggattacaggtgtgagccactgtgccctgctgggaacaacgtttttaaccaactttgcctaagcagacaacagagttgagacattctggtagagaaataatagcccacatttgttgaattgtttttagctctttagttataaagagctttttacaaattaatttatgtaatcctccaacagtacaatgagatagataattttaattttacagactcaaactgcagaatggaaagtttaagtaacttaatgtcaaacagctaataagagatcaagataataatctaggctctttacctatctcctgggcataagcactagcttttttagtgtaaacagaatcaaattgttcattagatttggttgatgaaaagaggtctaccaaccatcatgtaaaataatggcatttatgtttatattcagaagactattatacattaatttggtaatacgtattttttgaggaaaggtataatggccatatgtatcttaaccagatacatccttaagcctacaatatgagtaaaagaaaattactcattttcttttgtggagtagaagttggatgggttatatgggcgtgatgcctctctcctgtaattccagcacttggggaggccaaggcgggcagatctcttgagcccaggagttctagagcagcctgggtaacatggcgaaaccccttctctacaaaaaaaagtagccaggcgtggtggcatgcgcctatagtcccagcttacacgggaggctgaggtaggaggattgctttgagcctgggaggtagaggttgcagtgagtcgagattgcaccaccgcactccagcgtgagcagcagagtgagaccttgtcttaaaaaaagttggatgggtagaggagggacattttgctagggcagactaacatctaggaagtggttgaagttattttttttaaaaaaggaagaaaagaaaggaattagtatttattgatcacacctttctgtatgttaggtggtttaggtttgttgtctttaaatcttccatatgatgatgataccctgttttacagttgagacccaagactatagatatgttaaataatttgcttgtggtcatacatgttctatcttctgaatagaagataactcctggaactgatagagagagggcagaaaaaagattctattttgagaaatggagcaacctgaaggcacatagctttgctgtttgctgtaactcctttagacagctctctgaccacacagtacgtgggtggacaccagcattgaccaggagggatggtgggaagtttaaatagttttcctttactgtaataaacactctagagaagtgaactattaaaggtttttccccatcaaatggctaaattaaacatttttgacattcgaaagggatgatttatatcttatgtggaaaagccccaaacaactatttccccagttgctggaaaaggagctcttttgagttatgaaggtattttatgttctttctccattattcttaacttgtgcttacaggtgaattgtaagcatgtgctttgtgtttagtattttcctcaagaaaactcttgctggtaaatctagttaccatagaacttgaaaggatattgaaagaatagttgaggactatcctgattggttttcatctacttagtctgtatttgtgtcatttcagtgtctgagtaggtggtttgtgattaacatttcacatgttatttttattgatttggcaagtaccagaaaacttgaaggatgaactagaggttatttttcttagcatttgtggtattagtactaaaaggggagtaagagagtagaaagaattctggacaactgttaagaattgttacattttgtctacctaggctcgagttcctcacttttaaaattaggactgtactttttggaagaatattgcttgttgtctttgctggtgggaccaggctg

SEQ ID NO: 417149 - DNA, 559 bp, Homo sapiens
acatggtgtgtgtaggaggctcagtgagagtgaaggctttgctttggtatgtagtgaagaataagattgactacactggctggagctagcttttgaagagtcaaatccaggcagcatttagatcaggggttatagcccagcagcccatgggccacatctggtctgcagatgtatatagtttggcccacagaatgactaaaaacttgggctccaaatcaggagattgtacaagcagtatcagatattctggattactcagaatctggattactgagtggtggaatatctgatactacttgtccaacatttctacagggcatcaatgaactagggctgagatagtagctgccttgttagatgaggcatggctatccagtgcgctacagtttccacaactgcttgtataatagtttccctgacactcaaatcatttaccacttaccagctgaggtcacttgccctttatcaggacacttgcactgttgttttcctattctaattaggtatttctctgtgcccatgtccctatcaatagtagggaagatagaccaaaaaaaaa

SEQ ID NO: 417150 - DNA, 413 bp, Homo sapiens
tgccaggaattcgggcacgagctctctctctctctctctctctctctctctctctctctctctctctctggatttttcccacaagaaactttgcagggcaatttcaaggtatgtcaaggaaatacattttggggtaaaacattttgaatttttcccttgttatgccagagtcagattggaaagtaagtcacaatacacaacgttaaataaaatccatctgatgagaatttatggtttgtagggcatgacaccccagactccttagaaaggagtttgggcgagataaaaaaaaatcagagcttagtcctcagtgcccccgcttggccaaaaagcattccatagaatgcatgtgcaggccaacaacagcagcaggtccctcggcgctaggaaggctcattcctagggttgtctga

SEQ ID NO: 417151 - DNA, 1126 bp, Homo sapiens
  misc_feature (1)..(1): n is a, c, g, or t
  misc_feature (4)..(4): n is a, c, g, or t
ngcngagactgagcagacgcctccaggatctgtcggcagctgctgttctgagggagagcagagaccatgtctgacatagaagaggtggtggaagagtacgaggaggaggagcaggaagaagcagctgttgaagagcaggaggaggcagcggaagaggatgctgaagcagaggctgagaccgaggagaccagggcagaagaagatgaagaagaagaggaagcaaaggaggctgaagatggcccaatggaggagtccaaaccaaagcccaggtcgttcatgcccaacttggtgcctcccaagatccccgatggagagagagtggactttgatgacatccaccggaagcgcatggagaaggacctgaatgagttgcaggcgctgattgaggctcactttgagaacaggaagaaagaggaggaggagctcgtttctctcaaagacaggatcgagagacgtcgggcagagcgggccgagcagcagcgcatccggaatgagcgggagaaggagcggcagaaccgcctggctgaagagagggctcgacgagaggaggaggagaacaggaggaaggctgaggatgaggcccggaagaagaaggctttgtccaacatgatgcattttgggggttacatccagagaagccagacagagcggaaaagtgggaagaggcagactgagcgggaaaagaagaagaagattctggctgagaggaggaaggtgctggccattgaccacctgaatgaagatcagctgagggagaaggccaaggagctgtggcagagcatctataacttggaggcagagaagttcgacctgcaggagaagttcaagcagcagaaatatgagatcaatgttctccgaaacaggatcaacgataaccagaaagtctccaagacccgcgggaaggctaaagtcaccgggcgctggaaatagagcctggcctccttcaccaaagatctgctcctcgctcgcacctgcctccggcctgcactcccccagttcccgggccctcctgggcaccccaggcagctcctgtttggaaatggggagctggcctaggtgggagccaccactcctgcctgcccccacacccactccacaccagtaataaaaagccaccacacactga

SEQ ID NO: 417152 - DNA, 1179 bp, Homo sapiens
gattcaccctaggcctcgctgatctctgtacaacgggggccagagctcttctgaggaaggcaggcttccctttgtacctgcactgacttttttctccttttggagggagagcagagaccatgtctgacatagaagaggtggtggaagagtacgaggaggaggagcaggaagaagcagctgttgaagagcaggaggaggcagcggaagaggatgctgaagcagaggctgagaccgaggagaccagggcagaagaagatgaagaagaagaggaagcaaaggaggctgaagatggcccaatggaggagtccaaaccaaagcccaggtcgttcatgcccaacttggtgcctcccaagatccccgatggagagagagtggactttgatgacatccaccggaagcgcatggagaaggacctgaatgagttgcaggcgctgattgaggctcactttgagaacaggaagaaagaggaggaggagctcgtttctctcaaagacaggatcgagagacgtcgggcagagcgggccgagcagcagcgcatccggaatgagcgggagaaggagcggcagaaccgcctggctgaagagagggctcgacgagaggaggaggagaacaggaggaaggctgaggatgaggcccggaagaagaaggctttgtccaacatgatgcattttgggggttacatccagagaagccagacagagcggaaaagtgggaagaggcagactgagcgggaaaagaagaagaagattctggctgagaggaggaaggtgctggccattgaccacctgaatgaagatcagctgagggagaaggccaaggagctgtggcagagcatctataacttggaggcagagaagttcgacctgcaggagaagttcaagcagcagaaatatgagatcaatgttctccgaaacaggatcaacgataaccagaaagtctccaagacccgcgggaaggctaaagtcaccgggcgctggaaatagagcctggcctccttcaccaaagatctgctcctcgctcgcacctgcctccggcctgcactcccccagttcccgggccctcctgggcaccccaggcagctcctgtttggaaatggggagctggcctaggtgggagccaccactcctgcctgcccccacacccactccacaccagtaataaaaagccaccacacactga

SEQ ID NO: 417153 - DNA, 646 bp, Homo sapiens
ctcctcccagttgcgattgacaaaaaaaaaaacctttgggggacagaagagagggctcgacgagaggaggaggagaacaggaggaaggctgaggatgaggcccggaagaagaaggctttgtccaacatgatgcattttgggggttacatccagagaagccagacagagcggaaaagtgggaagaggcagactgagcgggaaaagaagaagaagattctggctgagaggaggaaggtgctggccattgaccacctgaatgaagatcagctgagggagaaggccaaggagctgtggcagagcatctataacttggaggcagagaagttcgacctgcaggagaagttcaagcagcagaaatatgagatcaatgttctccgaaacaggatcaacgataaccagaaagtctccaagacccgcgggaaggctaaagtcaccgggcgctggaaatagagcctggcctccttcaccaaagatctgctcctcgctcgcacctgcctccggcctgcactcccccagttcccgggccctcctgggcaccccaggcagctcctgtttggaaatggggagctggcctaggtgggagccaccactcctgcctgcccccacacccactccacaccagtaataaaaagccaccacacactga

SEQ ID NO: 417154 - DNA, 1160 bp, Homo sapiens
  misc_feature (1)..(1): n is a, c, g, or t
  misc_feature (4)..(4): n is a, c, g, or t
ngcngagactgagcagacgcctccaggatctgtcggcagctgctgttctgagggagagcagagaccatgtctgacatagaagaggtggtggaagagtacgaggaggaggagagcaggaagaagcagctgttgaagaagaggaggactggagagaggacgaagacgagagcaggaggaggcagcggaagaggatgctgaagcagaggctgagaccgaggagaccagggcagaagaagatgaagaagaagaggaagcaaaggaggctgaagatggcccaatggaggagtccaaaccaaagcccaggtcgttcatgcccaacttggtgcctcccaagatccccgatggagagagagtggactttgatgacatccaccggaagcgcatggagaaggacctgaatgagttgcaggcgctgattgaggctcactttgagaacaggaagaaagaggaggaggagctcgtttctctcaaagacaggatcgagagacgtcgggcagagcgggccgagcagcagcgcatccggaatgagcgggagaaggagcggcagaaccgcctggctgaagagagggctcgacgagaggaggaggagaacaggaggaaggctgaggatgaggcccggaagaagaaggctttgtccaacatgatgcattttgggggttacatccagagaagccagacagagcggaaaagtgggaagaggcagactgagcgggaaaagaagaagaagattctggctgagaggaggaaggtgctggccattgaccacctgaatgaagatcagctgagggagaaggccaaggagctgtggcagagcatctataacttggaggcagagaagttcgacctgcaggagaagttcaagcagcagaaatatgagatcaatgttctccgaaacaggatcaacgataaccagaaagtctccaagacccgcgggaaggctaaagtcaccgggcgctggaaatagagcctggcctccttcaccaaagatctgctcctcgctcgcacctgcctccggcctgcactcccccagttcccgggccctcctgggcaccccaggcagctcctgtttggaaatggggagctggcctaggtgggagccaccactcctgcctgcccccacacccactccacaccagtaataaaaagccaccacacactga

SEQ ID NO: 417155 - DNA, 1380 bp, Homo sapiens
gattcaccctaggcctcgctgatctctgtacaacgggggccagagctcttctgaggaaggcaggcttccctttgtacctgcactgacttttttctccttttggagggagagcagagaccatgtctgacatagaagaggtggtggaagagtacgaggaggaggagcaggaagaagcagctgttgagtggggtcctctcccgccgctgccctgacacctggtccaggagcctcccagctgtccctcggattctgggtagaagtggagcaggaaggtaagcgtaaacgtgtgtactcatttggatcaaagacagcctggttcgaaactgacccacctcttctctcttctcttgctgcctggacttctgagcagaagcagctgttgaagagagcaggaggaggcagcggaagaggatgctgaagcagaggctgagaccgaggagaccagggcagaagaagatgaagaagaagaggaagcaaaggaggctgaagatggcccaatggaggagtccaaaccaaagcccaggtcgttcatgcccaacttggtgcctcccaagatccccgatggagagagagtggactttgatgacatccaccggaagcgcatggagaaggacctgaatgagttgcaggcgctgattgaggctcactttgagaacaggaagaaagaggaggaggagctcgtttctctcaaagacaggatcgagagacgtcgggcagagcgggccgagcagcagcgcatccggaatgagcgggagaaggagcggcagaaccgcctggctgaagagagggctcgacgagaggaggaggagaacaggaggaaggctgaggatgaggcccggaagaagaaggctttgtccaacatgatgcattttgggggttacatccagagaagccagacagagcggaaaagtgggaagaggcagactgagcgggaaaagaagaagaagattctggctgagaggaggaaggtgctggccattgaccacctgaatgaagatcagctgagggagaaggccaaggagctgtggcagagcatctataacttggaggcagagaagttcgacctgcaggagaagttcaagcagcagaaatatgagatcaatgttctccgaaacaggatcaacgataaccagaaagtctccaagacccgcgggaaggctaaagtcaccgggcgctggaaatagagcctggcctccttcaccaaagatctgctcctcgctcgcacctgcctccggcctgcactcccccagttcccgggccctcctgggcaccccaggcagctcctgtttggaaatggggagctggcctaggtgggagccaccactcctgcctgcccccacacccactccacaccagtaataaaaagccaccacacactga

SEQ ID NO: 417156 - DNA, 1105 bp, Homo sapiens
  misc_feature (1)..(1): n is a, c, g, or t
  misc_feature (4)..(4): n is a, c, g, or t
ngcngagactgagcagacgcctccaggatctgtcggcagctgctgttctgagggagagcagagaccatgtctgacatagaagaggtggtggaagagtacgaggaggaggaagagcaggaggaggcagcggaagaggatgctgaagcagaggctgagaccgaggagaccagggcagaagaagatgaagaagaagaggaagcaaaggaggctgaagatggcccaatggaggagtccaaaccaaagcccaggtcgttcatgcccaacttggtgcctcccaagatccccgatggagagagagtggactttgatgacatccaccggaagcgcatggagaaggacctgaatgagttgcaggcgctgattgaggctcactttgagaacaggaagaaagaggaggaggagctcgtttctctcaaagacaggatcgagagacgtcgggcagagcgggccgagcagcagcgcatccggaatgagcgggagaaggagcggcagaaccgcctggctgaagagagggctcgacgagaggaggaggagaacaggaggaaggctgaggatgaggcccggaagaagaaggctttgtccaacatgatgcattttgggggttacatccagagaagccagacagagcggaaaagtgggaagaggcagactgagcgggaaaagaagaagaagattctggctgagaggaggaaggtgctggccattgaccacctgaatgaagatcagctgagggagaaggccaaggagctgtggcagagcatctataacttggaggcagagaagttcgacctgcaggagaagttcaagcagcagaaatatgagatcaatgttctccgaaacaggatcaacgataaccagaaagtctccaagacccgcgggaaggctaaagtcaccgggcgctggaaatagagcctggcctccttcaccaaagatctgctcctcgctcgcacctgcctccggcctgcactcccccagttcccgggccctcctgggcaccccaggcagctcctgtttggaaatggggagctggcctaggtgggagccaccactcctgcctgcccccacacccactccacaccagtaataaaaagccaccacacactga

SEQ ID NO: 417157 - DNA, 1086 bp, Homo sapiens
ccccatgacagccgcagcctgctccccacctgcaaacttcagccccttctgggcctcgtccgcgcccccaggatctgtcggcagctgctgttctgagggagagcagagaccatgtctgacatagaagaggtggtggaagagtacgaggaggaggagcaggaagaagcagctgttgaagaagaggaggactggagagaggacgaagacgagagcaggaggaggcagcggaagaggatgctgaagcagaggctgagaccgaggagaccagggcagaagaagatgaagaagaagaggaagcaaaggaggctgaagatggcccaatggaggagtccaaaccaaagcccaggtcgttcatgcccaacttggtgcctcccaagatccccgatggagagagagtggactttgatgagagacgtcgggcagagcgggccgagcagcagcgcatccggaatgagcgggagaaggagcggcagaaccgcctggctgaagagagggctcgacgagaggaggaggagaacaggaggaaggctgaggatgaggcccggaagaagaaggctttgtccaacatgatgcattttgggggttacatccagagaagccagacagagcggaaaagtgggaagaggcagactgagcgggaaaagaagaagaagattctggctgagaggaggaaggtgctggccattgaccacctgaatgaagatcagctgagggagaaggccaaggagctgtggcagagcatctataacttggaggcagagaagttcgacctgcaggagaagttcaagcagcagaaatatgagatcaatgttctccgaaacaggatcaacgataaccagaaagtctccaagacccgcgggaaggctaaagtcaccgggcgctggaaatagagcctggcctccttcaccaaagatctgctcctcgctcgcacctgcctccggcctgcactcccccagttcccgggccctcctgggcaccccaggcagctcctgtttggaaatggggagctggcctaggtgggagccaccactcctgcctgcccccacacccactccacaccagtaataaaaagccaccacacactga

SEQ ID NO: 417158 - DNA, 1203 bp, Homo sapiens
  misc_feature (1)..(1): n is a, c, g, or t
  misc_feature (4)..(4): n is a, c, g, or t
ngcngagactgagcagacgcctccaggatctgtcggcagctgctgttctgagggagagcagagaccatgtctgacatagaagaggtggtggaagagtacgaggaggaggagcaggaagaagcagctgttgagtggggtcctctcccgccgctgccctgacacctggtccaggagcctcccagctgtccctcggattctgggtagaagtagagcaggaggaggcagcggaagaggatgctgaagcagaggctgagaccgaggagaccagggcagaagaagatgaagaagaagaggaagcaaaggaggctgaagatggcccaatggaggagtccaaaccaaagcccaggtcgttcatgcccaacttggtgcctcccaagatccccgatggagagagagtggactttgatgacatccaccggaagcgcatggagaaggacctgaatgagttgcaggcgctgattgaggctcactttgagaacaggaagaaagaggaggaggagctcgtttctctcaaagacaggatcgagagacgtcgggcagagcgggccgagcagcagcgcatccggaatgagcgggagaaggagcggcagaaccgcctggctgaagagagggctcgacgagaggaggaggagaacaggaggaaggctgaggatgaggcccggaagaagaaggctttgtccaacatgatgcattttgggggttacatccagagaagccagacagagcggaaaagtgggaagaggcagactgagcgggaaaagaagaagaagattctggctgagaggaggaaggtgctggccattgaccacctgaatgaagatcagctgagggagaaggccaaggagctgtggcagagcatctataacttggaggcagagaagttcgacctgcaggagaagttcaagcagcagaaatatgagatcaatgttctccgaaacaggatcaacgataaccagaaagtctccaagacccgcgggaaggctaaagtcaccgggcgctggaaatagagcctggcctccttcaccaaagatctgctcctcgctcgcacctgcctccggcctgcactcccccagttcccgggccctcctgggcaccccaggcagctcctgtttggaaatggggagctggcctaggtgggagccaccactcctgcctgcccccacacccactccacaccagtaataaaaagccaccacacactga

SEQ ID NO: 417159 - DNA, 1470 bp, Homo sapiens
  misc_feature (1)..(1): n is a, c, g, or t
  misc_feature (4)..(4): n is a, c, g, or t
  misc_feature (1357)..(1357): n is a, c, g, or t
ngcngagactgagcagacgcctccaggatctgtcggcagctgctgttctgagggagagcagagaccatgtctgacatagaagaggtggtggaagagtacgaggaggaggagagcaggaagaagcagctgttgaagaagaggaggactggagagaggacgaagacgagagcaggaggaggcagcggaagaggatgctgaagcagaggctgagaccgaggagaccagggcagaagaagatgaagaagaagaggaagcaaaggaggctgaagatggcccaatggaggagtccaaaccaaagcccaggtcgttcatgcccaacttggtgcctcccaagatccccgatggagagagagtggactttgatgacatccaccggaagcgcatggagaaggacctgaatgagttgcaggcgctgattgaggctcactttgagaacaggaagaaagaggaggaggagctcgtttctctcaaagacaggatcgagagacgtcgggcagagcgggccgagcagcagcgcatccggaatgagcgggagaaggagcggcagaaccgcctggctgaagagagggctcgacgagaggaggaggagaacaggaggaaggctgaggatgaggcccggaagaagaaggctttgtccaacatgatgcattttgggggttacatccagagaagccagacagagcggaaaagtgggaagaggcagactgagcgggaaaagaagaagaagattctggctgagaggaggaaggtgctggccattgaccacctgaatgaagatcagctgagggagaaggccaaggagctgtggcagagcatctataacttggaggcagagaagttcgacctgcaggagaagttcaagcagcagaaatatgagatcaatgttctccgaaacaggatcaacgataaccagaaagtctccaagacccgcgggaaggctaaagtcaccgggcgctggaaatagagcctggcctccttcaccaaagatctgctcctcgctcgcacctgcctccggcctgcactcccccagttcccgggccctcctgggcaccccaggcagctcctgtttggaaatggggagctggcctaggtgggagccaccactcctgcctgcccccacacccactccacaccagtaataaaaagccaccacacactgaaaaaaaagaaacagtagaaaactacatagaaaaaaattttggtggggcgcccaggccccgtaaaaaacttctatgacaccatccgtgggaggccggggcgacagcaggcacaggcagacgtgggccaagccgggtcaccaaaagacaacagcctgggtgatcaacatcggggggggcattctccccccattgtaggnagcggcgggggcgcaagcacgagccgtctcgcacaatgtcccaagtgagtgccaggacggcccagacggggaatcctagcaacgggagtgcaccgggtccgatgaaaatagcg

SEQ ID NO: 417160 - DNA, 1021 bp, Homo sapiens
cccccagcacagccacctcgtgcttctccttgagcatctcatagttggggggctggccactgttgacaggagagaagaaggtttggacagtgtgattcatggtgtccagcgaagaccaaggaggctgaagatggcccaatggaggagtccaaaccaaagcccaggtcgttcatgcccaacttggtgcctcccaagatccccgatggagagagagtggactttgatgacatccaccggaagcgcatggagaaggacctgaatgagttgcaggcgctgattgaggctcactttgagaacaggaagaaagaggaggaggagctcgtttctctcaaagacaggatcgagagacgtcgggcagagcgggccgagcagcagcgcatccggaatgagcgggagaaggagcggcagaaccgcctggctgaagagagggctcgacgagaggaggaggagaacaggaggaaggctgaggatgaggcccggaagaagaaggctttgtccaacatgatgcattttgggggttacatccagagaagccagacagagcggaaaagtgggaagaggcagactgagcgggaaaagaagaagaagattctggctgagaggaggaaggtgctggccattgaccacctgaatgaagatcagctgagggagaaggccaaggagctgtggcagagcatctataacttggaggcagagaagttcgacctgcaggagaagttcaagcagcagaaatatgagatcaatgttctccgaaacaggatcaacgataaccagaaagtctccaagacccgcgggaaggctaaagtcaccgggcgctggaaatagagcctggcctccttcaccaaagatctgctcctcgctcgcacctgcctccggcctgcactcccccagttcccgggccctcctgggcaccccaggcagctcctgtttggaaatggggagctggcctaggtgggagccaccactcctgcctgcccccacacccactccacaccagtaataaaaagccaccacacactga

SEQ ID NO: 417161 - DNA, 799 bp, Homo sapiens
gtgttagatcgagcgagaaggaggagctcgttgctctcaaagacaggatcgagagacgtcgggcagagcgggccgagcagcagcgcatccggaatgagcgggagaaggagcggcagaaccgcctggctacttcgtgggaaccgaaggccccgtagctctctgcctgtgcagctgctgaaggcatttccagagcaacaggaagagagggctcgacgagaggaggaggagaacaggaggaaggctgaggatgaggcccggaagaagaaggctttgtccaacatgatgcattttgggggttacatccagagaagccagacagagcggaaaagtgggaagaggcagactgagcgggaaaagaagaagaagattctggctgagaggaggaaggtgctggccattgaccacctgaatgaagatcagctgagggagaaggccaaggagctgtggcagagcatctataacttggaggcagagaagttcgacctgcaggagaagttcaagcagcagaaatatgagatcaatgttctccgaaacaggatcaacgataaccagaaagtctccaagacccgcgggaaggctaaagtcaccgggcgctggaaatagagcctggcctccttcaccaaagatctgctcctcgctcgcacctgcctccggcctgcactcccccagttcccgggccctcctgggcaccccaggcagctcctgtttggaaatggggagctggcctaggtgggagccaccactcctgcctgcccccacacccactccacaccagtaataaaaagccaccacacactga

SEQ ID NO: 417162 - DNA, 850 bp, Homo sapiens
ggcactcccagcttaaggggatgacgagacctcacatttgggaatcaggacctcattcaatcacgcagtcatttctcagtcagtggactcctgtgggccagcactgtgctgggagctaccctctcagaaagctccttgctgagcggagagaaagctgaactcacccataaagaccacaagcttcagcccagaatcagggtttccaatcctttcccctaatttgctttcttcctccctgctgtaaatcaggaagagagggctcgacgagaggaggaggagaacaggaggaaggctgaggatgaggcccggaagaagaaggctttgtccaacatgatgcattttgggggttacatccagagaagccagacagagcggaaaagtgggaagaggcagactgagcgggaaaagaagaagaagattctggctgagaggaggaaggtgctggccattgaccacctgaatgaagatcagctgagggagaaggccaaggagctgtggcagagcatctataacttggaggcagagaagttcgacctgcaggagaagttcaagcagcagaaatatgagatcaatgttctccgaaacaggatcaacgataaccagaaagtctccaagacccgcgggaaggctaaagtcaccgggcgctggaaatagagcctggcctccttcaccaaagatctgctcctcgctcgcacctgcctccggcctgcactcccccagttcccgggccctcctgggcaccccaggcagctcctgtttggaaatggggagctggcctaggtgggagccaccactcctgcctgcccccacacccactccacaccagtaataaaaagccaccacacactga

SEQ ID NO: 417163 - DNA, 1107 bp, Homo sapiens
  misc_feature (1)..(1): n is a, c, g, or t
  misc_feature (4)..(4): n is a, c, g, or t
ngcngagactgagcagacgcctccaggatctgtcggcagctgctgttctgagggagagcagagaccatgtctgacatagaagaggtggtggaagagtacgaggaggaggagagcaggaagaagcagctgttgaagaagaggaggactggagagaggacgaagacgagagcaggaggaggcagcggaagaggatgctgaagcagaggctgagaccgaggagaccagggcagaagaagatgaagaagaagaggaagcaaaggaggctgaagatggcccaatggaggagtccaaaccaaagcccaggtcgttcatgcccaacttggtgcctcccaagatccccgatggagagagagtggactttgatgacatccaccggaagcgcatggagaaggacctgaatgagttgcaggcgctgattgaggctcactttgagaacaggaagaaagaggaggaggagctcgtttctctcaaagacaggatcgagagacgtcgggcagagcgggccgagcagcagcgcatccggaatgagcgggagaaggagcggcagaaccgcctggctgaagagagggctcgacgagaggaggaggagaacaggaggaaggctgaggatgaggcccggaagaagaaggctttgtccaacatgatgcattttgggggttacatccagagaagagattctggctgagaggaggaaggtgctggccattgaccacctgaatgaagatcagctgagggagaaggccaaggagctgtggcagagcatctataacttggaggcagagaagttcgacctgcaggagaagttcaagcagcagaaatatgagatcaatgttctccgaaacaggatcaacgataaccagaaagtctccaagacccgcgggaaggctaaagtcaccgggcgctggaaatagagcctggcctccttcaccaaagatctgctcctcgctcgcacctgcctccggcctgcactcccccagttcccgggccctcctgggcaccccaggcagctcctgtttggaaatggggagctggcctaggtgggagccaccactcctgcctgcccccacacccactccacaccagtaataaaaagccaccacacactga

SEQ ID NO: 417164 - DNA, 1122 bp, Homo sapiens
  misc_feature (1)..(1): n is a, c, g, or t
  misc_feature (4)..(4): n is a, c, g, or t
ngcngagactgagcagacgcctccaggatctgtcggcagctgctgttctgagggagagcagagaccatgtctgacatagaagaggtggtggaagagtacgaggaggaggagagcaggaagaagcagctgttgaagaagaggaggactggagagaggacgaagacgagagcaggaggaggcagcggaagaggatgctgaagcagaggctgagaccgaggagaccagggcagaagaagatgaagaagaagaggaagcaaaggaggctgaagatggcccaatggaggagtccaaaccaaagcccaggtcgttcatgcccaacttggtgcctcccaagatccccgatggagagagagtggactttgatgacatccaccggaagcgcatggagaaggacctgaatgagttgcaggcgctgattgaggctcactttgagaacaggaagaaagaggaggaggagctcgtttctctcaaagacaggatcgagagacgtcgggcagagcgggccgagcagcagcgcatccggaatgagcgggagaaggagcggcagaaccgcctggctgaagagagggctcgacgagaggaggaggagaacaggaggaaggctgaggatgaggcccggaagaagaaggctttgtccaacatgatgcattttgggggttacatccagagaagccagacagagcggaaaagtgggaagaggcagactgagcgggaaaagaagaagaagattctggctgagaggaggaagggagaaggccaaggagctgtggcagagcatctataacttggaggcagagaagttcgacctgcaggagaagttcaagcagcagaaatatgagatcaatgttctccgaaacaggatcaacgataaccagaaagtctccaagacccgcgggaaggctaaagtcaccgggcgctggaaatagagcctggcctccttcaccaaagatctgctcctcgctcgcacctgcctccggcctgcactcccccagttcccgggccctcctgggcaccccaggcagctcctgtttggaaatggggagctggcctaggtgggagccaccactcctgcctgcccccacacccactccacaccagtaataaaaagccaccacacactga

SEQ ID NO: 417165 - DNA, 1032 bp, Homo sapiens
  misc_feature (1)..(1): n is a, c, g, or t
  misc_feature (4)..(4): n is a, c, g, or t
ngcngagactgagcagacgcctccaggatctgtcggcagctgctgttctgagggagagcagagaccatgtctgacatagaagaggtggtggaagagtacgaggaggaggagagcaggaagaagcagctgttgaagaagaggaggactggagagaggacgaagacgagagcaggaggaggcagcggaagaggatgctgaagcagaggctgagaccgaggagaccagggcagaagaagatgaagaagaagaggaagcaaaggaggctgaagatggcccaatggaggagtccaaaccaaagcccaggtcgttcatgcccaacttggtgcctcccaagatccccgatggagagagagtggactttgatgacatccaccggaagcgcatggagaaggacctgaatgagttgcaggcgctgattgaggctcactttgagaacaggaagaaagaggaggaggagctcgtttctctcaaagacaggatcgagagacgtcgggcagagcgggccgagcagcagcgcatccggaatgagcgggagaaggagcggcagaaccgcctggctgaagagagggctcgacgagaggaggaggagaacaggaggaaggctgaggatgaggcccggaagaagaaggctttgtccaacatgatgcattttgggggttacatccagagaagccagacagagcggaaaagtgggaagaggcagactgagcgggaaaagaagaagaagattctggctgagaggaggaaggtgctggccattgaccacctgaatgaagatcagctgagggagaaggccaaggagctgtggcagagcatctataacttggaggcagagaagttcgacctgcaggagaagttcaagcagcagaaatatgagcccccttcagctcctgcatctgcccctgctgcctggccttcagcagtgttccatgtccaccgcattgacgactgcttgctggaagtgtctgagagctcgctggggctgagcagagacactttcctggtgttccaaccctgggggtctccaacacg

SEQ ID NO: 417166 - DNA, 898 bp, Homo sapiens
  misc_feature (1)..(1): n is a, c, g, or t
  misc_feature (4)..(4): n is a, c, g, or t
ngcngagactgagcagacgcctccaggatctgtcggcagctgctgttctgagggagagcagagaccatgtctgacatagaagaggtggtggaagagtacgaggaggaggagagcaggaagaagcagctgttgaagaagaggaggactggagagaggacgaagacgagagcaggaggaggcagcggaagaggatgctgaagcagaggctgagaccgaggagaccagggcagaagaagatgaagaagaagaggaagcaaaggaggctgaagatggcccaatggaggagtccaaaccaaagcccaggtcgttcatgcccaacttggtgcctcccaagatccccgatggagagagagtggactttgatgacatccaccggaagcgcatggagaaggacctgaatgagttgcaggcgctgattgaggctcactttgagaacaggaagaaagaggaggaggagctcgtttctctcaaagacaggatcgagagacgtcgggcagagcgggccgagcagcagcgcatccggaatgagcgggagaaggagcggcagaaccgcctggctgaagagagggctcgacgagaggaggaggagaacaggaggaaggctgaggatgaggcccggaagaagaaggctttgtccaacatgatgcattttgggggttacatccagagaagccagacagagcggaaaagtgggaagaggcagactgagcgggaaaagaagaagaagattctggctgagaggaggaaggtgctggccattgaccacctgaatgaagatcagctgaggagaacaggaggaagaggaggaggagctcgtttctctaaagacaagacccaggagaccagcagaagagattaagagaagaggagcaaggagcttagatgcccaattgagatc

SEQ ID NO: 417167 - DNA, 725 bp, Homo sapiens
  misc_feature (1)..(1): n is a, c, g, or t
  misc_feature (4)..(4): n is a, c, g, or t
ngcngagactgagcagacgcctccaggatctgtcggcagctgctgttctgagggagagcagagaccatgtctgacatagaagaggtggtggaagagtacgaggaggaggagcaggaagaagcagctgttgaagagcaggaggaggcagcggaagaggatgctgaagcagaggctgagaccgaggagaccagggcagaagaagatgaagaagaagaggaagcaaaggaggctgaagatggcccaatggaggagtccaaaccaaagcccaggtcgttcatgcccaacttggtgcctcccaagatccccgatggagagagagtggactttgatgacatccaccggaagcgcatggagaaggacctgaatgagttgcaggcgctgattgaggctcactttgagaacaggaagaaagaggaggaggagctcgtttctctcaaagacaggatcgagagacgtcgggcagagcgggccgagcagcagcgcatccggaatgagcgggagaaggagcggcagaaccgcctggctagaaaggctccacggaagagagagagacaagagaagctaggtgaggcccgaagagagctttttccacatgatgcatttgggttacaaccagaagcagccaacaaaccgaaaagtggaggagcaacttaccggaaagaagagaagttctgcttaaggagaagtcctgccattccaccttattagtcactaggagaagccag

SEQ ID NO: 417168 - DNA, 456 bp, Homo sapiens
attcgtgctggtgctaagggaagattctggctgagaggaggaaggtgctggccattgaccacctgaatgaagatcagctgagggagaaggccaaggagctgtggcagagcatctataacttggaggcagagaagttcgacctgcaggagaagttcaagcagcagaaatatgagatcaatgttctccgaaacaggatcaacgataaccagaaagtctccaagacccgcgggaaggctaaagtcaccgggcgctggaaatagagcctggcctccttcaccaaagatctgctcctcgctcgcacctgcctccggcctgcactcccccagttcccgggccctcctgggcaccccaggcagctcctgtttggaaatggggagctggcctaggtgggagccaccactcctgcctgcccccacacccactccacaccagtaataaaaagccaccacacactga

SEQ ID NO: 417169 - DNA, 856 bp, Homo sapiens
ccccatgacagccgcagcctgctccccacctgcaaacttcagccccttctgggcctcgtccgcgcccccaggatctgtcggcagctgctgttctgagggagagcagagaccatgtctgacatagaagaggtggtggaagagtacgaggaggaggagcaggaagaagcagctgttgaagaagaggaggactggagagaggacgaagacgagagcaggaggaggcagcggaagaggatgctgaagcagaggctgagaccgaggagaccagggcagaagaagatgaagaagaagaggaagcaaaggaggctgaagatggcccaatggaggagtccaaaccaaagcccaggtgagtggggaggcacctgggtagagccgggagcagaggctcagggagagaggatgatgatggaacagggtgcagtatggtgcagtggacacgggctgggggtttggtgggcacagagcaccacagtacagttgtacaagttgtgtactgcacaagcgtctcttcctaagggagtgagtgagggctgaattccacccaacactccatcaccaatcgtgcaccctagcagggatggggctatgttcttctagaggaagggccctgaacggacactctcctctctcacagtatggccagaacaccctcctccatggccgaggtgggaccttgggattaagggaagcaaattgtggggagccaaacaatgaaaccgtgccagcataggcatggcggcttcagagagctgagagagggcaggacggcttggtgccacacacgtgaagcccacctgaaggtggtgtgtgctggggggggctgggggatagggagcatttccctttttatgatgcc

SEQ ID NO: 417170 - DNA, 500 bp, Homo sapiens
ctggaggggaggagtgaagagattgggctggctggggaggggggaagctggtgagaggtgaaagagattagttaggcaaagaaggaagagactgacgtgatccttcttgcccctacctcagtttccctagggaatacatgtagttggtagttggggggtgtggcaggaagaagagcataagaacctggccctcctgcaggccttgctccacccccagggggtttggggagggttaggggacagggagggggcaatctggccagtttactctgcttcccacacccccagacagagcggaaaagtgggaagaggcagactgagcgggaaaagaagaagaagattctggctgagaggaggaaggtgctggccattgaccacctgaatgaagatcagctgaggtgggggctgggaggaatggtcctggggcactgcccgcatctgctctgggaggggtcgggccaagggcacttcttgctgtgagccaccagagggcaggactg

SEQ ID NO: 417171 - DNA, 1498 bp, Homo sapiens
  misc_feature (6)..(7): n is a, c, g, or t
  misc_feature (183)..(183): n is a, c, g, or t
  misc_feature (399)..(399): n is a, c, g, or t
  misc_feature (447)..(447): n is a, c, g, or t
  misc_feature (577)..(577): n is a, c, g, or t
agctcnncgactttactgtgccagatgtcatcccaagtccagaaaccatgtctcaggggaggaatctttttactgaaggggcatgaagaggggaaagaacactggccctgggtccagcattgtatcagctgcttcacatccagcatctaatgcagttgccccatctaatgctcaagctgtaangctaccttagtttctccaattaacagatgagagggccaaagctccaagtagttgggcaggttgcccaggatggatgcatacgtagaagatagaacaacccagagtggtgtgattccaaaccatgctttctccattgcatcacagtgatctttaagatcaccagcagagtggactgggacttcagggtaagatcacatcaagatatcaagtccaganaggccaaccccacaccgttcacatgatctctgaaacaattttcaagancagcactgtgaattcaactcgacactcttccatcaagcaaggacggaaaactccaaatgactgcaagacaagagctcccaggaaacacagaattccagagcagattcttcttttgaagtttctgtgaatnaaatctcataatcagagcttcactgcagcagataaatgggccagcgcctgagctcaaatgcacggaagcaaggaagacccaccccgcctgtctcccacctctctcggtgaaaccttcccagatggctgccagaaaggcttcagattcttggggaagcagtcaaatgtttcagcagccatttgacaagtctgtcatcctcctgcctctccctgactctcagatgatgtccatagagaatggagctgttgaggaagccagaaaggaactgaggaagtgacaaatagattcttgtataaaacaaaccaacaaaaattttatgggtgcattgaatgccaggagactcaaaaatagaagtgccttggatctctgtcaacctctaaggggtcccatgggagtgtgcctctcctccttcctctcaattgcattccccagcatctgtctcctgtgagagatgcttcccatctctggcattctactctacttcatcctgtgtgtgaccgccccagaactgtggaatggagttccaagacacagagaattggacaataagcagtgttgatgaggatgtacagcaacagagactctcatcttcctaagttcagtgggagcaaatgttggtaaaatcactttggaaaacagctactattaaaaaaaaaaaagtaccacaaaccagatggcttaaagcaacagaaatttgtgactcacagttctggaggccagaaattcaaaatcaaggtgtcagcagagtttcctggaggtgagagattcatatctgagctttccacctctaatgaggagcggcttcatgaaggaacggacgggattgctccagaaggtcattgattttcagcctctaaaaggacaactgtaatcctggttgatcttaactctcaaatttaataaaatcagtttaaatatttt

SEQ ID NO: 417172 - DNA, 317 bp, Homo sapiens
gtggaattagaagccaagagtgaaaccaagcaggaaaattactggcttattcagtatcaacggcttttgaaccagaagcctttgtccttgaagctgcaggaatgctcagtgatgaaatgagctgaagtcatccctccatgggggcatccactctaccattcaatggacacttattgagcacctgttgtggggcaccaatcactatgccagtccctgggactccagagatgagtgagacttggactcaaggagcttgcagttcaccagtggtggagaggtggaatggactcttgagcaggaatctataaaatgctgtg

SEQ ID NO: 417173 - DNA, 247 bp, Homo sapiens
aaataccctaagcgctaagaaaaccatgtgagagatgacagcacctgggtgttgcatgcaaatattaagaaaagatgcattggagagggcagggaggacatgttcacaggacctgtgccaacccctccctcagccgcaggcagcgcagcacacatcggaacaccctctgcatggggggaagagagggaagcgagtcccagattcaaccttggacctcagcactaccccagtaaaacccagtgcccag

SEQ ID NO: 417174 - DNA, 2485 bp, Homo sapiens
catgacttgagaagttaagtttactgttaattctaactacataactcacatttttgttgcctttatagtggaatctgattatgaagcatgcatcatttagagtcatcttgattgtggacaaaggaaacctaacccagagtggtttaagtgacaaagaggatttattggtcacacagtaggcaaattcagtctttaagcaagacttactcctggacttaaatggtgtgaccaggatctagtttctttctctctactctggctttattttctagtgcaggctctgttcacaagcaggctccatcctgtagtcccaagatggttgccccaggtccctggcccccttggactatggacatccagcagaaaagaggatgcttttctgcttaccatggcccggatatatcagtctcactggcgtgattgatcatgacttggatcatgtgcttctcccgctggtgttggagaatctcatgtgctgttaacttctaaacaggatgcaccccttagagtgaaagtttggtcagtctcaaccaaacaagttggctagaaagattggaatataacagaaaagaggaagaggagaatggatgttgggggtacagctaacaatgtactacagaaaaactattcagctgctttaggataatttgtctcttgagtggtgttgatttaaagatctttcttgagctggcctgaatgaatgattaatcagtcactctagaattggggcttcattatcattcattaacatggaactctatggagatcatgaccctggcttgtgctagtaaagtgatttgtattttaatctctcacctctttttcttgtattttcatttgagtctttaggccagtatgctagtgatggccagttacctttgatcttgagtcttactttctgattccaggctatgtattatctcctttctaaaggaccattttgtttgcaaactacagaacagttccttgttctttgcatgtggtctttcctacagtttgagaggagagcctccagctgtccttagtatccatcatttgtcttaacctttctaggatgtttacctaggtccctcagtaactgtagtcataataatagcaagcactcaatatagtacttatactgtgtgccaggcactgtgggaaatgccggcatatattaacagttaatcccataacaatcatatgagagagattattactgtctacattgtatagatgataaaacaggttccagagagattaagaagcttgcccaagggcttactgctgctaagtggctgaaggcatactaactctgcagtgtatactctttttcagtattcagtaaagtaaaaaaaaaaaaaagatgtaaagctcattggcagagagcattgctagtgaggtaattcaaacatgttaaaaagatctttggaattctcaggaatgcatcctgtggtctagaagaaaccagggcaaaatattgaaaaggaaagatgctgcttccaggttaaatgatactggatgggggggcaggaattgcattcagtgaatttacaagataccaggaaacccatctgttggaggaaggtaatgaaggagattatcttatcctacttattattttacttccttattctgtgggacagaagaatctcttgagtcctctaaaaaactatatgctgatagcaggagttacagaacaattcagtagtgtctggaatagaacagtggtttgaaaagtagagggcttgttaaagcacgggatgctgattcagtaggccttgagtggggataatttacatatccaacaggccaggtgatgccctggcttggggatcacattttgtgactgatgcagagtactgatggtcatccagtccccttccttcggtgtttgagaccacttcatctggaccgagctaaagtctaggaagaaataaagtttcaaacccagtagagttacctcaaagatacacttgagacccttttcagaagatggcaccgaaagtgaagaaggaagctcctggcccgcctaaagctgaagccaaagcaaaggctttaaaggccaagaaggtagtgttgaaaggtgtccacggccacaaaaaaaagaagatccgcatgtcacccaccttccagcggcccaagacactgagactctggaggccgcccagatatcctcggaagaccacccccaggagaaacaagcttgaccactatgctatcatcaagtttcctctgaccactgagtttgctatgaagaagataaaagacaacaacacccttgtgttcactgtggatgttaaagccaacaagcaccagatcaaacaggctgtgaagaagctctgtgacattgatggggccaaggtcaacaccctgatggagagatgaaggcatatgttccactggctcctgattatgatgctttggatgttgccaacaaaattgggatcatccaaactgagtccatctggctaattctaaatatacatatctcttttcaccaaaa

SEQ ID NO: 417175 - DNA, 279 bp, Homo sapiens
aaattggttataaaaaccttataccgccccccccctaagctgaaggtttcctttttaaattaaaatcgttttccactttttacacccccccccattacacctttttgggccccttttttttcccccaaaaaaaaaaaaaaaaaaaaaaaaaaaaaggtccacttgatgtgggagtggtgtggtaggctaaccacttgactttgaggaaagggagatatcttcctgtcccttataggggagtgatacagtgataggcccaacaggagggagtgctattgt

SEQ ID NO: 417176 - DNA, 1493 bp, Homo sapiens
tactactaaattcgcggccgcgtcgacccttagtatccatcatttgtcttaacctttctaggatgtttacctaggtccctcagtaactgtagtcataataatagcaagcactcaatatagtacttatactgtgtgccaggcactgtgggaaatgccggcatatattaacagttaatcccataacaatcatatgagagagattattactgtctacattgtatagatgataaaacaggttccagagagattaagaagcttgcccaagggcttactgctgctaagtggctgaaggcatactaactctgcagtgtatactctttttcagtattcagtaaagtaaaaaaaaaaaaaagatgtaaagctcattggcagagagcattgctagtgaggtaattcaaacatgttaaaaagatctttggaattctcaggaatgcatcctgtggtctagaagaaaccagggcaaaatattgaaaaggaaagatgctgcttccaggttaaatgatactggatgggggggcaggaattgcattcagtgaatttacaagataccaggaaacccatctgttggaggaaggtaatgaaggagattatcttatcctacttattattttacttccttattctgtgggacagaagaatctcttgagtcctctaaaaaactatatgctgatagcaggagttacagaacaattcagtagtgtctggaatagaacagtggtttgaaaagtagagggcttgttaaagcacgggatgctgattcagtaggccttgagtggggataatttacatatccaacaggccaggtgatgccctggcttggggatcacattttgtgactgatgcagagtactgatggtcatccagtccccttccttcggtgtttgagaccacttcatctggaccgagctaaagtctaggaagaaataaagtttcaaacccagtagagttacctcaaagatacacttgagacccttttcagaagatggcaccgaaagtgaagaaggaagctcctggcccgcctaaagctgaagccaaagcaaaggctttaaaggccaagaaggtagtgttgaaaggtgtccacggccacaaaaaaaagaagatccgcatgtcacccaccttccagcggcccaagacactgagactctggaggccgcccagatatcctcggaagaccacccccaggagaaacaagcttgaccactatgctatcatcaagtttcctctgaccactgagtttgctatgaagaagataaaagacaacaacacccttgtgttcactgtggatgttaaagccaacaagcaccagatcaaacaggctgtgaagaagctctgtgacattgatggggccaaggtcaacaccctgatggagagatgaaggcatatgttccactggctcctgattatgatgctttggatgttgccaacaaaattgggatcatccaaactgagtccatctggctaattctaaatatacatatctcttttcaccaaaa

SEQ ID NO: 417177 - DNA, 490 bp, Homo sapiens
tatgattttgttgtgctttttaaatataatctgacactctgctctttaattagggtgttcagaccacttacatttaatgtgattatttatacagttgggcttaaatctactatcttgctttttgatttctctgtctcatcagcccttttgtgtgtgtgtgtgtgtgtgtgtgtgtgttgtgtgtgtgtcagcctctatcttcaagtgattttataccatccttttctgctgtataagaccctattgtcattatacttgcatttctcccgtcgtagaatctgtatgattgttgtttatgttttacttccacataaagtataaatggcacaatattgttactattttttatttaaacaatatattatcttttaggctgggcgcaatggctcacacctataatcctagcactttgggagtccgaggaaggaggatcacttgagtccaggagtttgagaccagccttggcaacatagtgagaccctgtctctac

SEQ ID NO: 417178 - DNA, 2505 bp, Homo sapiens
gataaaactataaaattatggaaaataagtgaacgggataaaagagcagaaggttataacctgaaagacgaagatggaagacttcgagacccatttaggatcacggcgctacggatgacctgagaattaatttatggcacttagaaatcacagatagaagctttaacatcgtggacatcaagcctgctaacatggaggagctgaccgaagtcatcactgcagccgagttccacccgcaccagtgcaacgtgttcgtctacagcagtagcaaagggaccatccgcctgtgtgacatgcgctcctcggccctgtgcgacagacactccaagttttttgaagagcctgaagatcccagcagtaggtccttcttctcagaaataatttcatccatatccgatgtaaaattcagtcatagtgggcggtacatgatgaccagagactacctgtcggtgaaggtgtgggacctcaacatggagagcaggccggtggagacccaccaggtccacgagtacctgcgcagcaagctctgctctctctatgagaacgactgcatctttgacaagtttgagtgttgctggaacggttcggatagcgccatcatgaccgggtcctataacaacttcttcaggatgtttgatagagacacgcggagggatgtgaccctggaggcctcgagagagagcagcaaaccgcgcgccagcctcaaaccccggaagagaacaatggcagatggatcgagtacgacaggacagaaaccgcgatcaacaacctcaaccccgccttctccaagaagttcgtgcttgactaccacttcgaggaggtacagaagctcaagttcgcgctctttgaccaggacaagtccagtatgcggctggacgagcatgacttcctgggccagttctcctgcagcctgggcacgatcgtctccagcaagaagatcactaggcctctgctgctgctgaatgacaagcctgcggggaagggcttgattacgatcgctgcccaggagctgtccgacaaccgcgtcatcacactaagcctggcgggcaggaggctggacaagaaggacctctttgggaagtcagacccctttctggagttttataagccaggagacgatggcaagtggatgctggtccacaggactgaggtgatcaagtacacactggaccctgtgtggaagccattcacagtgcccttggtgtccctgtgtgatggggacatggagaagcccatccaggtcatgtgctacgactatgacaatgacgggggccatgacttcatcggcgagttccagacctcagtgtcacagatgtgtgaggctcgagacagcgtcccgctggagttcgagtgcatcaaccccaagaagcagaggaagaagaagaactataaaaactcgggcatcatcatcctgcgatcctgcaagataaaccgagactactccttccttgactacatcctgggaggctgccagctcatgttcaccgttggaatagactttacagcctccaacgggaatcccctcgacccttcctctttgcactatatcaaccctatgggcaccaacgaatatctgtcggccatctgggctgttgggcagatcattcaggactacgacagtgataagatgtttccagctctgggattcggggcccagttacccccagactggaaggtctcccatgagtttgccatcaacttcaaccccaccaaccccttctgctcaggtgtggatggtattgcccaggcgtactcagcttgcctgccccacatccgcttctacggtcctaccaatttctcccccatcgtcaaccacgtggcccggtttgcggcccaggccacacaacagcggacggccacgcagtacttcatcctcctcatcatcacggacggggtcatcagtgacatggaggagacacggcatgccgtggtgcaggcttccaagctgcccatgtccatcatcatcgtgggcgtgggcaatgcggacttcgctgccatggagttcctggatggggacagccgcatgctgcgctcccacacgggggaggaggcagcccgcgatattgtgcagttcgttccctttcgagagttccgcaacgcagcaaaagagaccttggccaaagctgtgctggcggagctgccccaacaagttgtgcagtatttcaagcataaaaacctgccccccaccaactcggagcccgcctgagctccagtgcccagcagcagcatgtcagctgagcctcctgccctcccccaggaacatgcacgctcactctgcttccttgtgggtggcctttttttaccgatccccttttttattttttacaaccggacctccacccccaacttcctccagcccagctgggcttcctttgttggagtcaactgttgatgcttccaggccaaactggcttcctctcctcctctccccacctttgccattcttaagtattgaatgtactttgtataattttagtggaattgttattgagaataaaattttta

SEQ ID NO: 417179 - DNA, 970 bp, Homo sapiens
tcgggttgcaattcctccctgtacgaaaggacaagagaaataaggcctacttcacaaagcgccttcccccgtaaatgatatcatctcaacttagtattatacccacacccacccgatcgtgggcagatcattcaggactacgacagtgataagatgtttccagctctgggattcggggcccagttacccccagactggaaggtctcccatgagtttgccatcaacttcaaccccaccaaccccttctgctcaggtgtggatggtattgcccaggcgtactcagcttgcctgccccacatccgcttctacggtcctaccaatttctcccccatcgtcaaccacgtggcccggtttgcggcccaggccacacaacagcggacggccacgcagtacttcatcctcctcatcatcacggacggggtcatcagtgacatggaggagacacggcatgccgtggtgcaggcttccaagctgcccatgtccatcatcatcgtgggcgtgggcaatgcggacttcgctgccatggagttcctggatggggacagccgcatgctgcgctcccacacgggggaggaggcagcccgcgatattgtgcagttcgttccctttcgagagttccgcaacgcagcaaaagagaccttggccaaagctgtgctggcggagctgccccaacaagttgtgcagtatttcaagcataaaaacctgccccccaccaactcggagcccgcctgagctccagtgcccagcagcagcatgtcagctgagcctcctgccctcccccaggaacatgcacgctcactctgcttccttgtgggtggcctttttttaccgatccccttttttattttttacaaccggacctccacccaattctcagccagtggctccttgtggagtcactgtggagttcaaggcaaaggtcttctctctcccactttgcatctagatgagtgcgtacggagtttggaac

SEQ ID NO: 417180 - DNA, 2105 bp, Homo sapiens
cagggtccagtacgcctggctgctgctgggctggcgcagagggacccactcttccccccgcctgccccaactccagacatcatgtgctccccgtttcggggatccagaagcttccagccagaggactgccaggaactcctgccaccgccaccggctcccatggcccacatacccagtgggggtgccccagcagcgggggcagcccccatgggcccccagtattgcgtgtgcaaggtggagctgtcagtgagtggccagaacctactggaccgggatgttacctccaagtccgaccccttctgtgtcctctttacagagaacaatggcagatggatcgagtacgacaggacagaaaccgcgatcaacaacctcaaccccgccttctccaagaagttcgtgcttgactaccacttcgaggaggtacagaagctcaagttcgcgctctttgaccaggacaagtccagtatgcggctggacgagcatgacttcctgggccagttctcctgcagcctgggcacgatcgtctccagcaagaagatcactaggcctctgctgctgctgaatgacaagcctgcggggaagggcttgattacgatcgctgcccaggagctgtccgacaaccgcgtcatcacactaagcctggcgggcaggaggctggacaagaaggacctctttgggaagtcagacccctttctggagttttataagccaggagacgatggcaagtggatgctggtccacaggactgaggtgatcaagtacacactggaccctgtgtggaagccattcacagtgcccttggtgtccctgtgtgatggggacatggagaagcccatccaggtcatgtgctacgactatgacaatgacgggggccatgacttcatcggcgagttccagacctcagtgtcacagatgtgtgaggctcgagacagcgtcccgctggagttcgagtgcatcaaccccaagaagcagaggaagaagaagaactataaaaactcgggcatcatcatcctgcgatcctgcaagataaaccgagactactccttccttgactacatcctgggaggctgccagctcatgttcaccgttggaatagactttacagcctccaacgggaatcccctcgacccttcctctttgcactatatcaaccctatgggcaccaacgaatatctgtcggccatctgggctgttgggcagatcattcaggactacgacagtgataagatgtttccagctctgggattcggggcccagttacccccagactggaaggtctcccatgagtttgccatcaacttcaaccccaccaaccccttctgctcaggtgtggatggtattgcccaggcgtactcagcttgcctgccccacatccgcttctacggtcctaccaatttctcccccatcgtcaaccacgtggcccggtttgcggcccaggccacacaacagcggacggccacgcagtacttcatcctcctcatcatcacggacggggtcatcagtgacatggaggagacacggcatgccgtggtgcaggcttccaagctgcccatgtccatcatcatcgtgggcgtgggcaatgcggacttcgctgccatggagttcctggatggggacagccgcatgctgcgctcccacacgggggaggaggcagcccgcgatattgtgcagttcgttccctttcgagagttccgcaacgcagcaaaagagaccttggccaaagctgtgctggcggagctgccccaacaagttgtgcagtatttcaagcataaaaacctgccccccaccaactcggagcccgcctgagctccagtgcccagcagcagcatgtcagctgagcctcctgccctcccccaggaacatgcacgctcactctgcttccttgtgggtggcctttttttaccgatccccttttttattttttacaaccggacctccacccccaacttcctccagcccagctgggcttcctttgttggagtcaactgttgatgcttccaggccaaactggcttcctctcctcctctccccacctttgccattcttaagtattgaatgtactttgtataattttagtggaattgttattgagaataaaattttta

SEQ ID NO: 417181 - DNA, 2141 bp, Homo sapiens
ccaggggctgtctggcctgggattattggatctgccgcccgcccgggcgggaggaggaccggaccccgagcggctgggagcgcacgcgagcgggccgtggccgcgcgggcagcgccctgagcctgtcccgcgcccgcgggcccggccgagcaggagcagctcccggggatgcccgggcggctcggagcgcgggcagcggcagccgtgcggtgagggcggtggcgcccgcgggacctgcgactgccaggaactcctgccaccgccaccggctcccatggcccacatacccagtgggggtgccccagcagcgggggcagcccccatgggcccccagtattgcgtgtgcaaggtggagctgtcagtgagtggccagaacctactggaccgggatgttacctccaagtccgaccccttctgtgtcctctttacagagaacaatggcagatggatcgagtacgacaggacagaaaccgcgatcaacaacctcaaccccgccttctccaagaagttcgtgcttgactaccacttcgaggaggtacagaagctcaagttcgcgctctttgaccaggacaagtccagtatgcggctggacgagcatgacttcctgggccagttctcctgcagcctgggcacgatcgtctccagcaagaagatcactaggcctctgctgctgctgaatgacaagcctgcggggaagggcttgattacgatcgctgcccaggagctgtccgacaaccgcgtcatcacactaagcctggcgggcaggaggctggacaagaaggacctctttgggaagtcagacccctttctggagttttataagccaggagacgatggcaagtggatgctggtccacaggactgaggtgatcaagtacacactggaccctgtgtggaagccattcacagtgcccttggtgtccctgtgtgatggggacatggagaagcccatccaggtcatgtgctacgactatgacaatgacgggggccatgacttcatcggcgagttccagacctcagtgtcacagatgtgtgaggctcgagacagcgtcccgctggagttcgagtgcatcaaccccaagaagcagaggaagaagaagaactataaaaactcgggcatcatcatcctgcgatcctgcaagataaaccgagactactccttccttgactacatcctgggaggctgccagctcatgttcaccgttggaatagactttacagcctccaacgggaatcccctcgacccttcctctttgcactatatcaaccctatgggcaccaacgaatatctgtcggccatctgggctgttgggcagatcattcaggactacgacagtgataagatgtttccagctctgggattcggggcccagttacccccagactggaaggtctcccatgagtttgccatcaacttcaaccccaccaaccccttctgctcaggtgtggatggtattgcccaggcgtactcagcttgcctgccccacatccgcttctacggtcctaccaatttctcccccatcgtcaaccacgtggcccggtttgcggcccaggccacacaacagcggacggccacgcagtacttcatcctcctcatcatcacggacggggtcatcagtgacatggaggagacacggcatgccgtggtgcaggcttccaagctgcccatgtccatcatcatcgtgggcgtgggcaatgcggacttcgctgccatggagttcctggatggggacagccgcatgctgcgctcccacacgggggaggaggcagcccgcgatattgtgcagttcgttccctttcgagagttccgcaacgcagcaaaagagaccttggccaaagctgagctccagtgcccagcagcagcatgtcagctgagcctcctgccctcccccaggaacatgcacgctcactctgcttccttgtgggtggcctttttttaccgatccccttttttattttttacaaccggacctccacccccaacttcctccagcccagctgggcttcctttgttggagtcaactgttgatgcttccaggccaaactggcttcctctcctcctctccccacctttgccattcttaagtattgaatgtactttgtataattttagtggaattgttattgagaataaaattttta

SEQ ID NO: 417182 - DNA, 1405 bp, Homo sapiens
ccaggggctgtctggcctgggattattggatctgccgcccgcccgggcgggaggaggaccggaccccgagcggctgggagcgcacgcgagcgggccgtggccgcgcgggcagcgccctgagcctgtcccgcgcccgcgggcccggccgagcaggagcagctcccggggatgcccgggcggctcggagcgcgggcagcggcagccgtgcggtgagggcggtggcgcccgcgggacctgcgactgccaggaactcctgccaccgccaccggctcccatggcccacatacccagtgggggtgccccagcagcgggggcagcccccatgggcccccagtattgcgtgtgcaaggtggagctgtcagtgagtggccagaacctactggaccgggatgttacctccaagtccgaccccttctgtgtcctctttacagagaacaatggcagatggatcgagtacgacaggacagaaaccgcgatcaacaacctcaaccccgccttctccaagaagttcgtgcttgactaccacttcgaggaggtacagaagctcaagttcgcgctctttgaccaggacaagtccagtatgcggctggacgagcatgacttcctgggccagttctcctgcagcctgggcacgatcgtctccagcaagaagatcactaggcctctgctgctgctgaatgacaagcctgcggggaagggcttgattacgatcgctgcccaggagctgtccgacaaccgcgtcatcacactaagcctggcgggcaggaggctggacaagaaggacctctttgggaagtcagacccctttctggagttttataagccaggagacgatggcaagtggatgctggtccacaggactgaggtgatcaagtacacactggaccctgtgtggaagccattcacagtgcccttggtgtccctgtgtgatggggacatggagaagcccatccaggtcatgtgctacgactatgacaatgacgggggccatgacttcatcggcgagttccagacctcagtgtcacagatgtgtgaggctcgagacagcgtcccgctggagttcgagtgcatcaaccccaagaagcagaggaagaagaagaactataaaaactcgggcatcatcatcctgcgatcctgcaagataaaccgagactactccttccttgactacatcctgggaggctgccagctcatgttcaccgttggaatagactttcagctccaagggatccctcgaccttcttctttgggtatataacccttggggcgcacgatttctcgcggcaacggggtgtgggggcgacctccgggactccacgggctagatgttcccctggtcggggccgtccccgatggggggcccggttggctattccccacctttgtggtgggttgccgcgtctgc

SEQ ID NO: 417183 - DNA, 1222 bp, Homo sapiens
ccaggggctgtctggcctgggattattggatctgccgcccgcccgggcgggaggaggaccggaccccgagcggctgggagcgcacgcgagcgggccgtggccgcgcgggcagcgccctgagcctgtcccgcgcccgcgggcccggccgagcaggagcagctcccggggatgcccgggcggctcggagcgcgggcagcggcagccgtgcggtgagggcggtggcgcccgcgggacctgcgactgccaggaactcctgccaccgccaccggctcccatggcccacatacccagtgggggtgccccagcagcgggggcagcccccatgggcccccagtattgcgtgtgcaaggtggagctgtcagtgagtggccagaacctactggaccgggatgttacctccaagtccgaccccttctgtgtcctctttacagagaacaatggcagatggatcgagtacgacaggacagaaaccgcgatcaacaacctcaaccccgccttctccaagaagttcgtgcttgactaccacttcgaggaggtacagaagctcaagttcgcgctctttgaccaggacaagtccagtatgcggctggacgagcatgacttcctgggccagttctcctgcagcctgggcacgatcgtctccagcaagaagatcactaggcctctgctgctgctgaatgacaagcctgcggggaagggcttgattacgatcgctgcccaggagctgtccgacaaccgcgtcatcacactaagcctggcgggcaggaggctggacaagaaggacctctttgggaagtcagacccctttctggagttttataagccaggagacgatggcaagtggatgctggtccacaggactgaggtgatcaagtacacactggaccctgtgtggaagccattcacagtgcccttggtgtccctgtgtgatggggacatggagaagcccatccaggtcatgtgctacgactatgacaatgacgggggccatgacttcatcggcgagttccagacctcagtgtcacagatgtgtgaggctcgagacagcgtcccgctggagttcgagtgcatcaaccccaagaagcagaggaagggtcgaggggattcccgttggaggctgtaaagtctattccaacggtgaacatgagctggcagcctcccaggatgtagtcaattttaggagtagtctcggtttatcttgcaggatcgcaggatgatgatg

SEQ ID NO: 417184 - DNA, 1257 bp, Homo sapiens
cctcattttgtagacggaaaacaaggcctcccagtcatcttaggttgacctcctctccctaaagccctctgcctgggagaatggtgtccccagccttgttcctggaagtggctctggctttatttgcaggtgatcccagatctgcccacaaggaggccggggttggcctcctgatcactgccctagcagcagggtccatgaggagtcccataggggagcagtctctccactgtaccgctgtactgtaatgccacccccatactgctggctgggggcttaacccagcctcagcaagaactgcccatgctggtttgcacccagtggccctcacctctcttcccagcatcctctggggttgcctgcgatggttctactccttcctctggagcattcgcttcctaaggacaaaccctgggcatcggtcaccccttcatgcacaggtcggtgaccgagtacctccatgtgcctggcctgtggctggctgttcactagtgaaccatactgtcaggcccatttattcccgccaagaaggtgctcaggagatgtttgccggacacataggtgcttcccgcagacggagtcatcctaacccgttactcccaagcatctcaagtgctccaggtaacacttacacctaacctaaaggaaggcactgcgatcagggggaatttcaggcctggcctgggctgagatgagggatgccacttgcagacagccctggcccgcagccctaattttgtcctcaatggacacctgctgtagcagccctctgggcatagtgccgctcacaacttccggtcattaatccttattctctctcttccccaccccaccctcctccaccctgcaggcagcaaaagagaccttggccaaagctgtgctggcggagctgccccaacaagttgtgcagtatttcaagcataaaaacctgccccccaccaactcggagcccgcctgagctccagtgcccagcagcagcatgtcagctgagcctcctgccctcccccaggaacatgcacgctcactctgcttccttgtgggtggcctttttttaccgatccccttttttattttttacaaccggacctccacccccaacttcctccagcccagctgggcttcctttgttggagtcaactgttgatgcttccaggccaaactggcttcctctcctcctctccccacctttgccattcttaagtattgaatgtactttgtataattttagtggaattgttattgagaataaaattttta

SEQ ID NO: 417185 - DNA, 292 bp, Homo sapiens
cactagagggtacagcctccatcagtggggcagacacactttctccttttcccagcaatcacagaagtcttcctgcaggaggcagttcaggagctatccaggccagctaggcagatgctgaggagaggcactacccaaacagaagacagagggtttgcttggggagttgagaggggctggagagcacctcttgggggacagctctggggtgaccgtgctgaacccaccccaggtcatgtgctacgactatgacaatgacgggggccatgacttcatcggcgagttccagacc

SEQ ID NO: 417186 - DNA, 2220 bp, Homo sapiens
ccaggggctgtctggcctgggattattggatctgccgcccgcccgggcgggaggaggaccggaccccgagcggctgggagcgcacgcgagcgggccgtggccgcgcgggcagcgccctgagcctgtcccgcgcccgcgggcccggccgagcaggagcagctcccggggatgcccgggcggctcggagcgcgggcagcggcagccgtgcggtgagggcggtggcgcccgcgggacctgcgactgccaggaactcctgccaccgccaccggctcccatggcccacatacccagtgggggtgccccagcagcgggggcagcccccatgggcccccagtattgcgtgtgcaaggtggagctgtcagtgagtggccagaacctactggaccgggatgttacctccaagtccgaccccttctgtgtcctctttacagagaacaatggcagatggatcgagtacgacaggacagaaaccgcgatcaacaacctcaaccccgccttctccaagaagttcgtgcttgactaccacttcgaggaggtacagaagctcaagttcgcgctctttgaccaggacaagtccagtatgcggctggacgagcatgacttcctgggccagttctcctgcagcctgggcacgatcgtctccagcaagaagatcactaggcctctgctgctgctgaatgacaagcctgcggggaagggcttgattacgatcgctgcccaggagctgtccgacaaccgcgtcatcacactaagcctggcgggcaggaggctggacaagaaggacctctttgggaagtcagacccctttctggagttttataagccaggagacgatggcaagtggatgctggtccacaggactgaggtgatcaagtacacactggaccctgtgtggaagccattcacagtgcccttggtgtccctgtgtgatggggacatggagaagcccatccaggtcatgtgctacgactatgacaatgacgggggccatgacttcatcggcgagttccagacctcagtgtcacagatgtgtgaggctcgagacagcgtcccgctggagttcgagtgcatcaaccccaagaagcagaggaagaagaagaactataaaaactcgggcatcatcatcctgcgatcctgcaagataaaccgagactactccttccttgactacatcctgggaggctgccagctcatgttcaccgttggaatagactttacagcctccaacgggaatcccctcgacccttcctctttgcactatatcaaccctatgggcaccaacgaatatctgtcggccatctgggctgttgggcagatcattcaggactacgacagtgataagatgtttccagctctgggattcggggcccagttacccccagactggaaggtctcccatgagtttgccatcaacttcaaccccaccaaccccttctgctcaggtgtggatggtattgcccaggcgtactcagcttgcctgccccacatccgcttctacggtcctaccaatttctcccccatcgtcaaccacgtggcccggtttgcggcccaggccacacaacagcggacggccacgcagtacttcatcctcctcatcatcacggacggggtcatcagtgacatggaggagacacggcatgccgtggtgcaggcttccaagctgcccatgtccatcatcatcgtgggcgtgggcaatgcggacttcgctgccatggagttcctggatggggacagccgcatgctgcgctcccacacgggggaggaggcagcccgcgatattgtgcagttcgttccctttcgagagttccgcaacgcagcaaaagagaccttggccaaagctgtgctggcggagctgccccaacaagttgtgcagtatttcaagcataaaaacctgccccccaccaactcggagcccgcctgagctccagtgcccagcagcagcatgtcagctgagcctcctgccctcccccaggaacatgcacgctcactctgcttccttgtgggtggcctttttttaccgatccccttttttattttttacaaccggacctccacccccaacttcctccagcccagctgggcttcctttgttggagtcaactgttgatgcttccaggccaaactggcttcctctcctcctctccccacctttgccattcttaagtattgaatgtactttgtataattttagtggaattgttattgagaataaaattttta

SEQ ID NO: 417187 - DNA, 1930 bp, Homo sapiens
gctgcgatcctgcaagataaaccgagactactccttccttgactacatcctgggaggctgccagctcatgttcaccgttggaatagactttacagcctccaacgggaatcccctccgaccccttctgtgtcctctttacagagaacaatggcagatggatcgagtacgacaggacagaaaccgcgatcaacaacctcaaccccgccttctccaagaagttcgtgcttgactaccacttcgaggaggtacagaagctcaagttcgcgctctttgaccaggacaagtccagtatgcggctggacgagcatgacttcctgggccagttctcctgcagcctgggcacgatcgtctccagcaagaagatcactaggcctctgctgctgctgaatgacaagcctgcggggaagggcttgattacgatcgctgcccaggagctgtccgacaaccgcgtcatcacactaagcctggcgggcaggaggctggacaagaaggacctctttgggaagtcagacccctttctggagttttataagccaggagacgatggcaagtggatgctggtccacaggactgaggtgatcaagtacacactggaccctgtgtggaagccattcacagtgcccttggtgtccctgtgtgatggggacatggagaagcccatccaggtcatgtgctacgactatgacaatgacgggggccatgacttcatcggcgagttccagacctcagtgtcacagatgtgtgaggctcgagacagcgtcccgctggagttcgagtgcatcaaccccaagaagcagaggaagaagaagaactataaaaactcgggcatcatcatcctgcgatcctgcaagataaaccgagactactccttccttgactacatcctgggaggctgccagctcatgttcaccgttggaatagactttacagcctccaacgggaatcccctcgacccttcctctttgcactatatcaaccctatgggcaccaacgaatatctgtcggccatctgggctgttgggcagatcattcaggactacgacagtgataagatgtttccagctctgggattcggggcccagttacccccagactggaaggtctcccatgagtttgccatcaacttcaaccccaccaaccccttctgctcaggtgtggatggtattgcccaggcgtactcagcttgcctgccccacatccgcttctacggtcctaccaatttctcccccatcgtcaaccacgtggcccggtttgcggcccaggccacacaacagcggacggccacgcagtacttcatcctcctcatcatcacggacggggtcatcagtgacatggaggagacacggcatgccgtggtgcaggcttccaagctgcccatgtccatcatcatcgtgggcgtgggcaatgcggacttcgctgccatggagttcctggatggggacagccgcatgctgcgctcccacacgggggaggaggcagcccgcgatattgtgcagttcgttccctttcgagagttccgcaacgcagcaaaagagaccttggccaaagctgtgctggcggagctgccccaacaagttgtgcagtatttcaagcataaaaacctgccccccaccaactcggagcccgcctgagctccagtgcccagcagcagcatgtcagctgagcctcctgccctcccccaggaacatgcacgctcactctgcttccttgtgggtggcctttttttaccgatccccttttttattttttacaaccggacctccacccccaacttcctccagcccagctgggcttcctttgttggagtcaactgttgatgcttccaggccaaactggcttcctctcctcctctccccacctttgccattcttaagtattgaatgtactttgtataattttagtggaattgttattgagaataaaattttta

SEQ ID NO: 417188 - DNA, 1031 bp, Homo sapiens
tcgggttgcaattcctccctgtacgaaaggacaagagaaataaggcctacttcacaaagcgccttcccccgtaaatgatatcatctcaacttagtattatacccacacccacccgatcgtgggcagatcattcaggactacgacagtgataagatgtttccagctctgggattcggggcccagttacccccagactggaaggtctcccatgagtttgccatcaacttcaaccccaccaaccccttctgctcaggtgtggatggtattgcccaggcgtactcagcttgcctgccccacatccgcttctacggtcctaccaatttctcccccatcgtcaaccacgtggcccggtttgcggcccaggccacacaacagcggacggccacgcagtacttcatcctcctcatcatcacggacggggtcatcagtgacatggaggagacacggcatgccgtggtgcaggcttccaagctgcccatgtccatcatcatcgtgggcgtgggcaatgcggacttcgctgccatggagttcctggatggggacagccgcatgctgcgctcccacacgggggaggaggcagcccgcgatattgtgcagttcgttccctttcgagagttccgcaacgcagcaaaagagaccttggccaaagctgtgctggcggagctgccccaacaagttgtgcagtatttcaagcataaaaacctgccccccaccaactcggagcccgcctgagctccagtgcccagcagcagcatgtcagctgagcctcctgccctcccccaggaacatgcacgctcactctgcttccttgtgggtggcctttttttaccgatccccttttttattttttacaaccggacctccacccccaacttcctccagcccagctgggcttcctttgttggagtcaactgttgatgcttccaggccaaactggcttcctctcctcctctccccacctttgccattcttaagtattgaatgtactttgtataattttagtggaattgttattgagaataaaattttta

SEQ ID NO: 417189 - DNA, 293 bp, Homo sapiens
  misc_feature (4)..(4): n is a, c, g, or t
  misc_feature (72)..(72): n is a, c, g, or t
  misc_feature (81)..(81): n is a, c, g, or t
  misc_feature (117)..(117): n is a, c, g, or t
  misc_feature (239)..(239): n is a, c, g, or t
  misc_feature (267)..(267): n is a, c, g, or t
gatntagtcttactaaagacgtgggaggaagttctccagctgagcagctttccccaacgtggaagggaccangcaaggacncctgagttctccaacagacgttcaacgccaggggantcacaggtgggtgcacctgtgtggaagtaaagctgttgcttattctgggagcccaatcctaggctgagggaggtgggcgcggggctgtttaagcgttggcggaggccgggctgggtcgctgngcgtctgctcctccttctcgcgcttctnctgccgccctaatcctgccttggcca

SEQ ID NO: 417190 - DNA, 3081 bp, Homo sapiens
tctgagttgcttacttcgaaggctgtgctccgctcaccatccagagcggaggtgcggaccttaaactcactcctggagaaagatctgcaagtgcgcagagagaagactggcagtggagcatgcatctggagggcagagacggcaggcggtaccccggcgcgccggcggtggagctcctgcagacgtccgtgcccagcggactcgctgaacttgtggccggcaagcgcaggcttcctcggggagccggtggagctgacccctcgcactcctgccccaggggggctgccgggcagagctcttgggctcctgcaggccaggagtttgcttcattcctcacaaaagggaggtctcactcttctttgccccagatgtccagctccaggtctaaagattcctgctttacagaaaacactcctttgctgaggaattccttacaggagaaagggtcacggtgcatacctgtttaccatccagagttcatcactgctgaagagtcttgggaagacagctctgctgactgggagcgaagatacctgctaagcagggaggtgtctggtctgtctgcatctgcctcctccgagaagggagaccttctggacagcccgcacatccgactccgtctttccaagctgaggcgctgtgtgcagtggctgaaagtcatgggcctgtttgcctttgtggtgctgtgttctattttgttcagcctatatccggatcaaggaaagctctggcagctgttggccttatcaccgctggagaactactccgtgaaccttagcagccacgtggactccacgctgctgcaggtggacctggcaggggccctagtggccagtgggccgagtcgtcctgggagggaagagcacatcgtggtggagctgacccaggctgacgctttgggctccaggtggcggcggccacagcaggtcactcacaactggacggtgtatttaaatccgaggagaagcgagcactcagtgatgagcaggacctttgaggtactgaccagagagacggtgtccatcagcatccgggcctccctgcagcagacccaggctgtccctcttttgatggctcatcagtacctccgcggaagtgtagaaacccaggtgaccatcgcgacggccatcctcgcgggcgtctacgcgctgatcatatttgagagacccagcctgacccatgtggtggagtggattgattttgagacgctggccctgctgtttggcatgatgatcttagtagccatattttcagaaacgggatttttcgattattgtgctgtaaaggcataccggctctcccggggacgggtgtgggccatgatcatcatgctctgtctcatcgcggccgtcctctctgccttcttggacaacgtcaccaccatgctcctcttcacgcctgtgaccataaggttgtgtgaggtgctcaaccttgatccaagacaagtcctgattgcagaagtgatcttcacaaacattggaggagctgccactgccatcggggaccctccaaatgtcattattgtttccaaccaagagctgaggaagatgggcctggactttgccggattcactgcacacatgttcattgggatttgtcttgttctcctggtctgctttccgctcctcagactcctttactggaacagaaagctttataacaaggaacccagtgagattgttgaactgaagcacgagattcacgtctggcgcctgactgctcagcgcatcagcccggccagccgcgaggagacagctgtgcgccgcctgctgctggggaaggtgctggcactggagcacctgctcgcccggaggctgcacaccttccacagacagatctcacaggaggacaaaaattgggagaccaatatccaagaactccaaaaaaagcataggatatctgacgggattctgctcgccaaatgcctgacagtgttgggatttgttatcttcatgtttttcctcaattcgtttgtccctggcattcatcttgatcttggatggattgctattctgggtgccatctggttgctaattttagctgatattcatgattttgagataattctacacagagtggaatgggcaacccttctgttttttgcagcgctctttgttctgatggaggcattggcacatctccacttaatagaatatgttggagaacaaactgctttgctaataaagatggtcccagaggagcagcgcctcatagccgccattgtcctggtggtgtgggtctcagccctggcgtcgtccctgattgacaacatcccgttcactgctaccatgattcccgtgctcctgaacctgagccacgaccctgaggttggcctgcccgcaccgccgctcatgtatgccctggccttcggtgcttgcctgggaggtaacgggacactgattggcgcgtcggcaaacgtcgtgtgtgcagggattgcagaacagcatggatatgggttctccttcatggaatttttcaggctgggcttcccaatgatggttgtgtcctgcactgttgggatgtgttatctccttgtggctcatgtggtggtgggatggaattaatagacatccatctattgctcgaagactaaaggaaacttcatccatcacaacccattagtcataaaactaccctgaccccactgtttgaagaagaaaaggtgcttaccctggagatgctacagagacacagtggaatagaccttgacactaacactctaattcaagcgaatgttggaacaccatgacctcctctgtgtgtcctttctccccaaggacaaaatgtagaaagatgtgagataacttactcaagattcccctccagaaaaatacgtatgtttaaaaacccttcctgctatacataggaaaagacacacatccacctaaaattgactgtactgtttaactgtcaattctcctgaggctaaacacagtttgtttttcttgtaatcacttttcatgttaaaataatcagcattcaaattgtatgctttctgaatatagactttctgggaaaaggtttactgctcgtaaggaaacattttatgtattaaaataaactgttccttgataaaaggct

SEQ ID NO: 417191 - DNA, 303 bp, Homo sapiens
gctgggattacaggcgtgagccaccatgcctgggctgccatttcatttccccttgtttatttccagggcctggactttgccggattcactgcacacatgttcattgggatttgtcttgttctcctggtctgctttccgctcctcagactcctttactggaacagaaagctttataacaaggaacccagtgagattgttgcatcaacaacagatctgcaacctgtgacacaataatgttaatgtggaaatataaaaaagaaccacattgcccagatcaggatgtcatttcagtcttttgtaact

SEQ ID NO: 417192 - DNA, 2919 bp, Homo sapiens
tctgagttgcttacttcgaaggctgtgctccgctcaccatccagagcggaggtgcggaccttaaactcactcctggagaaagatctgcaagtgcgcagagagaagactggcagtggagcatgcatctggagggcagagacggcaggcggtaccccggcgcgccggcggtggagctcctgcagacgtccgtgcccagcggactcgctgaacttgtggccggcaagcgcaggcttcctcggggagccggtggagctgacccctcgcactcctgccccaggggggctgccgggcagagctcttgggctcctgcaggccaggagtttgcttcattcctcacaaaagggaggtctcactcttctttgccccagatgtccagctccaggtctaaagattcctgctttacagaaaacactcctttgctgaggaattccttacaggagaaagggtcacggtgcatacctgtttaccatccagagttcatcactgctgaagagtcttgggaagacagctctgctgactgggagcgaagatacctgctaagcagggaggtgtctggtctgtctgcatctgcctcctccgagaagggagaccttctggacagcccgcacatccgactccgtctttccaagctgaggcgctgtgtgcagtggctgaaagtcatgggcctgtttgcctttgtggtgctgtgttctgtcactcacaactggacggtgtatttaaatccgaggagaagcgagcactcagtgatgagcaggacctttgaggtactgaccagagagacggtgtccatcagcatccgggcctccctgcagcagacccaggctgtccctcttttgatggctcatcagtacctccgcggaagtgtagaaacccaggtgaccatcgcgacggccatcctcgcgggcgtctacgcgctgatcatatttgagatcgtgcacagaactctggcggccatgctgggttcccttgcagcactggcagcactggctgtgattggcgatagacccagcctgacccatgtggtggagtggattgattttgagacgctggccctgctgtttggcatgatgatcttagtagccatattttcagaaacgggatttttcgattattgtgctgtaaaggcataccggctctcccggggacgggtgtgggccatgatcatcatgctctgtctcatcgcggccgtcctctctgccttcttggacaacgtcaccaccatgctcctcttcacgcctgtgaccataaggttgtgtgaggtgctcaaccttgatccaagacaagtcctgattgcagaagtgatcttcacaaacattggaggagctgccactgccatcggggaccctccaaatgtcattattgtttccaaccaagagctgaggaagatgggcctggactttgccggattcactgcacacatgttcattgggatttgtcttgttctcctggtctgctttccgctcctcagactcctttactggaacagaaagctttataacaaggaacccagtgagattgttgaactgaagcacgagattcacgtctggcgcctgactgctcagcgcatcagcccggccagccgcgaggagacagctgtgcgccgcctgctgctggggaaggtgctggcactggagcacctgctcgcccggaggctgcacaccttccacagacagatctcacaggaggacaaaaattgggagaccaatatccaagaactccaaaaaaagcataggatatctgacgggattctgctcgccaaatgcctgacagtgttgggatttgttatcttcatgtttttcctcaattcgtttgtccctggcattcatcttgatcttggatggattgctattctgggtgccatctggttgctaattttagctgatattcatgattttgagataattctacacagagtggaatgggcaacccttctgttttttgcagcgctctttgttctgatggaggcattggcacatctccacttaatagaatatgttggagaacaaactgctttgctaataaagatggtcccagaggagcagcgcctcatagccgccattgtcctggtggtgtgggtctcagccctggcgtcgtccctgattgacaacatcccgttcactgctaccatgattcccgtgctcctgaacctgagccacgaccctgaggttggcctgcccgcaccgccgctcatgtatgccctggccttcggtgcttgcctgggaggtaacgggacactgattggcgcgtcggcaaacgtcgtgtgtgcagggattgcagaacagcatggatatgggttctccttcatggaatttttcaggctgggcttcccaatgatggttgtgtcctgcactgttgggatgtgttatctccttgtggctcatgtggtggtgggatggaattaatagacatccatctattgctcgaagactaaaggaaacttcatccatcacaacccattagtcataaaactaccctgaccccactgtttgaagaagaaaaggtgcttaccctggagatgctacagagacacagtggaatagaccttgacactaacactctaattcaagcgaatgttggaacaccatgacctcctctgtgtgtcctttctccccaaggacaaaatgtagaaagatgtgagataacttactcaagattcccctccagaaaaatacgtatgtttaaaaacccttcctgctatacataggaaaagacacacatccacctaaaattgactgtactgtttaactgtcaattctcctgaggctaaacacagtttgtttttcttgtaatcacttttcatgttaaaataatcagcattcaaattgtatgctttctgaatatagactttctgggaaaaggtttactgctcgtaaggaaacattttatgtattaaaataaactgttccttgataaaaggct

SEQ ID NO: 417193 - DNA, 2760 bp, Homo sapiens
tctgagttgcttacttcgaaggctgtgctccgctcaccatccagagcggaggtgcggaccttaaactcactcctggagaaagatctgcaagtgcgcagagagaagactggcagtggagcatgcatctggagggcagagacggcaggcggtaccccggcgcgccggcggtggagctcctgcagacgtccgtgcccagcggactcgctgaacttgtggccggcaagcgcaggcttcctcggggagccggtggagctgacccctcgcactcctgccccaggggggctgccgggcagagctcttgggctcctgcaggccaggagtttgcttcattcctcacaaaagggaggtctcactcttctttgccccagatgtccagctccaggtctaaagattcctgctttacagaaaacactcctttgctgaggaattccttacaggagaaagggtcacggtgcatacctgtttaccatccagagttcatcactgctgaagagtcttgggaagacagctctgctgactgggagcgaagatacctgctaagcagggaggtgtctggtctgtctgcatctgcctcctccgagaagggagaccttctggacagcccgcacatccgactccgtctttccaagctgaggcgctgtgtgcagtggctgaaagtcatgggcctgtttgcctttgtggtgctgtgttctattttgttcagcctatatccggatcaaggaaagctctggcagctgttggccttatcaccgctggagaactactccgtgaaccttagcagccacgtggactccacgctgctgcaggtggacctggcaggggccctagtggccagtgggccgagtcgtcctgggagggaagagcacatcgtggtggagctgacccaggctgacgctttgggctccaggtggcggcggccacagcaggtcactcacaactggacggtgtatttaaatccgaggagaagcgagcactcagtgatgagcaggacctttgaggtactgaccagagagacggtgtccatcagcatccgggcctccctgcagcagacccaggctgtccctcttttgatggctcatcagtacctccgcggaagtgtagaaacccaggtgaccatcgcgacggccatcctcgcgggcgtctacgcgctgatcatatttgagatcgtgcacagaactctggcggccatgctgggttcccttgcagcactggcagcactggctgtgattggcgatagacccagcctgacccatgtggtggagtggattgattttgagacgctggccctgctgtttggcatgatgatcttagtagccatattttcagaaacgggatttttcgattattgtgctgtaaaggcataccggctctcccggggacgggtgtgggccatgatcatcatgctctgtctcatcgcggccgtcctctctgccttcttggacaacgtcaccaccatgctcctcttcacgcctgtgaccataaggttgtgtgaggtgctcaaccttgatccaagacaagtcctgattgcagaagtgatcttcacaaacattggaggagctgccactgccatcggggaccctccaaatgtcattattgtttccaaccaagagctgaggaagatgggcctggactttgccggattcactgcacacatgttcattgggatttgtcttgttctcctggtctgctttccgctcctcagactcctttactggaacagaaagctttataacaaggaacccagtgagattgttgaactgaagcacgagattcacgtctggcgcctgactgctcagcgcatcagcccggccagccgcgaggagacagctgtgcgccgcctgctgctggggaaggtgctggcactggagcacctgctcgcccggaggctgcacaccttccacagacagatctcacaggaggacaaaaattgggagaccaatatccaagaactccaaaaaaagcataggatatctgacgggattctgctcgccaaatgcctgacagtgttgggatttgttatcttcatgtttttcctcaattcgtttgtccctggcattcatcttgatcttggatggattgctattctgggtgccatctggttgctaattttagctgatattcatgattttgagataattctacacagagtggaatgggcaacccttctgttttttgcagcgctctttgttctgatggaggcattggcacatctccacttaatagaatatgttggagaacaaactgctttgctaataaagatggtcccagaggagcagcgcctcatagccgccattgtcctggtggtgtgggtctcagccctggcgtcgtccctgattgacaacatcccgttcactgctaccatgattcccgtgctcctgaacctgagccacgaccctgaggttggcctgcccgcaccgccgctcatgtatgccctggccttcggtgcttgcctgggaggtaacgggacactgattggcgcgtcggcaaacgtcgtgtgtgcagggattgcagaacagcatggatatgggttctccttcatggaatttttcagccaagactgaatgccactaatgggccattacctgaaggtaccgtgaagggcgagcttgtccttgggaaataaacctctggtgtgaattattccacttgcatctgaccagcgtcaacactgatggcctgtggagtggagcctaagctcagtccacagcagggcatgctgcatgatgcttggaagctggggggtgttgatttcaaagctgc

SEQ ID NO: 417194 - DNA, 1218 bp, Homo sapiens
tctgagttgcttacttcgaaggctgtgctccgctcaccatccagagcggaggtgcggaccttaaactcactcctggagaaagatctgcaagtgcgcagagagaagactggcagtggagcatgcatctggagggcagagacggcaggcggtaccccggcgcgccggcggtggagctcctgcagacgtccgtgcccagcggactcgctgaacttgtggccggcaagcgcaggcttcctcggggagccggtggagctgacccctcgcactcctgccccaggggggctgccgggcagagctcttgggctcctgcaggccaggagtttgcttcattcctcacaaaagggaggtctcactcttctttgccccagatgtccagctccaggtctaaagattcctgctttacagaaaacactcctttgctgaggaattccttacaggagaaagggtcacggtgcatacctgtttaccatccagagttcatcactgctgaagagtcttgggaagacagctctgctgactgggagcgaagatacctgctaagcagggaggtgtctggtctgtctgcatctgcctcctccgagaagggagaccttctggacagcccgcacatccgactccgtctttccaagctgaggcgctgtgtgcagtggctgaaagtcatgggcctgtttgcctttgtggtgctgtgttctattttgttcagcctatatccggatcaaggaaagctctggcagctgttggccttatcaccgctggagaactactccgtgaaccttagcagccacgtggactccacgctgctgcaggtggacctggcaggggccctagtggccagtgggccgagtcgtcctgggagggaagagcacatcgtggtggagctgacccaggctgacgctttgggctccaggtggcggcggccacagcaggtcactcacaactggacggtgtatttaaatccgaggagaagcgagcactcagtgatgagcaggacctttgaggtactgaccagagagacggtgtccatcagcatccgggcctcccttgcagcactggcagcactggctgtgattggcgatggcccagcgtggttccatctgcacattcccctacctattccagacctacacacgcatgggttgtctgattctccttccttgtaactagttgtaagatcttactagttctctcattgataatgaattaaataaatttcttaac

SEQ ID NO: 417195 - DNA, 3153 bp, Homo sapiens
tctgagttgcttacttcgaaggctgtgctccgctcaccatccagagcggaggtgcggaccttaaactcactcctggagaaagatctgcaagtgcgcagagagaagactggcagtggagcatgcatctggagggcagagacggcaggcggtaccccggcgcgccggcggtggagctcctgcagacgtccgtgcccagcggactcgctgaacttgtggccggcaagcgcaggcttcctcggggagccggtggagctgacccctcgcactcctgccccaggggggctgccgggcagagctcttgggctcctgcaggccaggagtttgcttcattcctcacaaaagggaggtctcactcttctttgccccagatgtccagctccaggtctaaagattcctgctttacagaaaacactcctttgctgaggaattccttacaggagaaagggtcacggtgcatacctgtttaccatccagagttcatcactgctgaagagtcttgggaagacagctctgctgactgggagcgaagatacctgctaagcagggaggtgtctggtctgtctgcatctgcctcctccgagaagggagaccttctggacagcccgcacatccgactccgtctttccaagctgaggcgctgtgtgcagtggctgaaagtcatgggcctgtttgcctttgtggtgctgtgttctattttgttcagcctatatccggatcaaggaaagctctggcagctgttggccttatcaccgctggagaactactccgtgaaccttagcagccacgtggactccacgctgctgcaggtggacctggcaggggccctagtggccagtgggccgagtcgtcctgggagggaagagcacatcgtggtggagctgacccaggctgacgctttgggctccaggtggcggcggccacagcaggtcactcacaactggacggtgtatttaaatccgaggagaagcgagcactcagtgatgagcaggacctttgaggtactgaccagagagacggtgtccatcagcatccgggcctccctgcagcagacccaggctgtccctcttttgatggctcatcagtacctccgcggaagtgtagaaacccaggtgaccatcgcgacggccatcctcgcgggcgtctacgcgctgatcatatttgagatcgtgcacagaactctggcggccatgctgggttcccttgcagcactggcagcactggctgtgattggcgatagacccagcctgacccatgtggtggagtggattgattttgagacgctggccctgctgtttggcatgatgatcttagtagccatattttcagaaacgggatttttcgattattgtgctgtaaaggcataccggctctcccggggacgggtgtgggccatgatcatcatgctctgtctcatcgcggccgtcctctctgccttcttggacaacgtcaccaccatgctcctcttcacgcctgtgaccataaggttgtgtgaggtgctcaaccttgatccaagacaagtcctgattgcagaagtgatcttcacaaacattggaggagctgccactgccatcggggaccctccaaatgtcattattgtttccaaccaagagctgaggaagatgggcctggactttgccggattcactgcacacatgttcattgggatttgtcttgttctcctggtctgctttccgctcctcagactcctttactggaacagaaagctttataacaaggaacccagtgagattgttgaactgaagcacgagattcacgtctggcgcctgactgctcagcgcatcagcccggccagccgcgaggagacagctgtgcgccgcctgctgctggggaaggtgctggcactggagcacctgctcgcccggaggctgcacaccttccacagacagatctcacaggaggacaaaaattgggagaccaatatccaagaactccaaaaaaagcataggatatctgacgggattctgctcgccaaatgcctgacagtgttgggatttgttatcttcatgtttttcctcaattcgtttgtccctggcattcatcttgatcttggatggattgctattctgggtgccatctggttgctaattttagctgatattcatgattttgagataattctacacagagtggaatgggcaacccttctgttttttgcagcgctctttgttctgatggaggcattggcacatctccacttaatagaatatgttggagaacaaactgctttgctaataaagatggtcccagaggagcagcgcctcatagccgccattgtcctggtggtgtgggtctcagccctggcgtcgtccctgattgacaacatcccgttcactgctaccatgattcccgtgctcctgaacctgagccacgaccctgaggttggcctgcccgcaccgccgctcatgtatgccctggccttcggtgcttgcctgggaggtaacgggacactgattggcgcgtcggcaaacgtcgtgtgtgcagggattgcagaacagcatggatatgggttctccttcatggaatttttcaggctgggcttcccaatgatggttgtgtcctgcactgttgggatgtgttatctccttgtggctcatgtggtggtgggatggaattaatagacatccatctattgctcgaagactaaaggaaacttcatccatcacaacccattagtcataaaactaccctgaccccactgtttgaagaagaaaaggtgcttaccctggagatgctacagagacacagtggaatagaccttgacactaacactctaattcaagcgaatgttggaacaccatgacctcctctgtgtgtcctttctccccaaggacaaaatgtagaaagatgtgagataacttactcaagattcccctccagaaaaatacgtatgtttaaaaacccttcctgctatacataggaaaagacacacatccacctaaaattgactgtactgtttaactgtcaattctcctgaggctaaacacagtttgtttttcttgtaatcacttttcatgttaaaataatcagcattcaaattgtatgctttctgaatatagactttctgggaaaaggtttactgctcgtaaggaaacattttatgtattaaaataaactgttccttgataaaaggct

SEQ ID NO: 417196 - DNA, 2905 bp, Homo sapiens
tctgagttgcttacttcgaaggctgtgctccgctcaccatccagagcggaggtgcggaccttaaactcactcctggagaaagatctgcaagtgcgcaggtctcactcttctttgccccagatgtccagctccaggtctaaagattcctgctttacagaaaacactcctttgctgaggaattccttacaggagaaagggtcacggtgcatacctgtttaccatccagagttcatcactgctgaagagtcttgggaagacagctctgctgactgggagcgaagatacctgctaagcagggaggtgtctggtctgtctgcatctgcctcctccgagaagggagaccttctggacagcccgcacatccgactccgtctttccaagctgaggcgctgtgtgcagtggctgaaagtcatgggcctgtttgcctttgtggtgctgtgttctattttgttcagcctatatccggatcaaggaaagctctggcagctgttggccttatcaccgctggagaactactccgtgaaccttagcagccacgtggactccacgctgctgcaggtggacctggcaggggccctagtggccagtgggccgagtcgtcctgggagggaagagcacatcgtggtggagctgacccaggctgacgctttgggctccaggtggcggcggccacagcaggtcactcacaactggacggtgtatttaaatccgaggagaagcgagcactcagtgatgagcaggacctttgaggtactgaccagagagacggtgtccatcagcatccgggcctccctgcagcagacccaggctgtccctcttttgatggctcatcagtacctccgcggaagtgtagaaacccaggtgaccatcgcgacggccatcctcgcgggcgtctacgcgctgatcatatttgagatcgtgcacagaactctggcggccatgctgggttcccttgcagcactggcagcactggctgtgattggcgatagacccagcctgacccatgtggtggagtggattgattttgagacgctggccctgctgtttggcatgatgatcttagtagccatattttcagaaacgggatttttcgattattgtgctgtaaaggcataccggctctcccggggacgggtgtgggccatgatcatcatgctctgtctcatcgcggccgtcctctctgccttcttggacaacgtcaccaccatgctcctcttcacgcctgtgaccataaggttgtgtgaggtgctcaaccttgatccaagacaagtcctgattgcagaagtgatcttcacaaacattggaggagctgccactgccatcggggaccctccaaatgtcattattgtttccaaccaagagctgaggaagatgggcctggactttgccggattcactgcacacatgttcattgggatttgtcttgttctcctggtctgctttccgctcctcagactcctttactggaacagaaagctttataacaaggaacccagtgagattgttgaactgaagcacgagattcacgtctggcgcctgactgctcagcgcatcagcccggccagccgcgaggagacagctgtgcgccgcctgctgctggggaaggtgctggcactggagcacctgctcgcccggaggctgcacaccttccacagacagatctcacaggaggacaaaaattgggagaccaatatccaagaactccaaaaaaagcataggatatctgacgggattctgctcgccaaatgcctgacagtgttgggatttgttatcttcatgtttttcctcaattcgtttgtccctggcattcatcttgatcttggatggattgctattctgggtgccatctggttgctaattttagctgatattcatgattttgagataattctacacagagtggaatgggcaacccttctgttttttgcagcgctctttgttctgatggaggcattggcacatctccacttaatagaatatgttggagaacaaactgctttgctaataaagatggtcccagaggagcagcgcctcatagccgccattgtcctggtggtgtgggtctcagccctggcgtcgtccctgattgacaacatcccgttcactgctaccatgattcccgtgctcctgaacctgagccacgaccctgaggttggcctgcccgcaccgccgctcatgtatgccctggccttcggtgcttgcctgggaggtaacgggacactgattggcgcgtcggcaaacgtcgtgtgtgcagggattgcagaacagcatggatatgggttctccttcatggaatttttcaggctgggcttcccaatgatggttgtgtcctgcactgttgggatgtgttatctccttgtggctcatgtggtggtgggatggaattaatagacatccatctattgctcgaagactaaaggaaacttcatccatcacaacccattagtcataaaactaccctgaccccactgtttgaagaagaaaaggtgcttaccctggagatgctacagagacacagtggaatagaccttgacactaacactctaattcaagcgaatgttggaacaccatgacctcctctgtgtgtcctttctccccaaggacaaaatgtagaaagatgtgagataacttactcaagattcccctccagaaaaatacgtatgtttaaaaacccttcctgctatacataggaaaagacacacatccacctaaaattgactgtactgtttaactgtcaattctcctgaggctaaacacagtttgtttttcttgtaatcacttttcatgttaaaataatcagcattcaaattgtatgctttctgaatatagactttctgggaaaaggtttactgctcgtaaggaaacattttatgtattaaaataaactgttccttgataaaaggct

SEQ ID NO: 417197 - DNA, 107 bp, Homo sapiens
taagctgagcagggcccagtactgagagggtcaagcctaggagaagaaaaaaagcagaaatggaaccagaatgacaacacttagtaatgtggataagatcatcacag

SEQ ID NO: 417198 - DNA, 1042 bp, Homo sapiens
tcaacaactactcggtggagagcgccgtggcggacgcgctaggagccgccggagtcactatgtaccgggatgcgatcctggcccagtggaatgacggcctgcacccagaccccatctacagcgcctccttcaccacacccaccaagcctttcagactccagtgctctggggcattcttcctgggtcttaccattatctgcatattgccaagcctgccattccaactcccttggaggtacaaatggcacagcctaattatggtttagaactagtaaccggcagtgcgaaaaatgggacttacttccgaattcatattaacaagtataaaatggtggaaaccatcacgtgcctttctagggagcccttccccgcctccaactacatccgcttgtttggccagcacgagcaactcctcaacaacctgtgtgctcggtacgatgaaaacctgatcacagatctctatagctacttcaccgagccgtggtgcctggccctgttccacgatcgttttattgatctcaggaaagagttacgccaaatcttagcctccaaggaggaggaagatcttccttccatagagcagttagcccatcaaatagaagatgaggaaatcaacccgactgagaagcccaggcaatacctcaaaagagtttttgaggaatccatctacaaaaccctggtggagagaagcactcttgactacctgcactataaccgctaccacctgcccatgtacgcgtggccaggcatcgtttagttgtaggcagggtctcccctttatggttttcatttatttagttcctggaaacgcgctctgtagaaatagaaaagttctctgcagcctggtttgacagcgaagccagcccctggtggttttgttcactcctttcctttcctgacttatgcctgtagttttctatcatcccagtaggtggcacacggccgtgtgcctctcttctggggcaggctcgctttacaaatcccaggcatgttcctgtgcagaataatccatttcagcaataaaatgagatcatactgtgta

SEQ ID NO: 417199 - DNA, 495 bp, Homo sapiens
ggggaggagaaaaacctgacaaaagtttggccagctaacacacagtaagaaattgacaattgtgaatgtgtgatcgagttttttcttttattagggctgaggaatagttgtttacctcttcagcagctgaagcatatttgagttgttgctagttttttgtgataatgaataaacctggtgtaaaatattccttacaggtttttgggtaaacacaagttttcacttcccttgtttaaatacctagggataggatggctagggcatgtggtgaatttacatttaccataacaaactgcttaactgttttccaaaatgcccataacattttgcatttccagtgatgatgcatgaaaattccagttgcatcctgtccattctctcactgctataaagaaatagcctgagactgagtaatttgtaaagaaaagaggtttaattggctgaccattccacaggctggccaggaagcatgattctggcatctgctcagcttct

SEQ ID NO: 417200 - DNA, 307 bp, Homo sapiens
aggagataagagagagatgtaagtgagaggaaggagaaattcatggaagaagttcaggaagaattcagaaggcatgcaaattgcacactgaatcactagtaagtaagtagttaagaataaggtaatatcagaaggaattaacctgaaggaggcggggagtagatgccttctagctctaagaaagaagatggatggtgattaaacatttccaagagtttgtggagtgttagaagctgagagaatgcaggcttgagatcctctcattattctttgaagccaatcaaattgtgagataaaaacctgagcc

SEQ ID NO: 417201 - DNA, 190 bp, Homo sapiens
gctcacctgcctgcctgcccaccactcacctcctgctgtgtggtctggttcctaaccggccatggattagtatgggtctgtggcctggggactggggacccctgtgctagactacttgaatctccagagctgtcaggaattctttagggtttgcagccaaccgcaggtcccaacggattgtgtttgggcc

SEQ ID NO: 417202 - DNA, 2062 bp, Homo sapiens
agcggggtcatctttgatgagggcagagctcacgttgcattgaagacgaaacctcggggaggtcaggcgctgtctttccttccctccctgctcggcggctccaccacagttgcaacctgcagaggcccggagaacacaaccctcccgagaagcccaggtccagagccaaacccgtcactgaccccccagcccaggcgcccagccactccccaccgctaccatggccgaagacgcagacatgcgcaatgagctggaggagatgcagcgaagggctgaccagttggctgatgagtcgctggaaagcacccgtcgtatgctgcaactggttgaagagagtaaagatgctggtatcaggactttggttatgttggatgaacaaggagaacaactggaacgcattgaggaagggatggaccaaatcaataaggacatgaaagaagcagaaaagaatttgacggacctaggaaaattctgcgggctttgtgtgtgtccctgtaacaagcttaaatcaagtgatgcttacaaaaaagcctggggcaataatcaggacggagtggtggccagccagcctgctcgtgtagtggacgaacgggagcagatggccatcagtggcggcttcatccgcagggtaacaaatgatgcccgagaaaatgaaatggatgaaaacctagagcaggtgagcggcatcatcgggaacctccgtcacatggccctggatatgggcaatgagatcgatacacagaatcgccagatcgacaggatcatggagaaggctgattccaacaaaaccagaattgatgaggccaaccaacgtgcaacaaagatgctgggaagtggttaagtgtgcccacccgtgttctcctccaaatgctgtcgggcaagatagctccttcatgcttttctcatggtattatctagtaggtctgcacacataacacacatcagtccacccccattgtgaatgttgtcctgtgtcatctgtcagcttcccaacaatactttgtgtcttttgttctctcttggtctctttctttccaaaggttgtacatagtggtcatttggtggctctaactccttgatgtcttgagtttcatttttcattttctctcctcggtggcatttgctgaataacaacaatttaggaatgctcaatgtgctgttgattctttcaatccacagtattgttcttgtaaaactgtgacattccacagagttactgccacggtcctttgagtgtcaggctctgaatctctcaaaatgtgccgtctttggttcctcatggctgttatctgtctttatgatttcatgattagacaatgtggaattacataacaggcattgcactaaaagtgatgtgatttatgcatttatgcatgagaactaaatagatttttagattcctacttaaacaaaaactttccatgacagtagcatactgatgagacaacacacacacacacaaaacaacagcaacaacaacagaacaacaacaaagcatgctcagtattgagacactgtcaagattaagttataccagcaaaagtgcagtagtgtcacttttttcctgtcaatatatagagacttctaaatcataatcatccttttttaaaaaaaagaattttaaaaaagatggatttgacacactcaccatttaatcatttccagcaaaatatatgtttggctgaaattatgtcaaatggatgtaatatagggtttgtttgctgcttttgatggctacgttttggagagagcaatcttgctgtgaaacagtgtggatgtaaattttataaggctgactcttactaaccaccatttcccctgtggtttgttatcagtacaattctttgttgcttaatctagagctatgcacaccaaattgctgagatgtttagtagctgataaagaaaccttttaaaaaaataatataaatgaatgaaatataaactgtgagataaatatcattatagcatgtaatattaaattcctcctgtctcctctgtcagtttgtgaagtgattgacattttgtagctagtttaaaattattaaaaattatagactcca

SEQ ID NO: 417203 - DNA, 2417 bp, Homo sapiens
gagaatggtcaacttctggagtagtttggcttaaatgagaatgcttcactttctactcatgcctgtagctggtgcatgaagaagacgtagaggggtttccctttttggtgctagatggcttgttctctcttctcttttcctgcattcatttcactatgcttcttttactttttgtctctgtggacaaaggtttgtacatcaactctggatgtatggtgactgtttggaagtaccgatatattatctaattcaaatcactctagaggcaatgcaaagaccatcactcttggccaaccaccaatcctttatgtccttcatggagctttggaaatgttagttccacacgtgttgggaaaaaaaaatattccacagggatctttgcatgatggtgtgtaaaaacttggttgaggatgttttcttgatgacagtgtgttgctgtggtgtgatgtgcacactctacttggcagtcttgttttgtgtctgtctgccagtatgtttttctctgttttatgtctccaaatataatcacatcactaaaatagaattaaatgtcctccagctaccttaatccttgtccaaaatccaaactaaaccacaaaacaaaccaaaacaagaacaaccttgtgggcaaagattgcagtccattgcaatggattcgattggaagtgaaatgttgagtagctgaggcatggtggtggccaactgtttgggtctggattatgatatatcggtattatctaatgcctcgacttaaaactcattcgcttggttcgattcttcgcttgaagaagtgacaattgttgagagcttgctcctccacccctgtgccttgtcactcaccctctcttttgcataggcttaaatcaagtgatgcttacaaaaaagcctggggcaataatcaggacggagtggtggccagccagcctgctcgtgtagtggacgaacgggagcagatggccatcagtggcggcttcatccgcagggtaacaaatgatgcccgagaaaatgaaatggatgaaaacctagagcaggtgagcggcatcatcgggaacctccgtcacatggccctggatatgggcaatgagatcgatacacagaatcgccagatcgacaggatcatggagaaggctgattccaacaaaaccagaattgatgaggccaaccaacgtgcaacaaagatgctgggaagtggttaagtgtgcccacccgtgttctcctccaaatgctgtcgggcaagatagctccttcatgcttttctcatggtattatctagtaggtctgcacacataacacacatcagtccacccccattgtgaatgttgtcctgtgtcatctgtcagcttcccaacaatactttgtgtcttttgttctctcttggtctctttctttccaaaggttgtacatagtggtcatttggtggctctaactccttgatgtcttgagtttcatttttcattttctctcctcggtggcatttgctgaataacaacaatttaggaatgctcaatgtgctgttgattctttcaatccacagtattgttcttgtaaaactgtgacattccacagagttactgccacggtcctttgagtgtcaggctctgaatctctcaaaatgtgccgtctttggttcctcatggctgttatctgtctttatgatttcatgattagacaatgtggaattacataacaggcattgcactaaaagtgatgtgatttatgcatttatgcatgagaactaaatagatttttagattcctacttaaacaaaaactttccatgacagtagcatactgatgagacaacacacacacacacaaaacaacagcaacaacaacagaacaacaacaaagcatgctcagtattgagacactgtcaagattaagttataccagcaaaagtgcagtagtgtcacttttttcctgtcaatatatagagacttctaaatcataatcatccttttttaaaaaaaagaattttaaaaaagatggatttgacacactcaccatttaatcatttccagcaaaatatatgtttggctgaaattatgtcaaatggatgtaatatagggtttgtttgctgcttttgatggctacgttttggagagagcaatcttgctgtgaaacagtgtggatgtaaattttataaggctgactcttactaaccaccatttcccctgtggtttgttatcagtacaattctttgttgcttaatctagagctatgcacaccaaattgctgagatgtttagtagctgataaagaaaccttttaaaaaaataatataaatgaatgaaatataaactgtgagataaatatcattatagcatgtaatattaaattcctcctgtctcctctgtcagtttgtgaagtgattgacattttgtagctagtttaaaattattaaaaattatagactcca

SEQ ID NO: 417204 - DNA, 886 bp, Homo sapiens
agcggggtcatctttgatgagggcagagctcacgttgcattgaagacgaaacctcggggaggtcaggcgctgtctttccttccctccctgctcggcggctccaccacagttgcaacctgcagaggcccggagaacacaaccctcccgagaagcccaggtccagagccaaacccgtcactgaccccccagcccaggcgcccagccactccccaccgctaccatggccgaagacgcagacatgcgcaatgagctggaggagatgcagcgaagggctgaccagttggctgatgagtcgctggaaagcacccgtcgtatgctgcaactggttgaagagagtaaagatgctggtatcaggactttggttatgttggatgaacaaggagaacaactggaacgcattgaggaagggatggaccaaatcaataaggacatgaaagaagcagaaaagaatttgacggacctaggaaaattctgcgggctttgtgtgtgtccctgtaacaagtaggtgctgcctgcctgcctgaagctttgatttcccaaggcccatctccaagccttgacaagctcattcctgccaagctcataggcaggatgagcatgtggcatgcagaacagatcaataccgtctccaatgcattcatctcatagcatagatgatattagcaggagttactgttgatgcattaaaaatcaggcatactacagtgaaagcttcactgtcagcaacttttattgatgaacgtttcaacattttccagaaagtgtaccttgagacagaggctagcctcaagaaagaggcacccagggaacttccttttccccaaccccaagagtcaaaattacagatttagaaaaggctgcgggtaagtttggaagatgagaaaca

SEQ ID NO: 417205 - DNA, 910 bp, Homo sapiens
  misc_feature (834)..(834): n is a, c, g, or t
  misc_feature (847)..(848): n is a, c, g, or t
  misc_feature (864)..(864): n is a, c, g, or t
agcggggtcatctttgatgagggcagagctcacgttgcattgaagacgaaacctcggggaggtcaggcgctgtctttccttccctccctgctcggcggctccaccacagttgcaacctgcagaggcccggagaacacaaccctcccgagaagcccaggactttgcagacccctcagttccctgggattgagacagcacttcctgactgttaccttgggtccagagccaaacccgtcactgaccccccagcccaggcgcccagccactccccaccgctaccatggccgaagacgcagacatgcgcaatgagctggaggagatgcagcgaagggctgaccagttggctgatgagtcgctggaaagcacccgtcgtatgctgcaactggttgaagagagtaaagatgctggtatcaggactttggttatgttggatgaacaaggagaacaactggaacgcattgaggaagggatggaccaaatcaataaggacatgaaagaagcagaaaagaatttgacggacctaggaaaattctgcgggctttgtgtgtgtccctgtaacaagcttaaatcaagtgatgcttacaaaaaagcctggggcaataatcaggacggagtggtggccagccagcctgctcgtgtagtggacgaacgggagcagatggccatcagtggcggcttcatccgcagggtaacaaatgatgcccgagaaaatgaaatggatgaaaacctagagcaggtgagcggcatcatcgggaacctccgtcacatggccctggatatgggcaatgagatcgatacacagaatcgccagatcgacaggatcatggagaaggngttccacaaaccnnattgtgaggccaccangtgcacaaagatctggaaatggtaatgtgccccccgtgtttcttca

SEQ ID NO: 417206 - DNA, 549 bp, Homo sapiens
agcggggtcatctttgatgagggcagagctcacgttgcattgaagacgaaacctcggggaggtcaggcgctgtctttccttccctccctgctcggcggctccaccacagttgcaacctgcagaggcccggagaacacaaccctcccgagaagcccaggtccagagccaaacccgtcactgaccccccagcccaggcgcccagccactccccaccgctaccatggccgaagacgcagacatgcgcaatgagctggaggagatgcagcgaagggctgaccagttggctgatgagtcgctggaaagcacccgtcgtatgctgcaactggttgaagagagtaaagatgctggtatcaggactttggttatgttggatgaacaaggagaacaactcgatcgtgtcgaagaaggcatgaaccatatcaaccaagacatgaaggaggctgagaaaaatttaaaagatttagggaaatgctgtggccttttcatatgtccttgtaacaagtaggtactgggtaccagctctaatctgtggcgtccagttttctttct

SEQ ID NO: 417207 - DNA, 1130 bp, Homo sapiens
agcggggtcatctttgatgagggcagagctcacgttgcattgaagacgaaacctcggggaggtcaggcgctgtctttccttccctccctgctcggcggctccaccacagttgcaacctgcagaggcccggagaacacaaccctcccgagaagcccaggtccagagccaaacccgtcactgaccccccagcccaggcgcccagccactccccaccgctaccatggccgaagacgcagacatgcgcaatgagctggaggagatgcagcgaagggctgaccagttggctgatgagaatgcatagcaaggaatcaaagatatgtggcatgaaatgctggctggtggatatgaggactaggaaaagtagagtaagggaatgcagattgaaaatgggattaatttgatgactgaatgctgatgagataactatggatgaagacatttgtaatcagataaccgtaaactgacaattaactgggaacgatggggcaagatgtaatttaacttactgaaaaaggaaacgtgcgggctaggatggaaaaacccttaatgatactgaatgcagtagaactaggcgaagcggaacgtgaaaattgaatctggggacttcgaaattatgctacccgacctatctctttgactgaatcgtaacaaaaatccttattattcatgggagatccaactacaccggccattaaaatctttatttataaacctctaattttatataatattttatgtcctttttaacggcgttaagcaatatagggaatctggtcaacaaacgtgaaagcccggcctttcttttggggcccatttgggtgggagttcaggtggaacgggcgtgggggcaatagtggcggccaattttggttgtttaaacaaagggatctaaactgaagtttcgcggcttcacaaactctttggtttttctggccagatcggttacggtcgtcgggcacctttgggctaacggagagctggggcgggaccttcttgttatcttcctccctttggacggcgggcggaatttcttttcctcttcaacggtaattttcgctctttttttttcgccggtttggggcaggccggctctttttttttcacttttagacgcctgttggaccggcgcg

SEQ ID NO: 417208 - DNA, 1132 bp, Homo sapiens
agcggggtcatctttgatgagggcagagctcacgttgcattgaagacgaaacctcggggaggtcaggcgctgtctttccttccctccctgctcggcggctccaccacagttgcaacctgcagaggcccggagaacacaaccctcccgagaagcccaggtccagagccaaacccgtcactgaccccccagcccaggcgcccagccactccccaccgctaccatggccgaagacgcagacatgcgcaatgagctggaggagatgcagcgaagggctgaccagttggctgatgagtcgctggaaagcacccgtcgtatgctgcaacctggttgacccacgacgtacacacgatgctggtactcaccgcacttccgcgttactgctcggactgaccccccgcgacgaacaacctcgacctcgctgtcgcacacgaacggccctgacacccaactactcataccgcaacgcaacactgcacacgcgcaagcgcctgacagacacacacacctccacacccacgcactctccaccgcgacacactgcctgctgagcgcctctccccacctcctgctccctttgcctacacccacaccgacctctccccctcacacctgcactgccctctaacccccccaccacagcccctggcgcgccccccctcacctccacggacgcgcacgctgccctgcgcccacgccctaccccttgcctcggcctgctccccttgcgcactgcaccacgccgcgcacgcccccactcgcggcccccctccccctgcccccgcgcccttcccctccctgcccccccctcacacccaacaactggactcgcccccccgcacgcaaaacaactggacaaacttgggcacttccaacacacaccccttaaccacgcccacgcgctggcaccccgcgcccaacaccaacatcaggcgagacacaccccttcccccgactcccaacacaatggcgcccccccatgcggccttcatgggcgcccaaactgcacgcactcacggactcaccaaccagcaacacttccgcctccacatgcacttccgcacacgcgcaacatccactgggtaccaatccgggtctcggcagcctcccacacagccaaacacccccgtaaaca

SEQ ID NO: 417209 - DNA, 948 bp, Homo sapiens
agcggggtcatctttgatgagggcagagctcacgttgcattgaagacgaaacctcggggaggtcaggcgctgtctttccttccctccctgctcggcggctccaccacagttgcaacctgcagaggcccggagaacacaaccctcccgagaagcccaggtccagagccaaacccgtcactgaccccccagcccaggcgcccagccactccccaccgctaccatggccgaagacgcagacatgcgcaatgagctggaggagatgcagcgaagggctgaccagttggctgatgaggatgattaggtctgattgagtcgtctgcgcaaagacagccgccggtccgttcactgctgcaactgtggattggaccagaggagtcacaatgatgtctggataatcaagggatccttgggagtatgttaggtatggaacaaggaggaaccaacctcgagtcgatgctcagaatgaatggcactgagagccgattatcagaccaacgacagtgaagggacggcttgagaagacagttccaatacaggactttcatgggacacatgctcgttgagcctctattgatagtgctcctatgcttccgaagacttaagatcaatgtgatgcatctacaaacaacagtcgcttggggcaaactaattgctaggggaaccggtatgttgagtgagcctagcctagccgtgcgtcagtgttagctggacggaagcggggatgcctgactgggcccatccaaggcggccggcgttcatcccgaccagggatagacacggatgaatgccccgcagacaaatgaaagacaggcatgaaacacctagaagccagcgcgcagcggccatcgatcggggaaacccaccggtccaccatggccccctggacactacggggccaagtgagaatcagataaccaccagaaatcgccacaatcgagcccggatcca

SEQ ID NO: 417210 - DNA, 599 bp, Homo sapiens
taatgtcaaagtgaatgtctgaagttttgtctttttttctttgtccttttccatctgcttcattctgtggggataaaatacttgtgtttaatcagaaacaactggaacgcattgaggaagggatggaccaaatcaataaggacatgaaagaagcagaaaagaatttgacggacctaggaaaattctgcgggctttgtgtgtgtccctgtaacaagtaggtgctgcctgcctgcctgaagctttgatttcccaaggcccatctccaagccttgacaagctcattcctgccaagctcataggcaggatgagcatgtggcatgcagaacagatcaataccgtctccaatgcattcatctcatagcatagatgatattagcaggagttactgttgatgcattaaaaatcaggcatactacagtgaaagcttcactgtcagcaacttttattgatgaacgtttcaacattttccagaaagtgtaccttgagacagaggctagcctcaagaaagaggcacccagggaacttccttttccccaaccccaagagtcaaaattacagatttagaaaaggctgcgggtaagtttggaagatgagaaaca

SEQ ID NO: 417211 - DNA, 480 bp, Homo sapiens
agcggggtcatctttgatgagggcagagctcacgttgcattgaagacgaaacctcggggaggtcaggcgctgtctttccttccctccctgctcggcggctccaccacagttgcaacctgcagaggcccggagaacacaaccctcccgagaagcccagttctggaaaggaagatgatacagaaaccacagccattttgcagatatgaaaactgggacatagaaatttgactgccctggaaaagatcacctacttatttgatgacagagccagttcagggatgaagatggagtcttgctctgtcacccaggctggagtacaatggcatggtcttggttccctgcaacctccacctcccaggttcaagcgattctcctgcctcagcctcatgagtagctgggattacaggcacgcgccaccaagcccaggtcactccagcagcacatgccaaaccaggatgagcaaagttcataagcttgctt

SEQ ID NO: 417212 - DNA, 2498 bp, Homo sapiens
agcggggtcatctttgatgagggcagagctcacgttgcattgaagacgaaacctcggggaggtcaggcgctgtctttccttccctccctgctcggcggctccaccacagttgcaacctgcagaggcccggagaacacaaccctcccgagaagcccaggtccagagccaaacccgtcactgaccccccagcccaggcgcccagccactccccaccgctaccatggccgaagacgcagacatgcgcaatgagctggaggagatgcagcgaagggctgaccagttggctgatgagtcgctggaaagcacccgtcgtatgctgcaactggttgaagagagtaaagatgctggtatcaggactttggttatgttggatgaacaaggagaacaactggaacgcattgaggaagggatggaccaaatcaataaggacatgaaagaagcagaaaagaatttgacggacctaggaaaattctgcgggctttgtgtgtgtccctgtaacaagcttaaatcaagtgatgcttacaaaaaagcctggggcaataatcaggacggagtggtggccagccagcctgctcgtgtagtggacgaacgggagcagatggccatcagtggcggcttcatccgcagggtaacaaatgatgcccgagaaaatgaaatggatgaaaacctagagcaggtgagcggcatcatcgggaacctccgtcacatggccctggatatgggcaatgagatcgatacacagaatcgccagatcgacaggatcatggagaaggctgattccaacaaaaccagaattgatgaggccaaccaacgtgcaacaaagatgctgggaagtggttaagtgtgcccacccgtgttctcctccaaatgctgtcgggcaagatagctccttcatgcttttctcatggtattatctagtaggtctgcacacataacacacatcagtccacccccattgtgaatgttgtcctgtgtcatctgtcagcttcccaacaatactttgtgtcttttgttctctcttggtctctttctttccaaaggttgtacatagtggtcatttggtggctctaactccttgatgtcttgagtttcatttttcattttctctcctcggtggcatttgctgaataacaacaatttaggaatgctcaatgtgctgttgattctttcaatccacagtattgttcttgtaaaactgtgacattccacagagttactgccacggtcctttgagtgtcaggctctgaatctctcaaaatgtgccgtctttggttcctcatggctgttatctgtctttatgatttcatgattagacaatgtggaattacataacaggcattgcactaaaagtgatgtgatttatgcatttatgcatgagaactaaatagatttttagattcctacttaaacaaaaactttccatgacagtagcatactgatgagacaacacacacacacacaaaacaacagcaacaacaacagaacaacaacaaagcatgctcagtattgagacactgtcaagattaagttataccagcaaaagtgcagtagtgtcacttttttcctgtcaatatatagagacttctaaatcataatcatccttttttaaaaaaaagaattttaaaaaagatggatttgacacactcaccatttaatcatttccagcaaaatatatgtttggctgaaattatgtcaaatggatgtaatatagggtttgtttgctgcttttgatggctacgttttggagagagcaatcttgctgtgaaacagtgtggatgtaaattttataaggctgactcttactaaccaccatttcccctgtggtttgttatcagtacaattctttgttgcttaatctagagctatgcacaccaaattgctgagatgtttagtagctgataaagaaaccttttaaaaaaataatataaatgaatgaaatataaactgtgagataaatatcattatagcatgtaatattaaattcctcctgtctcctctgtcagtttgtgaagtgattgacattttgtagctagtttaaaattattaaaaattatagactccaaaaaaaaaaccacaaatctcgatgactacatcaggggcggggcgcgccggtcatagaaaatctccctgagggagcgcagcaatattgtaggacacgcacccggcgttgtttgtttaacaaagggtgcgccccattggtcagagccgttgatattaatataagctaagaagcacggccggccgcttgtttataaacacacgtatcggtaggctagaaaaaaacagtgtatccttgagagcacctgctggtaaaagcacaccataactacgcgggggggacaaaacaactattggggacccaaactccccataaagaatttttaccgcccaggggagacatcattaacaacttcaccgtgtgtttatctgtcaaacaaggcagattattgctcgcgtgtaaagaaattaccttcacagggaagtttttggacactttc

SEQ ID NO: 417213 - DNA, 1908 bp, Homo sapiens
agcggggtcatctttgatgagggcagagctcacgttgcattgaagacgaaacctcggggaggtcaggcgctgtctttccttccctccctgctcggcggctccaccacagttgcaacctgcagaggcccggagaacacaaccctcccgagaagcccaggtccagagccaaacccgtcactgaccccccagcccaggcgcccagccactccccaccgctaccatggccgaagacgcagacatgcgcaatgagctggaggagatgcagcgaagggctgaccagttggctgatgagtcgctggaaagcacccgtcgtatgctgcaactggttgaagagagtaaagatgctggtatcaggactttggttatgttggatgaacaaggagaacaactggaacgcattgaggaagggatggaccaaatcaataaggacatgaaagaagcagaaaagaatttgacggacctaggaaaattctgcgggctttgtgtgtgtccctgtaacaagcttaaatcaagtgatgcttacaaaaaagcctggggcaataatcaggacggagtggtggccagccagcctgctcgtgtagtggacgaacgggagcagatggccatcagtggcggcttcatccgcagggtaacaaatgatgcccgagaaaatgaaatggatgaaaacctagagcaggtgagcggcatcatcgggaacctccgtcacatggccctggatatgggcaatgagatcgatacacagaatcgccagatcgacaggatcatggagaaggctgattccaacaaaaccagaattgatgaggccaaccaacgtgcaacaaagatgctgggaagtggttaagtgtgcccacccgtgttctcctccaaatgctgtcgggcaagatagctccttcatgcttttctcatggtattatctagtaggtctgcacacataacacacatcagtccacccccattgtgaatgttgtcctgtgtcatctgtcagcttcccaacaatactttgtgtcttttgttctctcttggtctctttctttccaaaggttgtacatagtggtcatttggtggctctaactccttgattgtcaggctctgaatctctcaaaatgtgccgtctttggttcctcatggctgttatctgtctttatgatttcatgattagacaatgtggaattacataacaggcattgcactaaaagtgatgtgatttatgcatttatgcatgagaactaaatagatttttagattcctacttaaacaaaaactttccatgacagtagcatactgatgagacaacacacacacacacaaaacaacagcaacaacaacagaacaacaacaaagcatgctcagtattgagacactgtcaagattaagttataccagcaaaagtgcagtagtgtcacttttttcctgtcaatatatagagacttctaaatcataatcatccttttttaaaaaaaagaattttaaaaaagatggatttgacacactcaccatttaatcatttccagcaaaatatatgtttggctgaaattatgtcaaatggatgtaatatagggtttgtttgctgcttttgatggctacgttttggagagagcaatcttgctgtgaaacagtgtggatgtaaattttataaggctgactcttactaaccaccatttcccctgtggtttgttatcagtacaattctttgttgcttaatctagagctatgcacaccaaattgctgagatgtttagtagctgataaagaaaccttttaaaaaaataatataaatgaatgaaatataaactgtgagataaatatcattatagcatgtaatattaaattcctcctgtctcctctgtcagtttgtgaagtgattgacattttgtagctagtttaaaattattaaaaattatagactcca

SEQ ID NO: 417214 - DNA, 1889 bp, Homo sapiens
agcggggtcatctttgatgagggcagagctcacgttgcattgaagacgaaacctcggggaggtcaggcgctgtctttccttccctccctgctcggcggctccaccacagttgcaacctgcagaggcccggagaacacaaccctcccgagaagcccaggtccagagccaaacccgtcactgaccccccagcccaggcgcccagccactccccaccgctaccatggccgaagacgcagacatgcgcaatgagctggaggagatgcagcgaagggctgaccagttggctgatgagtcgctggaaagcacccgtcgtatgctgcaactggttgaagagagtaaagatgctggtatcaggactttggttatgttggatgaacaaggagaacaactggaacgcattgaggaagggatggaccaaatcaataaggacatgaaagaagcagaaaagaatttgacggacctaggaaaattctgcgggctttgtgtgtgtccctgtaacaagcttaaatcaagtgatgcttacaaaaaagcctggggcaataatcaggacggagtggtggccagccagcctgctcgtgtagtggacgaacgggagcagatggccatcagtggcggcttcatccgcagggtaacaaatgatgcccgagaaaatgaaatggatgaaaacctagagcaggtgagcggcatcatcgggaacctccgtcacatggccctggatatgggcaatgagatcgatacacagaatcgccagatcgacaggatcatggagaaggctgattccaacaaaaccagaattgatgaggccaaccaacgtgcaacaaagatgctgggaagtggttaagtgtgcccacccgtgttctcctccaaatgctgtcgggcaagatagctccttcatgcttttctcatggtattatctagtaggtctgcacacataacacacatcagtccacccccattgtgaatgttgtcctgtgtcatctgtcagcttcccaacaatactttgtgtcttttgttctctcttggtctctttctttccaaaggttgtacatagtggtcatttggtggctctaactccttgatgtcttgagtttcatttttcattttctctcctcggtggcatttgctgaataacaacaatttaggaatgctcaatgtgctgttgattctttcaatccacagtattgttcttgtaaaactgtgacattccacagagttactgccacggtcctttgagtgtcaggctctgaatctctcaaaatgtgccgtctttggttcctcatggctgttatctgtctttatgatttcatgattagacaatgtggaattacataacaggcattgcactaaaagtgatgtgatttatgcatttatgcatgagaactaaatagatttttagattcctacttaaacaaaaactttccatgacagtagcatactgatgagacaacacacacacacacaaaacaacagcaacaacaacagaacaacaacaaagcatgctcagtattgagacactgtcaagattaagttataccagcaaaagtgcagtagtgtcacttttttcctgtcaatatatagagacttctaaatcataatcatccttttttaaaaaaaagaattttaaaaaagatggatttgacacactcaccatttaatcatttccagcaaaatatatgtttggctgaaattatgtcaaatggatgtaatatagggtttgtttgctgcttttgatggctacgttttggagagagcaatcttgctgtgaaacagtgtggatgtaaattttataaggctgactcttactaaccaccatttcccctgtggtttgttatcagtacaattctttgttgacccacaggtaccgaactcgagtcgtatcatgtcaactt

SEQ ID NO: 417215 - DNA, 1936 bp, Homo sapiens
agcggggtcatctttgatgagggcagagctcacgttgcattgaagacgaaacctcggggaggtcaggcgctgtctttccttccctccctgctcggcggctccaccacagttgcaacctgcagaggcccggagaacacaaccctcccgagaagcccaggtccagagccaaacccgtcactgaccccccagcccaggcgcccagccactccccaccgctaccatggccgaagacgcagacatgcgcaatgagctggaggagatgcagcgaagggctgaccagttggctgatgagtcgctggaaagcacccgtcgtatgctgcaactggttgaagagagtaaagatgctggtatcaggactttggttatgttggatgaacaaggagaacaactggaacgcattgaggaagggatggaccaaatcaataaggacatgaaagaagcagaaaagaatttgacggacctaggaaaattctgcgggctttgtgtgtgtccctgtaacaagcttaaatcaagtgatgcttacaaaaaagcctggggcaataatcaggacggagtggtggccagccagcctgctcgtgtagtggacgaacgggagcagatggccatcagtggcggcttcatccgcagggtaacaaatgatgcccgagaaaatgaaatggatgaaaacctagagcaggtgagcggcatcatcgggaacctccgtcacatggccctggatatgggcaatgagatcgatacacagaatcgccagatcgacaggatcatggagaaggctgattccaacaaaaccagaattgatgaggccaaccaacgtgcaacaaagatgctgggaagtggttaagtgtgcccacccgtgttctcctccaaatgctgtcgggcaagatagctccttcatgcttttctcatggtattatctagtaggtctgcacacataacacacatcagtccacccccattgtgaatgttgtcctgtgtcatctgtcagcttcccaacaatactttgtgtcttttgttctctcttggtctctttctttccaaaggttgtacatagtggtcatttggtggctctaactccttgatgtcttgagtttcatttttcattttctctcctcggtggcatttgctgaataacaacaatttaggaatgctcaatgtgctgttgattctttcaatccacagtattgttcttgtaaaactgtgacattccacagagttactgccacggtcctttgagtgtcaggctctgaatctctcaaaatgtgccgtctttggttcctcatggctgttatctgtctttatgatttcatgattagacaatgtggaattacataacaggcattgcactaaaagtgatgtgatttatgcatttatgcatgagaactaaatagatttttagattcctacttaaacaaaaactttccatgacagtagcatactgatgagacaacacacacacacacaaaacaacagcaacaacaacagaacaacaacaaagcatgctcagtattgagacactgtcaagattaagttataccagcaaaagtgcagtagtgtcacttttttcctgtcaatatatagagacttctaaatcataatcatccttttttaaaaaaaagaattttaaaaaagatggatttgacacactcaccatttaatcatttccagcaaaatatatgtttggctgaaattatgtcaaatggatgtaatatagggtttgtttgctgcttttgatggctacgttttggagagagcaatcttgctgtgaaacagtgtggatgtaaattttataaggctgactcttactaaccaccatttcccctgtggtttgttatcagtacaattctttgttgttgccacaaatgttgatgtagtgctgtaagaactttttaattaatgatgaattaacggagataattcttagctgtttctctgttct

SEQ ID NO: 417216 - DNA, 1868 bp, Homo sapiens
agcggggtcatctttgatgagggcagagctcacgttgcattgaagacgaaacctcggggaggtcaggcgctgtctttccttccctccctgctcggcggctccaccacagttgcaacctgcagaggcccggagaacacaaccctcccgagaagcccaggtccagagccaaacccgtcactgaccccccagcccaggcgcccagccactccccaccgctaccatggccgaagacgcagacatgcgcaatgagctggaggagatgcagcgaagggctgaccagttggctgatgagtcgctggaaagcacccgtcgtatgctgcaactggttgaagagagtaaagatgctggtatcaggactttggttatgttggatgaacaaggagaacaactggaacgcattgaggaagggatggaccaaatcaataaggacatgaaagaagcagaaaagaatttgacggacctaggaaaattctgcgggctttgtgtgtgtccctgtaacaagcttaaatcaagtgatgcttacaaaaaagcctggggcaataatcaggacggagtggtggccagccagcctgctcgtgtagtggacgaacgggagcagatggccatcagtggcggcttcatccgcagggtaacaaatgatgcccgagaaaatgaaatggatgaaaacctagagcaggtgagcggcatcatcgggaacctccgtcacatggccctggatatgggcaatgagatcgatacacagaatcgccagatcgacaggatcatggagaaggctgattccaacaaaaccagaattgatgaggccaaccaacgtgcaacaaagatgctgggaagtggttaagtgtgcccacccgtgttctcctccaaatgctgtcgggcaagatagctccttcatgcttttctcatggtattatctagtaggtctgcacacataacacacatcagtccacccccattgtgaatgttgtcctgtgtcatctgtcagcttcccaacaatactttgtgtcttttgttctctcttggtctctttctttccaaaggttgtacatagtggtcatttggtggctctaactccttgatgtcttgagtttcatttttcattttctctcctcggtggcatttgctgaataacaacaatttaggaatgctcaatgtgctgttgattctttcaatccacagtattgttcttgtaaaactgtgacattccacagagttactgccacggtcctttgagtgtcaggctctgaatctctcaaaatgtgccgtctttggttcctcatggctgttatctgtctttatgatttcatgattagacaatgtggaattacataacaggcattgcactaaaagtgatgtgatttatgcatttatgcatgagaactaaatagatttttagattcctacttaaacaaaaactttccatgacagtagcatactgatgagacaacacacacacacacaaaacaacagcaacaacaacagaacaacaacaaagcatgctcagtattgagacactgtcaagattaagttataccagcaaaagtgcagtagtgtcacttttttcctgtcaatatatagagacttctaaatcataatcatccttttttaaaaaaaagaattttaaaaaagatggatttgacacactcaccatttaatcatttccagcaaaatatatgtttggctgaaattatgtcaaatggatgtaatatagggtttgtttgtttcggtaacaactatacacaggggagagctatgatcgatgtgtatcaaatctagtgctcaaccatatggtactactattagcaacctgcccttgcgtggcaccttcgtgatgatgtacacacggtacacgagctgatgtatcatgt

SEQ ID NO: 417217 - DNA, 2062 bp, Homo sapiens
agtgggcttgggtaaatacaagtattggtgcacttagggtgcggtattccgtgtgtgcacgtctggtgggggctttataaagtgttttcgaggtgagctgctggggaaaagggaaacgggagccctgcaaatggagcgacggggaggaagagcgagggtccagagccaaacccgtcactgaccccccagcccaggcgcccagccactccccaccgctaccatggccgaagacgcagacatgcgcaatgagctggaggagatgcagcgaagggctgaccagttggctgatgagtcgctggaaagcacccgtcgtatgctgcaactggttgaagagagtaaagatgctggtatcaggactttggttatgttggatgaacaaggagaacaactggaacgcattgaggaagggatggaccaaatcaataaggacatgaaagaagcagaaaagaatttgacggacctaggaaaattctgcgggctttgtgtgtgtccctgtaacaagcttaaatcaagtgatgcttacaaaaaagcctggggcaataatcaggacggagtggtggccagccagcctgctcgtgtagtggacgaacgggagcagatggccatcagtggcggcttcatccgcagggtaacaaatgatgcccgagaaaatgaaatggatgaaaacctagagcaggtgagcggcatcatcgggaacctccgtcacatggccctggatatgggcaatgagatcgatacacagaatcgccagatcgacaggatcatggagaaggctgattccaacaaaaccagaattgatgaggccaaccaacgtgcaacaaagatgctgggaagtggttaagtgtgcccacccgtgttctcctccaaatgctgtcgggcaagatagctccttcatgcttttctcatggtattatctagtaggtctgcacacataacacacatcagtccacccccattgtgaatgttgtcctgtgtcatctgtcagcttcccaacaatactttgtgtcttttgttctctcttggtctctttctttccaaaggttgtacatagtggtcatttggtggctctaactccttgatgtcttgagtttcatttttcattttctctcctcggtggcatttgctgaataacaacaatttaggaatgctcaatgtgctgttgattctttcaatccacagtattgttcttgtaaaactgtgacattccacagagttactgccacggtcctttgagtgtcaggctctgaatctctcaaaatgtgccgtctttggttcctcatggctgttatctgtctttatgatttcatgattagacaatgtggaattacataacaggcattgcactaaaagtgatgtgatttatgcatttatgcatgagaactaaatagatttttagattcctacttaaacaaaaactttccatgacagtagcatactgatgagacaacacacacacacacaaaacaacagcaacaacaacagaacaacaacaaagcatgctcagtattgagacactgtcaagattaagttataccagcaaaagtgcagtagtgtcacttttttcctgtcaatatatagagacttctaaatcataatcatccttttttaaaaaaaagaattttaaaaaagatggatttgacacactcaccatttaatcatttccagcaaaatatatgtttggctgaaattatgtcaaatggatgtaatatagggtttgtttgctgcttttgatggctacgttttggagagagcaatcttgctgtgaaacagtgtggatgtaaattttataaggctgactcttactaaccaccatttcccctgtggtttgttatcagtacaattctttgttgcttaatctagagctatgcacaccaaattgctgagatgtttagtagctgataaagaaaccttttaaaaaaataatataaatgaatgaaatataaactgtgagataaatatcattatagcatgtaatattaaattcctcctgtctcctctgtcagtttgtgaagtgattgacattttgtagctagtttaaaattattaaaaattatagactcca

SEQ ID NO: 417218 - DNA, 1959 bp, Homo sapiens
agcggggtcatctttgatgagggcagagctcacgttgcattgaagacgaaacctcggggaggtcaggcgctgtctttccttccctccctgctcggcggctccaccacagttgcaacctgcagaggcccggagaacacaaccctcccgagaagcccaggtccagagccaaacccgtcactgaccccccagcccaggcgcccagccactccccaccgctaccatggccgaagaagtaaagatgctggtatcaggactttggttatgttggatgaacaaggagaacaactggaacgcattgaggaagggatggaccaaatcaataaggacatgaaagaagcagaaaagaatttgacggacctaggaaaattctgcgggctttgtgtgtgtccctgtaacaagcttaaatcaagtgatgcttacaaaaaagcctggggcaataatcaggacggagtggtggccagccagcctgctcgtgtagtggacgaacgggagcagatggccatcagtggcggcttcatccgcagggtaacaaatgatgcccgagaaaatgaaatggatgaaaacctagagcaggtgagcggcatcatcgggaacctccgtcacatggccctggatatgggcaatgagatcgatacacagaatcgccagatcgacaggatcatggagaaggctgattccaacaaaaccagaattgatgaggccaaccaacgtgcaacaaagatgctgggaagtggttaagtgtgcccacccgtgttctcctccaaatgctgtcgggcaagatagctccttcatgcttttctcatggtattatctagtaggtctgcacacataacacacatcagtccacccccattgtgaatgttgtcctgtgtcatctgtcagcttcccaacaatactttgtgtcttttgttctctcttggtctctttctttccaaaggttgtacatagtggtcatttggtggctctaactccttgatgtcttgagtttcatttttcattttctctcctcggtggcatttgctgaataacaacaatttaggaatgctcaatgtgctgttgattctttcaatccacagtattgttcttgtaaaactgtgacattccacagagttactgccacggtcctttgagtgtcaggctctgaatctctcaaaatgtgccgtctttggttcctcatggctgttatctgtctttatgatttcatgattagacaatgtggaattacataacaggcattgcactaaaagtgatgtgatttatgcatttatgcatgagaactaaatagatttttagattcctacttaaacaaaaactttccatgacagtagcatactgatgagacaacacacacacacacaaaacaacagcaacaacaacagaacaacaacaaagcatgctcagtattgagacactgtcaagattaagttataccagcaaaagtgcagtagtgtcacttttttcctgtcaatatatagagacttctaaatcataatcatccttttttaaaaaaaagaattttaaaaaagatggatttgacacactcaccatttaatcatttccagcaaaatatatgtttggctgaaattatgtcaaatggatgtaatatagggtttgtttgctgcttttgatggctacgttttggagagagcaatcttgctgtgaaacagtgtggatgtaaattttataaggctgactcttactaaccaccatttcccctgtggtttgttatcagtacaattctttgttgcttaatctagagctatgcacaccaaattgctgagatgtttagtagctgataaagaaaccttttaaaaaaataatataaatgaatgaaatataaactgtgagataaatatcattatagcatgtaatattaaattcctcctgtctcctctgtcagtttgtgaagtgattgacattttgtagctagtttaaaattattaaaaattatagactcca

SEQ ID NO: 417219 - DNA, 1669 bp, Homo sapiens
  misc_feature (11)..(11): n is a, c, g, or t
atcagctcggnccaagttagtgggacgcaataaggacatgaaagaagcagaaaagaatttgacggacctaggaaaattctgcgggctttgtgtgtgtccctgtaacaagcttaaatcaagtgatgcttacaaaaaagcctggggcaataatcaggacggagtggtggccagccagcctgctcgtgtagtggacgaacgggagcagatggccatcagtggcggcttcatccgcagggtaacaaatgatgcccgagaaaatgaaatggatgaaaacctagagcaggtgagcggcatcatcgggaacctccgtcacatggccctggatatgggcaatgagatcgatacacagaatcgccagatcgacaggatcatggagaaggctgattccaacaaaaccagaattgatgaggccaaccaacgtgcaacaaagatgctgggaagtggttaagtgtgcccacccgtgttctcctccaaatgctgtcgggcaagatagctccttcatgcttttctcatggtattatctagtaggtctgcacacataacacacatcagtccacccccattgtgaatgttgtcctgtgtcatctgtcagcttcccaacaatactttgtgtcttttgttctctcttggtctctttctttccaaaggttgtacatagtggtcatttggtggctctaactccttgatgtcttgagtttcatttttcattttctctcctcggtggcatttgctgaataacaacaatttaggaatgctcaatgtgctgttgattctttcaatccacagtattgttcttgtaaaactgtgacattccacagagttactgccacggtcctttgagtgtcaggctctgaatctctcaaaatgtgccgtctttggttcctcatggctgttatctgtctttatgatttcatgattagacaatgtggaattacataacaggcattgcactaaaagtgatgtgatttatgcatttatgcatgagaactaaatagatttttagattcctacttaaacaaaaactttccatgacagtagcatactgatgagacaacacacacacacacaaaacaacagcaacaacaacagaacaacaacaaagcatgctcagtattgagacactgtcaagattaagttataccagcaaaagtgcagtagtgtcacttttttcctgtcaatatatagagacttctaaatcataatcatccttttttaaaaaaaagaattttaaaaaagatggatttgacacactcaccatttaatcatttccagcaaaatatatgtttggctgaaattatgtcaaatggatgtaatatagggtttgtttgctgcttttgatggctacgttttggagagagcaatcttgctgtgaaacagtgtggatgtaaattttataaggctgactcttactaaccaccatttcccctgtggtttgttatcagtacaattctttgttgcttaatctagagctatgcacaccaaattgctgagatgtttagtagctgataaagaaaccttttaaaaaaataatataaatgaatgaaatataaactgtgagataaatatcattatagcatgtaatattaaattcctcctgtctcctctgtcagtttgtgaagtgattgacattttgtagctagtttaaaattattaaaaattatagactcca

SEQ ID NO: 417220 - DNA, 1775 bp, Homo sapiens
taatgtcaaagtgaatgtctgaagttttgtctttttttctttgtccttttccatctgcttcattctgtggggataaaatacttgtgtttaatcagaaacaactggaacgcattgaggaagggatggaccaaatcaataaggacatgaaagaagcagaaaagaatttgacggacctaggaaaattctgcgggctttgtgtgtgtccctgtaacaagcttaaatcaagtgatgcttacaaaaaagcctggggcaataatcaggacggagtggtggccagccagcctgctcgtgtagtggacgaacgggagcagatggccatcagtggcggcttcatccgcagggtaacaaatgatgcccgagaaaatgaaatggatgaaaacctagagcaggtgagcggcatcatcgggaacctccgtcacatggccctggatatgggcaatgagatcgatacacagaatcgccagatcgacaggatcatggagaaggctgattccaacaaaaccagaattgatgaggccaaccaacgtgcaacaaagatgctgggaagtggttaagtgtgcccacccgtgttctcctccaaatgctgtcgggcaagatagctccttcatgcttttctcatggtattatctagtaggtctgcacacataacacacatcagtccacccccattgtgaatgttgtcctgtgtcatctgtcagcttcccaacaatactttgtgtcttttgttctctcttggtctctttctttccaaaggttgtacatagtggtcatttggtggctctaactccttgatgtcttgagtttcatttttcattttctctcctcggtggcatttgctgaataacaacaatttaggaatgctcaatgtgctgttgattctttcaatccacagtattgttcttgtaaaactgtgacattccacagagttactgccacggtcctttgagtgtcaggctctgaatctctcaaaatgtgccgtctttggttcctcatggctgttatctgtctttatgatttcatgattagacaatgtggaattacataacaggcattgcactaaaagtgatgtgatttatgcatttatgcatgagaactaaatagatttttagattcctacttaaacaaaaactttccatgacagtagcatactgatgagacaacacacacacacacaaaacaacagcaacaacaacagaacaacaacaaagcatgctcagtattgagacactgtcaagattaagttataccagcaaaagtgcagtagtgtcacttttttcctgtcaatatatagagacttctaaatcataatcatccttttttaaaaaaaagaattttaaaaaagatggatttgacacactcaccatttaatcatttccagcaaaatatatgtttggctgaaattatgtcaaatggatgtaatatagggtttgtttgctgcttttgatggctacgttttggagagagcaatcttgctgtgaaacagtgtggatgtaaattttataaggctgactcttactaaccaccatttcccctgtggtttgttatcagtacaattctttgttgcttaatctagagctatgcacaccaaattgctgagatgtttagtagctgataaagaaaccttttaaaaaaataatataaatgaatgaaatataaactgtgagataaatatcattatagcatgtaatattaaattcctcctgtctcctctgtcagtttgtgaagtgattgacattttgtagctagtttaaaattattaaaaattatagactcca

SEQ ID NO: 417221 - DNA, 2360 bp, Homo sapiens
gagaatggtcaacttctggagtagtttggcttaaatgagaatgcttcactttctactcatgcctgtagctggtgcatgaagaagacgtagaggggtttccctttttggtgctagatggcttgttctctcttctcttttcctgcattcatttcactatgcttcttttactttttgtctctgtggacaaaggtttgtacatcaactctggatgtatggtgactgtttggaagtaccgatatattatctaattcaaatcactctagaggcaatgcaaagaccatcactcttggccaaccaccaatcctttatgtccttcatggagctttggaaatgttagttccacacgtgttgggatgttttcttgatgacagtgtgttgctgtggtgtgatgtgcacactctacttggcagtcttgttttgtgtctgtctgccagtatgtttttctctgttttatgtctccaaatataatcacatcactaaaatagaattaaatgtcctccagctaccttaatccttgtccaaaatccaaactaaaccacaaaacaaaccaaaacaagaacaaccttgtgggcaaagattgcagtccattgcaatggattcgattggaagtgaaatgttgagtagctgaggcatggtggtggccaactgtttgggtctggattatgatatatcggtattatctaatgcctcgacttaaaactcattcgcttggttcgattcttcgcttgaagaagtgacaattgttgagagcttgctcctccacccctgtgccttgtcactcaccctctcttttgcataggcttaaatcaagtgatgcttacaaaaaagcctggggcaataatcaggacggagtggtggccagccagcctgctcgtgtagtggacgaacgggagcagatggccatcagtggcggcttcatccgcagggtaacaaatgatgcccgagaaaatgaaatggatgaaaacctagagcaggtgagcggcatcatcgggaacctccgtcacatggccctggatatgggcaatgagatcgatacacagaatcgccagatcgacaggatcatggagaaggctgattccaacaaaaccagaattgatgaggccaaccaacgtgcaacaaagatgctgggaagtggttaagtgtgcccacccgtgttctcctccaaatgctgtcgggcaagatagctccttcatgcttttctcatggtattatctagtaggtctgcacacataacacacatcagtccacccccattgtgaatgttgtcctgtgtcatctgtcagcttcccaacaatactttgtgtcttttgttctctcttggtctctttctttccaaaggttgtacatagtggtcatttggtggctctaactccttgatgtcttgagtttcatttttcattttctctcctcggtggcatttgctgaataacaacaatttaggaatgctcaatgtgctgttgattctttcaatccacagtattgttcttgtaaaactgtgacattccacagagttactgccacggtcctttgagtgtcaggctctgaatctctcaaaatgtgccgtctttggttcctcatggctgttatctgtctttatgatttcatgattagacaatgtggaattacataacaggcattgcactaaaagtgatgtgatttatgcatttatgcatgagaactaaatagatttttagattcctacttaaacaaaaactttccatgacagtagcatactgatgagacaacacacacacacacaaaacaacagcaacaacaacagaacaacaacaaagcatgctcagtattgagacactgtcaagattaagttataccagcaaaagtgcagtagtgtcacttttttcctgtcaatatatagagacttctaaatcataatcatccttttttaaaaaaaagaattttaaaaaagatggatttgacacactcaccatttaatcatttccagcaaaatatatgtttggctgaaattatgtcaaatggatgtaatatagggtttgtttgctgcttttgatggctacgttttggagagagcaatcttgctgtgaaacagtgtggatgtaaattttataaggctgactcttactaaccaccatttcccctgtggtttgttatcagtacaattctttgttgcttaatctagagctatgcacaccaaattgctgagatgtttagtagctgataaagaaaccttttaaaaaaataatataaatgaatgaaatataaactgtgagataaatatcattatagcatgtaatattaaattcctcctgtctcctctgtcagtttgtgaagtgattgacattttgtagctagtttaaaattattaaaaattatagactcca

SEQ ID NO: 417222 - DNA, 1609 bp, Homo sapiens
agcggggtcatctttgatgagggcagagctcacgttgcattgaagacgaaacctcggggaggtcaggcgctgtctttccttccctccctgctcggcggctccaccacagttgcaacctgctcgtgtagtggacgaacgggagcagatggccatcagtggcggcttcatccgcagggtaacaaatgatgcccgagaaaatgaaatggatgaaaacctagagcaggtgagcggcatcatcgggaacctccgtcacatggccctggatatgggcaatgagatcgatacacagaatcgccagatcgacaggatcatggagaaggctgattccaacaaaaccagaattgatgaggccaaccaacgtgcaacaaagatgctgggaagtggttaagtgtgcccacccgtgttctcctccaaatgctgtcgggcaagatagctccttcatgcttttctcatggtattatctagtaggtctgcacacataacacacatcagtccacccccattgtgaatgttgtcctgtgtcatctgtcagcttcccaacaatactttgtgtcttttgttctctcttggtctctttctttccaaaggttgtacatagtggtcatttggtggctctaactccttgatgtcttgagtttcatttttcattttctctcctcggtggcatttgctgaataacaacaatttaggaatgctcaatgtgctgttgattctttcaatccacagtattgttcttgtaaaactgtgacattccacagagttactgccacggtcctttgagtgtcaggctctgaatctctcaaaatgtgccgtctttggttcctcatggctgttatctgtctttatgatttcatgattagacaatgtggaattacataacaggcattgcactaaaagtgatgtgatttatgcatttatgcatgagaactaaatagatttttagattcctacttaaacaaaaactttccatgacagtagcatactgatgagacaacacacacacacacaaaacaacagcaacaacaacagaacaacaacaaagcatgctcagtattgagacactgtcaagattaagttataccagcaaaagtgcagtagtgtcacttttttcctgtcaatatatagagacttctaaatcataatcatccttttttaaaaaaaagaattttaaaaaagatggatttgacacactcaccatttaatcatttccagcaaaatatatgtttggctgaaattatgtcaaatggatgtaatatagggtttgtttgctgcttttgatggctacgttttggagagagcaatcttgctgtgaaacagtgtggatgtaaattttataaggctgactcttactaaccaccatttcccctgtggtttgttatcagtacaattctttgttgcttaatctagagctatgcacaccaaattgctgagatgtttagtagctgataaagaaaccttttaaaaaaataatataaatgaatgaaatataaactgtgagataaatatcattatagcatgtaatattaaattcctcctgtctcctctgtcagtttgtgaagtgattgacattttgtagctagtttaaaattattaaaaattatagactcca

SEQ ID NO: 417223 - DNA, 1769 bp, Homo sapiens
agcggggtcatctttgatgagggcagagctcacgttgcattgaagacgaaacctcggggaggtcaggcgctgtctttccttccctccctgctcggcggctccaccacagttgcaacctgcagaggcccggagaacacaaccctcccgagaagcccaggtccagagccaaacccgtcactgaccccccagcccaggcgcccagccactccccaccgctaccatggccgaagacgcagacatgcgcaatgagctggaggagatgcagcgaagggctgaccagttggctgatgagtcgctggaaagcacccgtcgtatgctgcaactggttgaagagggtaacaaatgatgcccgagaaaatgaaatggatgaaaacctagagcaggtgagcggcatcatcgggaacctccgtcacatggccctggatatgggcaatgagatcgatacacagaatcgccagatcgacaggatcatggagaaggctgattccaacaaaaccagaattgatgaggccaaccaacgtgcaacaaagatgctgggaagtggttaagtgtgcccacccgtgttctcctccaaatgctgtcgggcaagatagctccttcatgcttttctcatggtattatctagtaggtctgcacacataacacacatcagtccacccccattgtgaatgttgtcctgtgtcatctgtcagcttcccaacaatactttgtgtcttttgttctctcttggtctctttctttccaaaggttgtacatagtggtcatttggtggctctaactccttgatgtcttgagtttcatttttcattttctctcctcggtggcatttgctgaataacaacaatttaggaatgctcaatgtgctgttgattctttcaatccacagtattgttcttgtaaaactgtgacattccacagagttactgccacggtcctttgagtgtcaggctctgaatctctcaaaatgtgccgtctttggttcctcatggctgttatctgtctttatgatttcatgattagacaatgtggaattacataacaggcattgcactaaaagtgatgtgatttatgcatttatgcatgagaactaaatagatttttagattcctacttaaacaaaaactttccatgacagtagcatactgatgagacaacacacacacacacaaaacaacagcaacaacaacagaacaacaacaaagcatgctcagtattgagacactgtcaagattaagttataccagcaaaagtgcagtagtgtcacttttttcctgtcaatatatagagacttctaaatcataatcatccttttttaaaaaaaagaattttaaaaaagatggatttgacacactcaccatttaatcatttccagcaaaatatatgtttggctgaaattatgtcaaatggatgtaatatagggtttgtttgctgcttttgatggctacgttttggagagagcaatcttgctgtgaaacagtgtggatgtaaattttataaggctgactcttactaaccaccatttcccctgtggtttgttatcagtacaattctttgttgcttaatctagagctatgcacaccaaattgctgagatgtttagtagctgataaagaaaccttttaaaaaaataatataaatgaatgaaatataaactgtgagataaatatcattatagcatgtaatattaaattcctcctgtctcctctgtcagtttgtgaagtgattgacattttgtagctagtttaaaattattaaaaattatagactcca

SEQ ID NO: 417224 - DNA, 1355 bp, Homo sapiens
gatcccccgggctgcagaattcggcacgaggagagaatcgccagatcgacaggatcatggagaaggctgattccaacaaaaccagaattgatgaggccaaccaacgtgcaacaaagatgctgggaagtggttaagtgtgcccacccgtgttctcctccaaatgctgtcgggcaagatagctccttcatgcttttctcatggtattatctagtaggtctgcacacataacacacatcagtccacccccattgtgaatgttgtcctgtgtcatctgtcagcttcccaacaatactttgtgtcttttgttctctcttggtctctttctttccaaaggttgtacatagtggtcatttggtggctctaactccttgatgtcttgagtttcatttttcattttctctcctcggtggcatttgctgaataacaacaatttaggaatgctcaatgtgctgttgattctttcaatccacagtattgttcttgtaaaactgtgacattccacagagttactgccacggtcctttgagtgtcaggctctgaatctctcaaaatgtgccgtctttggttcctcatggctgttatctgtctttatgatttcatgattagacaatgtggaattacataacaggcattgcactaaaagtgatgtgatttatgcatttatgcatgagaactaaatagatttttagattcctacttaaacaaaaactttccatgacagtagcatactgatgagacaacacacacacacacaaaacaacagcaacaacaacagaacaacaacaaagcatgctcagtattgagacactgtcaagattaagttataccagcaaaagtgcagtagtgtcacttttttcctgtcaatatatagagacttctaaatcataatcatccttttttaaaaaaaagaattttaaaaaagatggatttgacacactcaccatttaatcatttccagcaaaatatatgtttggctgaaattatgtcaaatggatgtaatatagggtttgtttgctgcttttgatggctacgttttggagagagcaatcttgctgtgaaacagtgtggatgtaaattttataaggctgactcttactaaccaccatttcccctgtggtttgttatcagtacaattctttgttgcttaatctagagctatgcacaccaaattgctgagatgtttagtagctgataaagaaaccttttaaaaaaataatataaatgaatgaaatataaactgtgagataaatatcattatagcatgtaatattaaattcctcctgtctcctctgtcagtttgtgaagtgattgacattttgtagctagtttaaaattattaaaaattatagactcca

SEQ ID NO: 417225 - DNA, 1312 bp, Homo sapiens
catgggacataatttcaccccaacatatattttgctggaaatgattaaatggtgagtgtgtccaatccatcttttttaaaattctttttttttaaaaaaggatgattatgatttagaagtctctatatattgacaggaaaaaagtgacactactgcacttttgctggtataacttaatccttgacagtgtctcaatactgagcatgctttgatgttgtcctgtgtcatctgtcagcttcccaacaatactttgtgtcttttgttctctcttggtctctttctttccaaaggttgtacatagtggtcatttggtggctctaactccttgatgtcttgagtttcatttttcattttctctcctcggtggcatttgctgaataacaacaatttaggaatgctcaatgtgctgttgattctttcaatccacagtattgttcttgtaaaactgtgacattccacagagttactgccacggtcctttgagtgtcaggctctgaatctctcaaaatgtgccgtctttggttcctcatggctgttatctgtctttatgatttcatgattagacaatgtggaattacataacaggcattgcactaaaagtgatgtgatttatgcatttatgcatgagaactaaatagatttttagattcctacttaaacaaaaactttccatgacagtagcatactgatgagacaacacacacacacacaaaacaacagcaacaacaacagaacaacaacaaagcatgctcagtattgagacactgtcaagattaagttataccagcaaaagtgcagtagtgtcacttttttcctgtcaatatatagagacttctaaatcataatcatccttttttaaaaaaaagaattttaaaaaagatggatttgacacactcaccatttaatcatttccagcaaaatatatgtttggctgaaattatgtcaaatggatgtaatatagggtttgtttgctgcttttgatggctacgttttggagagagcaatcttgctgtgaaacagtgtggatgtaaattttataaggctgactcttactaaccaccatttcccctgtggtttgttatcagtacaattctttgttgcttaatctagagctatgcacaccaaattgctgagatgtttagtagctgataaagaaaccttttaaaaaaataatataaatgaatgaaatataaactgtgagataaatatcattatagcatgtaatattaaattcctcctgtctcctctgtcagtttgtgaagtgattgacattttgtagctagtttaaaattattaaaaattatagactcca

SEQ ID NO: 417226 - DNA, 674 bp, Homo sapiens
agcggggtcatctttgatgagggcagagctcacgttgcattgaagacgaaacctcggggaggtcaggcgctgtctttccttccctccctgctcggcggctccaccacagttgcaacctgcagaggcccggagaacacaaccctcccgagaagcccaggtccagagccaaacccgtcactgaccccccagcccaggcgcccagccactccccaccgctaccatggccgaagacgcagacatgcgcaatgagctggaggagatgcagcgaagggctgaccagttggctgatgagtcgctggaaagcacccgtcgtatgctgcaactggttgaagaggtaagaagtgacagtattttaagataaaggaacaaatcccttatgctgatacatcctttcctagttgctatgatgtttccttgggccatgatcccctagattccagtgtggatgtagcctatcagaaaggcacagaatgagggagatgctgtatttaagttgccagatagccatgaagacaccttcaccctccttcccagcccaagccacctctgtagtctggtctgggaagcagagaataatagaatttccaagtctgtgctctcaagaaatcacagacgattgtatcactttaagcaaattagagcaattcttaatatacaaaggaattatctacata

SEQ ID NO: 417227 - DNA, 257 bp, Homo sapiens
actgatttctctttctctcttttctctctctaactccttttcaactttgctaccattattggaatgtagtaaagatgctggtatcaggactttggttatgttggatgaacaaggaggtaagttcagatttcttcagtaagaacaattcctcttctgaataatgtgcattttaaaattatttgtgcatacgcagatggtcgctttgacatgtgttacacatgtacacgaatgtgagggttctagatttttcatcttgc

SEQ ID NO: 417228 - DNA, 2004 bp, Homo sapiens
agcggggtcatctttgatgagggcagagctcacgttgcattgaagacgaaacctcggggaggtcaggcgctgtctttccttccctccctgctcggcggctccaccacagttgcaacctgcagaggcccggagaacacaaccctcccgagaagcccaggtccagagccaaacccgtcactgaccccccagcccaggcgcccagccactccccaccgctaccatggccgaagacgcagacatgcgcaatgagctggaggagatgcagcgaagggctgaccagttggctgatgagtcgctggaaagcacccgtcgtatgctgcaactggttgaagagagtaaagatgctggtatcaggactttggttatgttggatgaacaaggagaacaactggaacgcattgaggaagggatggaccaaatcaataaggacatgaaagaagcagaaaagaatttgacggacctaggaaaattctgcgggctttgtgtgtgtccctgtaacaagcttaaatcaagtgatgcttacaaaaaagcctggggcaataatcaggacggagtggtggccagccagcctgctcgtgtagtggacgaacgggagcagatggccatcagtggcggcttcatccgcagggtaacaaatgatgcccgagaaaatgaaatggatgaaaacctagagcaggtgagcggcatcatcgggaacctccgtcacatggccctggatatgggcaatgagatcgatacacagaatcgccagatcgacaggatcatggagaaggctgattccaacaaaaccagaattgatgaggccaaccaacgtgcaacaaagatgctgggaagtggttaagtgtgcccacccgtgttctcctccaaatgctgtcgggcaagatagctccttcatgcttttctcatggtattatctagtaggtctgcacacataacacacatcagtccacccccattgtgaatgttgtcctgtgtcatctgtcagcttcccaacaatactttgtgtcttttgttctctcttggtctctttctttccaaaggttgtacatagtggtcatttggtggctctaactccttgatgtcttgagtttcatttttcattttctctcctcggtggcatttgctgaataacaacaatttaggaatgctcaatgtgctgttgattctttcaatccacagtattgttcttgtaaaactgtgacattccacagagttactgccacggtcctttgagtgtcaggctctgaatctctcaaaatgtgccgtctttggttcctcatggctgttatctgtctttatgatttcatgattagacaatgtggaattacataacaggcattgcactaaaagtgatgtgatttatgcatttatgcatgagaactaaatagatttttagattcctacttaaacaaaaactttccatgacagtagcatactgatgagacaacacacacacacacaaaacaacagcaacaacaacagaacaacaacaaagcatgctcagtattgagacactgtcaagattaagttataccagcaaaagtgcagtagtgtcacttttttcctgtcaatatatagagacttctaaatcataatcatccttttttcaaaatatatgtttggctgaaattatgtcaaatggatgtaatatagggtttgtttgctgcttttgatggctacgttttggagagagcaatcttgctgtgaaacagtgtggatgtaaattttataaggctgactcttactaaccaccatttcccctgtggtttgttatcagtacaattctttgttgcttaatctagagctatgcacaccaaattgctgagatgtttagtagctgataaagaaaccttttaaaaaaataatataaatgaatgaaatataaactgtgagataaatatcattatagcatgtaatattaaattcctcctgtctcctctgtcagtttgtgaagtgattgacattttgtagctagtttaaaattattaaaaattatagactcca

SEQ ID NO: 417229 - DNA, 1996 bp, Homo sapiens
agcggggtcatctttgatgagggcagagctcacgttgcattgaagacgaaacctcggggaggtcaggcgctgtctttccttccctccctgctcggcggctccaccacagttgcaacctgcagaggcccggagaacacaaccctcccgagaagcccaggtccagagccaaacccgtcactgaccccccagcccaggcgcccagccactccccaccgctaccatggccgaagacgcagacatgcgcaatgagctggaggagatgcagcgaagggctgaccagttggctgatgagtcgctggaaagcacccgtcgtatgctgcaactggttgaagagagtaaagatgctggtatcaggactttggttatgttggatgaacaaggagaacaactggaacgcattgaggaagggatggaccaaatcaataaggacatgaaagaagcagaaaagaatttgacggacctaggaaaattctgcgggctttgtgtgtgtccctgtaacaagcttaaatcaagtgatgcttacaaaaaagcctggggcaataatcaggacggagtggtggccagccagcctgctcgtgtagtggacgaacgggagcagatggccatcagtggcggcttcatccgcagggtaacaaatgatgcccgagaaaatgaaatggatgaaaacctagagcaggtgagcggcatcatcgggaacctccgtcacatggccctggatatgggcaatgagatcgatacacagaatcgccagatcgacaggatcatggagaagtaagtgtgcccacccgtgttctcctccaaatgctgtcgggcaagatagctccttcatgcttttctcatggtattatctagtaggtctgcacacataacacacatcagtccacccccattgtgaatgttgtcctgtgtcatctgtcagcttcccaacaatactttgtgtcttttgttctctcttggtctctttctttccaaaggttgtacatagtggtcatttggtggctctaactccttgatgtcttgagtttcatttttcattttctctcctcggtggcatttgctgaataacaacaatttaggaatgctcaatgtgctgttgattctttcaatccacagtattgttcttgtaaaactgtgacattccacagagttactgccacggtcctttgagtgtcaggctctgaatctctcaaaatgtgccgtctttggttcctcatggctgttatctgtctttatgatttcatgattagacaatgtggaattacataacaggcattgcactaaaagtgatgtgatttatgcatttatgcatgagaactaaatagatttttagattcctacttaaacaaaaactttccatgacagtagcatactgatgagacaacacacacacacacaaaacaacagcaacaacaacagaacaacaacaaagcatgctcagtattgagacactgtcaagattaagttataccagcaaaagtgcagtagtgtcacttttttcctgtcaatatatagagacttctaaatcataatcatccttttttaaaaaaaagaattttaaaaaagatggatttgacacactcaccatttaatcatttccagcaaaatatatgtttggctgaaattatgtcaaatggatgtaatatagggtttgtttgctgcttttgatggctacgttttggagagagcaatcttgctgtgaaacagtgtggatgtaaattttataaggctgactcttactaaccaccatttcccctgtggtttgttatcagtacaattctttgttgcttaatctagagctatgcacaccaaattgctgagatgtttagtagctgataaagaaaccttttaaaaaaataatataaatgaatgaaatataaactgtgagataaatatcattatagcatgtaatattaaattcctcctgtctcctctgtcagtttgtgaagtgattgacattttgtagctagtttaaaattattaaaaattatagactcca

SEQ ID NO: 417230 - DNA, 2001 bp, Homo sapiens
agcggggtcatctttgatgagggcagagctcacgttgcattgaagacgaaacctcggggaggtcaggcgctgtctttccttccctccctgctcggcggctccaccacagttgcaacctgcagaggcccggagaacacaaccctcccgagaagcccaggtccagagccaaacccgtcactgaccccccagcccaggcgcccagccactccccaccgctaccatggccgaagatcgctggaaagcacccgtcgtatgctgcaactggttgaagagagtaaagatgctggtatcaggactttggttatgttggatgaacaaggagaacaactggaacgcattgaggaagggatggaccaaatcaataaggacatgaaagaagcagaaaagaatttgacggacctaggaaaattctgcgggctttgtgtgtgtccctgtaacaagcttaaatcaagtgatgcttacaaaaaagcctggggcaataatcaggacggagtggtggccagccagcctgctcgtgtagtggacgaacgggagcagatggccatcagtggcggcttcatccgcagggtaacaaatgatgcccgagaaaatgaaatggatgaaaacctagagcaggtgagcggcatcatcgggaacctccgtcacatggccctggatatgggcaatgagatcgatacacagaatcgccagatcgacaggatcatggagaaggctgattccaacaaaaccagaattgatgaggccaaccaacgtgcaacaaagatgctgggaagtggttaagtgtgcccacccgtgttctcctccaaatgctgtcgggcaagatagctccttcatgcttttctcatggtattatctagtaggtctgcacacataacacacatcagtccacccccattgtgaatgttgtcctgtgtcatctgtcagcttcccaacaatactttgtgtcttttgttctctcttggtctctttctttccaaaggttgtacatagtggtcatttggtggctctaactccttgatgtcttgagtttcatttttcattttctctcctcggtggcatttgctgaataacaacaatttaggaatgctcaatgtgctgttgattctttcaatccacagtattgttcttgtaaaactgtgacattccacagagttactgccacggtcctttgagtgtcaggctctgaatctctcaaaatgtgccgtctttggttcctcatggctgttatctgtctttatgatttcatgattagacaatgtggaattacataacaggcattgcactaaaagtgatgtgatttatgcatttatgcatgagaactaaatagatttttagattcctacttaaacaaaaactttccatgacagtagcatactgatgagacaacacacacacacacaaaacaacagcaacaacaacagaacaacaacaaagcatgctcagtattgagacactgtcaagattaagttataccagcaaaagtgcagtagtgtcacttttttcctgtcaatatatagagacttctaaatcataatcatccttttttaaaaaaaagaattttaaaaaagatggatttgacacactcaccatttaatcatttccagcaaaatatatgtttggctgaaattatgtcaaatggatgtaatatagggtttgtttgctgcttttgatggctacgttttggagagagcaatcttgctgtgaaacagtgtggatgtaaattttataaggctgactcttactaaccaccatttcccctgtggtttgttatcagtacaattctttgttgcttaatctagagctatgcacaccaaattgctgagatgtttagtagctgataaagaaaccttttaaaaaaataatataaatgaatgaaatataaactgtgagataaatatcattatagcatgtaatattaaattcctcctgtctcctctgtcagtttgtgaagtgattgacattttgtagctagtttaaaattattaaaaattatagactcca

SEQ ID NO: 417231 - DNA, 661 bp, Homo sapiens
agcggggtcatctttgatgagggcagagctcacgttgcattgaagacgaaacctcggggaggtcaggcgctgtctttccttccctccctgctcggcggctccaccacagttgcaacctgcagaggcccggagaacacaaccctcccgagaagcccaggtccagagccaaacccgtcactgaccccccagcccaggcgcccagccactccccaccgctaccatggccgaagacgcagacatgcgcaatgagctggaggagatgcagcgaagggctgaccagttggctgatgagtcgctggaaagcacccgtcgtatgctgcaactggttgaagagagtaaagatgctggtatcaggactttggttatgttggatgaacaaggagaacaactggaacgcattgaggaagggatggaccaaatcaataaggacatgaaagaagcagaaaagaatttgacggacctaggaaaattctgcgggctttgtgtgtgtccctgtaacaagcttaaatcaagtgatgcttacaaaaaagcctggggcaataatcaggacggagtggtggccagccagcctgctcgtgtagtggacgaacgggagcagatggtcttattcgtcgagtttttttataaggtaactatttatttcttaaaaaattaaaaattg

SEQ ID NO: 417232 - DNA, 602 bp, Homo sapiens
  misc_feature (561)..(561): n is a, c, g, or t
agcggggtcatctttgatgagggcagagctcacgttgcattgaagacgaaacctcggggaggtcaggcgctgtctttccttccctccctgctcggcggctccaccacagttgcaacctgcagaggcccggagaacacaaccctcccgagaagcccaggtccagagccaaacccgtcactgaccccccagcccaggcgcccagccactccccaccgctaccatggccgaagaaacaactggaacgcattgaggaagggatggaccaaatcaataaggacatgaaagaagcagaaaagaatttgacggacctaggaaaattctgcgggctttgtgtgtgtccctgtaacaagcttaaatcaagtgatgcttacaaaaaagcctggggcaataatcaggacggagtggtggccagccagcctgctcgtgtagtggacgaacgggagcagatggccatcagtggcggcttcatccgcagtaacaaatgatgcccgagaaaatgaaatgggatgaaaacccgtcactggaccccccagcccaggcgcccagccacttccccaccgnttaccatggccgaagacggcagacatgcgcaatggagctgg

SEQ ID NO: 417233 - DNA, 2443 bp, Homo sapiens
atgactgacttgtagctggaagaaatcatcggatttttattcttttattaaagaaaaaaaatttgaaatgccttccatgtgccaagcactgtgtcaggtgggagatgacagcttggtgaaacctctgtcaggctgtcttcctccgctttctctatccctgggtttccccctgcctaaaaaggattttgtgcttcgtggcttgtccaggcaagcaggccgtcgcgggacctagaccgagacagtgagtctctctttctcccgggcctcccttctgtttcctgggctgcaggggagcaggaaatctggggcgagattcccgccgcggacgcgcactgccgaagcctggtccctcgacctgtccctgcccagcgcgggggcgcaaccgccacgcctcctcacccctccctccggctgcacgaataatgacaacagccgcccctcccacctttggcgtcacgttcaaaacaatcctttgactacaactcccagaaggccgagcggcttagcgagtgcacccgctctcggctgctccggcaaactacacatcccaaagggcagcgccgaccgcgtgtcctttcacagcgaaagtgcggaactgcgtttgtttccggcgtgggtccgggcaagaaccgcttgtagtttggtttaaattctgcacgggaggaccttctgagtttacctgttgggctcctggctgcgcaggcacagcagctacacagaagagatgggagaagaggctaatgatgacaagaagccaaccactaaatttgaactagagcgagaaacagaacttcgctttgaggtggaggcatctcagtcagttcagttggagttgttgactggcatggcagagatctttggcacagagctgacccgaaacaagaaattcacctttgatgctggtgccaaggtggctgttttcacttggcatggctgttctgtgcaactgagcggccgcactgaggtggcttatgtctccaaggacactcctatgttgctttacctcaacactcacacagccttggaacagatgcggaggcaagcggaaaaggaagaagagcgaggtccccgagtgatggtagtgggccccactgatgtgggcaagtctacagtgtgtcgccttctgctcaactacgcagtgcgtttgggccgccgtcccacttatgtggagctggatgtgggccagggttctgtgtccatccctggtaccatgggggccctctacatcgagcggcctgcagatgtcgaagagggtttctctatccaggcccctctggtgtatcattttggttccaccactcctggcactaacatcaagctttataataagattacatctcgtttagcagatgtgttcaaccaaaggtgtgaggtgaaccgaagggcatctgtgagtggctgtgtcattaacacctgtggctgggtcaagggctctggttaccaggctctggtgcatgcagcctcagcttttgaggtggatgtcgttgttgttctggatcaagaacgactgtacaatgaactgaaacgggacctcccccactttgtacgcactgtgctgctccctaaatctgggggtgtggtggagcgctccaaggacttccggcgggaatgtagggatgagcgtatccgtgagtatttttatggattccgaggctgtttctatccccatgccttcaatgtcaaattttcagatgtgaaaatctacaaagttggggcacccaccatcccagactcctgtttacctttgggcatgtctcaagaggataatcagctcaagctagtacctgtcactcctgggcgagatatggtgcaccacctactgagtgttagcactgccgagggtacagaggagaacctgtccgagacaagtgtagctggcttcattgtggtgaccagtgtggacctggagcatcaggtgtttactgttctgtctccagcccctcgcccactgcctaagaacttccttctcatcatggatatccggttcatggatctgaagtagagatcagcaggaagccttgctgcctgggacatagagatcatctggccacccctagaggcagatgggctgagataaaagactgttggggccacctgaccagtaaactgtggactagtagaaagttcatattctacctctaaaaacaggtagtggtaacctgactcttctaatcttgaaccaaaaggaaaaccatgagactgtaattggtttcttagaccacctaagatgccactttgaattctctaagaccctggagaattgcatttctttcactgtgctactatgtggtttttaaaaaatcaatgctttatattccatatgtggttcttacccatttatctaggatgaaagtgtgaattagagggactccttccaataaagttcaaacttaaaaaaaatcattttaataaatatttttgccatatcataaaaaaaaaataa

SEQ ID NO: 417234 - DNA, 2393 bp, Homo sapiens
atgactgacttgtagctggaagaaatcatcggatttttattcttttattaaagaaaaaaaatttgaaatgccttccatgtgccaagcactgtgtcaggtgggagatgacagcttggtgaaacctctgtcaggctgtcttcctccgctttctctatccctgggtttccccctgcctaaaaaggattttgtgcttcgtggcttgtccaggcaagcaggccgtcgcgggacctagaccgagacagtgagtctctctttctcccgggcctcccttctgtttcctgggctgcaggggagcaggaaatctggggcgagattcccgccgcggacgcgcactgccgaagcctggtccctcgacctgtccctgcccagcgcgggggcgcaaccgccacgcctcctcacccctccctccggctgcacgaataatgacaacagccgcccctcccacctttggcgtcacgttcaaaacaatcctttgactacaactcccagaaggccgagcggcttagcgagtgcacccgctctcggctgctccggcaaactacacatcccaaagggcagcgccgaccgcgtgtcctttcacagcgaaagtgcggaactgcgtttgtttccggcgtgggtccgggcaagaaccgcttgtagtttggtttaaattctgcacgggaggaccttctgagtttacctgttgggctcctggctgcgcaggcacagcagctacacagaagagatgggagaagaggctaatgatgacaagaagccaaccactaaatttgaactagagcgagaaacagaacttcgctttgaggtggaggcatctcagtcagttcagttggagttgttgactggcatggcagagatctttggcacagagctgacccgaaacaagaaattcacctttgatgctggtgccaaggtggctgttttcacttggcatggctgttctgtgcaactgagcggccgcactgaggtggcttatgtctccaaggacactcctatgttgctttacctcaacactcacacagccttggaacagatgcggaggcaagcggaaaaggaagaagagcgaggtccccgagtgatggtagtgggccccactgatgtgggcaagtctacagtgtgtcgccttctgctcaactacgcagtgcgtttgggccgccgtcccacttatgtggagctggatgtgggccagggttctgtgtccatccctggtaccatgggggccctctacatcgagcggcctgcagatgtcgaagagggtttctctatccaggcccctctggtgtatcattttggttccaccactcctggcactaacatcaagctttataataagattacatctcgtttagcagatgtgttcaaccaaaggtgtgaggtgaaccgaagggcatctgtgagtggctgtgtcattaacacctgtggctgggtcaagggctctggttaccaggctctggtgcatgcagcctcagcttttgaggtggatgtcgttgttgttctggatcaagaacgactgtacaatgaactgaaacgggacctcccccactttgtacgcactgtgctgctccctaaatctgggggtgtggtggagcgctccaaggacttccggcgggaatgtagggatgagcgtatccgtgagtatttttatggattccgaggctgtttctatccccatgccttcaatgtcaaattttcagatgtgaaaatctacaaagttggggcacccaccatcccagactcctgtttacctttgggcatgtctcaagaggataatcagctcaagctagtacctgtcactcctgggcgagatatggtgcaccacctactgagtgttagcactgccgagggtacagaggagaacctgtccgagacaagtgtagctggcttcattgtggtgaccagtgtggacctggagcatcaggtgtttactgttctgtctccagcccctcgcccactgcctaagaacttccttctcatcatggatatccggttcatggatctgaagtagagatcagcaggaagccttgctgcctgggacatagagatcatctggccacccctagaggcagatgggctgagataaaagactgttggggccacctgaccagtaaactgtggactagtagaaagttcatattctacctctaaaaacaggtagtggtaacctgactcttctaatcttgaaccaaaaggaaaaccatgagactgtaattggtttcttagaccacctaagatgccactttgaattctctaagaccctggagaattgcatttctttcactgtgctactatgtggtttttaaaaaatcaatgctttatattccatatgtggttcttacccatttatctaggatgaaagtgtgaattagagggactccttccaataaagttcaaactta

SEQ ID NO: 417235 - DNA, 2251 bp, Homo sapiens
atgactgacttgtagctggaagaaatcatcggatttttattcttttattaaagaaaaaaaatttgaaatgccttccatgtgccaagcactgtgtcaggtgggagatgacagcttggtgaaacctctgtcaggctgtcttcctccgctttctctatccctgggtttccccctgcctaaaaaggattttgtgcttcgtggcttgtccaggcaagcaggccgtcgcgggacctagaccgagacagtgagtctctctttctcccgggcctcccttctgtttcctgggctgcaggggagcaggaaatctggggcgagattcccgccgcggacgcgcactgccgaagcctggtccctcgacctgtccctgcccagcgcgggggcgcaaccgccacgcctcctcacccctccctccggctgcacgaataatgacaacagccgcccctcccacctttggcgtcacgttcaaaacaatcctttgactacaactcccagaaggccgagcggcttagcgagtgcacccgctctcggctgctccggcaaactacacatcccaaagggcagcgccgaccgcgtgtcctttcacagcgaaagtgcggaactgcgtttgtttccggcgtgggtccgggcaagaaccgcttgtagtttggtttaaattctgcacgggaggaccttctgagtttacctgttgggctcctggctgcgcaggcacagcagctacacagaagagatgggagaagaggctaatgatgacaagaagccaaccactaaatttgaactagagcgagaaacagaacttcgctttgaggtggaggcatctcagtcagttcagttggagttgttgactggcatggcagagatctttggcacagagctgacccgaaacaagaaattcacctttgatgctggtgccaaggtggctgttttcacttggcatggctgttctgtgcaactgagcggccgcactgaggtggcttatgtctccaaggacactcctatgttgctttacctcaacactcacacagccttggaacagatgcggaggcaagcggaaaaggaagaagagcgaggtccccgagtgatggtagtgggccccactgatgtgggcaagtctacagtgtgtcgccttctgctcaactacgcaattacatctcgtttagcagatgtgttcaaccaaaggtgtgaggtgaaccgaagggcatctgtgagtggctgtgtcattaacacctgtggctgggtcaagggctctggttaccaggctctggtgcatgcagcctcagcttttgaggtggatgtcgttgttgttctggatcaagaacgactgtacaatgaactgaaacgggacctcccccactttgtacgcactgtgctgctccctaaatctgggggtgtggtggagcgctccaaggacttccggcgggaatgtagggatgagcgtatccgtgagtatttttatggattccgaggctgtttctatccccatgccttcaatgtcaaattttcagatgtgaaaatctacaaagttggggcacccaccatcccagactcctgtttacctttgggcatgtctcaagaggataatcagctcaagctagtacctgtcactcctgggcgagatatggtgcaccacctactgagtgttagcactgccgagggtacagaggagaacctgtccgagacaagtgtagctggcttcattgtggtgaccagtgtggacctggagcatcaggtgtttactgttctgtctccagcccctcgcccactgcctaagaacttccttctcatcatggatatccggttcatggatctgaagtagagatcagcaggaagccttgctgcctgggacatagagatcatctggccacccctagaggcagatgggctgagataaaagactgttggggccacctgaccagtaaactgtggactagtagaaagttcatattctacctctaaaaacaggtagtggtaacctgactcttctaatcttgaaccaaaaggaaaaccatgagactgtaattggtttcttagaccacctaagatgccactttgaattctctaagaccctggagaattgcatttctttcactgtgctactatgtggtttttaaaaaatcaatgctttatattccatatgtggttcttacccatttatctaggatgaaagtgtgaattagagggactccttccaataaagttcaaacttaaaaaaaatcattttaataaatatttttgccatatcataaaaaaaaaataa

SEQ ID NO: 417236 - DNA, 373 bp, Homo sapiens
ggccacgtgcaacctgttcgctgtactaactgtgcccgatgcgtgcccaaggacaaggccattaagaaattcgtcattcgaaacatagtggaggccgtagcagtcagggacatttctgaagcaagcgtcttcgatgcctatgtgcttcccaagctgtatgtgaagctacattactgtgtgagttgtgcaattcacagcaaagtagtcaggaatcgatctcgtgaagcccgcaaggaccgaacacccccacccagatttagacctgcgggtgctgccccacgtcccccaccaaagcccatgtaaggagctgagttcttaaagactgaagacaggttattctctggagaaaaataaaatggaaattgtaaaaaaa

SEQ ID NO: 417237 - DNA, 725 bp, Homo sapiens
  misc_feature (457)..(457): n is a, c, g, or t
ctcatactcataatcagtattcaagtgataatgcatgatgttacaaatcagtgtctaaaaatctattaaagcaaattagagcaatggatttaatgtacatcggtattagatccacatgccaactaacctcttaaaactaccacttgttgaatttggtgtgaaaaaagaatattcacagtgatctgaaataatatttttaaatttctctgtgtttcaactatatatctttgtgaggccagattttcttcatttcttaaactaaaaaacatgttcaacagattgaatgcagaggcaggtatgagagtatagctatctaccattaaggcagacactgaagagttttgtaaaaaagtaaaacaatgctattctttttactaaatataattttattcagaaaattttagttcttttctgatgaactatttatgttaatatgactttattagttttaaaatgntacaatttttcttagttttaatttgcaatatgttaaatatcaatggagatactcccataaaaatgccatttggggtcctcaattatttttaagactcataaaggaatcctaagaccaaaagcttgaaactgctgctctcagtaaataggcaactgtgtatatccaaggttctaatagactctcactatgtataaacacaaaggcctacaactagatttttaaacatttttttttctaaattttgtttttttgtattttttatagaggg

SEQ ID NO: 417238 - DNA, 302 bp, Homo sapiens
tagttttaagcagaatatattctttattttaaaaactggtcatttgtatatctcatacatggcaattctattaaaaactatattgattaaccagaaaactctgcttcttggtcatggcaaataataaaaagtttactttccataaattcattttgcacctttctcttcagtctttgggggatatactatcctttaattatgcttcattcaatatgtgttttgcagattggttccagtatatcagtagcacttcgttactcaataataaaaagctacaaatagattaaaagactctcaagccc

SEQ ID NO: 417239 - DNA, 296 bp, Homo sapiens
tcaactcctcaaccaatatgtggtctaaaatcccagagtataagttcctgttttggctttgagttatctctgcttattatctggaggttaacctttctttccttaaagcttagacacgtattggaaaaaacttttattatattccacatttcagtttgttggtgtgggacagccattccacaggggcttattaccccactatgttacccaaagctcctcaatatagtttttaaaacaagtaaaccattgtattttagagtaatcttaggcatgccagacaaactgttgacaaccaa

SEQ ID NO: 417240 - DNA, 346 bp, Homo sapiens
catctctttaagaaaactcaataactggtaatagaggttgtcccaggggagggaaactatatggctgagggatactggtgggagggagatttttactgtatgcctttaaaacaaagttttaaataacattttaatctgtgctcctaagaaacaaaggaaaattcctatgtgccagagaaaactgaacgatagattgggaaagcacacaaacagagagcatgagttatgtatcctgcccaagatcactcagccactaagtagtgaagccaggattcaaacttaggaaatctggctttagtacttagaataaaagatatgcttcaagtgtgtttttcctgtgtattca

SEQ ID NO: 417241 - DNA, 283 bp, Homo sapiens
catactccataaacatgaagaagttaaaaataaaaagcaaaaaaatacctagaaaaagaattatatatttggaatttaaaaaactcacatgcttctgaaaaacgtagattatagaggaaataacggaaaatcttaaaatgaattgctgaatgatcattaaaatactgcatattaaaacttgtgggattaagttagtgaatactgagagaaattaataagcttacatgcatacattaaaaagatgaaaactgtcaaattaatcaattaagcgtcaaacttaaaa

SEQ ID NO: 417242 - DNA, 1273 bp, Homo sapiens
ggaaaagaaatactgttttagagaaataacattttcaacaaaacatccctggagtcagattttgagttggggtgggctaatcagggagtcggggctctctgcgtgatgtcagttctatggctaactggtttttctaaaccagccagctgcctatcaaaacagtacaacttttctaggaaatgcaattggcaaagacacttacgatgctgagaagtacacaaggtgaaactgctccagtttttctcatagcagggtcagcaggaaagcaagtggtgcccctggtcccatctcacacaggtgagactgcaccgagaggtaacgtggccctcacagcccaccacgcctggccttcgcccaattctgaaacttcgtaggatagagctggaaagtgccacatggtgaagcgagatccagctgtctgggtggatgtcggagtccataggctgagcagagatggttcttagtgaggttctcgctgccagttgacggtgaaatcatagctgccatttacattttgtgagattatgaaaaacataagactaaagaaactaaatgtgttattcctgtggacacaaaaatgtgtgtttttcagatggggaggggaccaaaaaggaaaaacatttcatcttaaaactttcctaagacaaaggaaaacaaaaaaccatgctctacaacttcaaatttttcttacaaagaaaaatttaatattcgatgagaggttgaaccaggcttaaagcagacatactaggaaatggtgcagcctgtaagaatgccagtttgtaagtactgactttggaaaagatcatcgcctctatcagacacttagggtcctggtctggcaattttggcctgatgtgatgccacaagacccaacagagagagacacagagtccaggataatgttgacagtggtgtagccctttaggagaaatggcgctccctgcggctggtattaggttaccattggcaccgaaggaaccaggaggataagaatatccataatttcagagctgccctggcacagtacctgccccgtcggaggctctcactggcaaatgacagctctgtgcaaggagcactcccaagtataaaaattattacacagttttattctgaagaacattttgcattttaataaaaaaggatttatgtcaggaaagagtcatttacaaaccttgaagtgtttttgcctggatcagagtaagaatgtcttaagaagaggtttgtaaggtcttcataacaaagtggtgtttgttatttacaaaaaaaaaaa

SEQ ID NO: 417243 - DNA, 703 bp, Homo sapiens
gctaggtagtgggaagagccggtaaggcaggtggcatgggcagtggcagaattggccctggtagagagcagagctgatgccatccttttggcaaatagctgacattttatggtgtggtgctgggtgagccccctgtgaggggtgaacagatgtggacaggacttgggtccaggcactagagtggatgcagcctgtaagaatgccagtttgtaagtactgactttggaaaagatcatcgcctctatcagacacttagggtcctggtctggcaattttggcctgatgtgatgccacaagacccaacagagagagacacagagtccaggataatgttgacagtggtgtagccctttaggagaaatggcgctccctgcggctggtattaggttaccattggcaccgaaggaaccaggaggataagaatatccataatttcagagctgccctggcacagtacctgccccgtcggaggctctcactggcaaatgacagctctgtgcaaggagcactcccaagtataaaaattattacacagttttattctgaagaacattttgcattttaataaaaaaggatttatgtcaggaaagagtcatttacaaaccttgaagtgtttttgcctggatcagagtaagaatgtcttaagaagaggtttgtaaggtcttcataacaaagtggtgtttgttatttacaaaaaaaaaaa

SEQ ID NO: 417244 - DNA, 396 bp, Homo sapiens
tttgtttttgtacagagaaaaaggcttttaaatgaaaggtttcaaagaaatatgtctctgtagtttatgactgttaaatattctagaaagggaaagctataagaataggactttgggctggatgcagtggctcacacctgtaatcctgtcactttgggaggccaaggtgggaggatcacttgagcataggagtttgaggccaccctgggcaacatagtgagaccccatctctacaaaaaatttaaaaattagccaggcgtgatgccgagtgcttgtaatctcaattacttgggggtctgaggtgggatgatcacttgagcacaggaggtcaaggctgcagtgaaccatcattgcaccactgcactccaatctgggcaacacagtgataccgtgtct

SEQ ID NO: 417245 - DNA, 350 bp, Homo sapiens
gagctaaacaatgagaatttagccagactgggctagggtgcaggcacatccagcagggaagggagagcatgcgtgttagactagtcaaaacttgagaggggcaatggagagggggaaggagggcagtgacagctgattatagtcagtgcttatgaagtacttacaccacaccaggtactatttccagcatgtccctgtaatgtaactgcccaacaggttcaccttccccattgcctagacagagctgatttatcaagacaggaattgagataaagtaatttggctgtacgggagacgggagttttattattactcaaatcagtctccctgagcgttcagggatgagagtt

SEQ ID NO: 417246 - DNA, 348 bp, Homo sapiens
taggtgttgatctgagctccaagacccctaaaactccttggaatgtttgtgtatgtgtgtgtctctaggaataggcatgtaggcatgcaaagatgtatatgacccaaagaagttaatactaggctagtattttcaaataaggcctccctgatgcagaatcacgaggttatcttttattattattatcattattattattttgagacggtctgtctgtgtcacccaggttagaatgcagtggtgtgatcttagctcactgcagccttgaattcctgggctcaagccatcctcccgcctcagtcctgcatagctgggactacaagtgtgcaccattatacctggctaatt

SEQ ID NO: 417247 - DNA, 395 bp, Homo sapiens
  misc_feature (255)..(255): n is a, c, g, or t
  misc_feature (378)..(378): n is a, c, g, or t
attttggtatcttcttatgaattattatttaaaatctagtgattttaaaatacaggtttgcatcttttaattattgtcaagtaactatttgcatatgaatgtcaagaaatggaacctgtggcatctgagaatccctaggtttgttgtctccagatgcaactcctcttcctcttaaaggcaacagctatcctgacttatgcgttagccactttgtatttcttattatttatttatttatttatttatgtatttttnacaccttctgttatctttgcagcagaaatcagaagttagcatcttgaaattggatccttgacattttaattcattgtgcctgttttctgaactgaaaagtaaaaaggaagtagtgacaatttnccattaagggtattaag

SEQ ID NO: 417248 - DNA, 496 bp, Homo sapiens
aggcatgagccaccatgcttggccctagtttgacttttgcaggtagagaaggacttcgcttaggggtgcatgttgtctcacacattcccttcatgcacccacctccattcctcaatatttctgactccttctggctgatatcacttctcttgaattcaaatatctgtaacttcgcagaggatagagaattgacgagttttgagtaaggcagaggaactcttcctagcatgcaggcttaagggagcttccgagagggtacacaagacctaaccctttggaatttttactgttttcatgcaagacgcattgggtacagtggaaagatttcataagctgtgtgactgtgggtcgatagctttacttctctgagccacagattgcccatttatagaaacaaggtgtagaagagacagatatccatctcgtgaggttctggaattttcaaaggagcaccgatgtttctggcatgccccactggctgccacctcatgaggct

SEQ ID NO: 417249 - DNA, 302 bp, Homo sapiens
gtattgggacctggaatagaaagaggacactcatggaaaaggtgctgaaatctatgtaaagtctggagtttacttaatatacaaatgtcaagtttcttagttttgacaaatgtatcatggaaatgtaacgtgttaacaattggggaaactatgaatgagaggtatttgggacatctctgtactatcattgcaactttcataaatctaaaattattccaaaatgaagtttatttttaaaaatggactggagttaacttttaaataataaaagcaaaatgtgcttattgtagaaaatataaatg

SEQ ID NO: 417250 - DNA, 266 bp, Homo sapiens
gtgatccactcacctgggccttccaaagtgctgggactacaggcgtgagccactgctcccggcccttgtttcatttctattggctgattggtaagagctcattttatatgataggaattgagtctatttttccctggatgggtttgtgggttttgttttgtttttgctatatgacagtttttacagttttatacagctcaaaatctataaaacaagattgaagttttatagattgaagatttccaaccttagttaagaaagtctcc

SEQ ID NO: 417251 - DNA, 3346 bp, Homo sapiens
aattgctactttgcactgcactggactatgactgatttttggcacatgctatcatacacaaagttcctgaaataaaatgctccaggatatcctaggaactcttagaaggctttaaaaagggactcacacactgaaagaatatctttgatgaagacaattcaggcaagcagaatgattcttgcaacagaattacatgattaattgagatcttgaagtgggtccggtgaatcctggccacctaacttatcatgatttgggggagtttcacgagaatccagttttgataaaacaattgtttttttcctccccaagtgactatacatttaaatagctaaaacatctgttcagcaacatagtaaaacatatatactcggaacgcttgagagaagagcctgccaaacagggactttgctgagggagagcaccaagataaagcaacactgtttgttttgtctagtcagggggaaagccaaggcaaccaatattttggtttttataattttcatttgtgaagaattatttgagaaagggtggcgaggggagatttcctgacggcagtttcttaagctgtccattagtagaagagcaagagagccttggatgtcaacgcctcgctcttgagaccagccaccaaaccacgaaaagtgactttcttctcgtgtgctctctacggcccttctgatggaagcagaaacagggagcagcgtggagactggaaagaaggccaacagaggcactcgaattgccctggtcgtgtttgtcggtggcaccctagttctgggcacgatcctctttctagtgagtcaaggtctcttaagtctccaagctaaacaggagtactgcctgaagccagaatgcatcgaagcggctgctgccatcttaagtaaagtaaatctgtctgtggatccttgtgataatttcttccggttcgcttgtgatggctggataagcaataatccaattcccgaagatatgccaagctatggggtttatccttggctgagacataatgttgacctcaagttgaaggaacttttggagaaatcaatcagtagaaggcgggacaccgaagccatacagaaagccaaaatcctttattcatcctgcatgaatgagaaagcgattgaaaaagcagatgccaagccactgctacacatcctacggcattcacctttccgctggcccgtgcttgaatctaatattggccctgaaggggtttggtcagagagaaagttcagccttctgcagacacttgcaacgtttcgtggtcaatacagcaattctgtgttcatccgtttgtatgtgtcccctgatgacaaagcatccaatgaacatatcttgaagctggaccaagcaacactctccctggccgtgagggaagactaccttgataacagtacagaagccaagtcttatcgggatgccctttacaagttcatggtggatactgccgtgcttttaggagctaacagttccagagcagagcatgacatgaagtcagtgctcagattggaaattaagatagctgagataatgattccacatgaaaaccgaaccagcgaggccatgtacaacaaaatgaacatttctgaactgagtgctatgattccccagttcgactggctgggctacatcaagaaggtcattgacaccagactctacccccatctgaaagacatcagcccctccgagaatgtggtggtccgcgtcccgcagtactttaaagatttgtttaggatattagggtctgagagaaagaagaccattgccaactatttggtgtggagaatggtttattccagaattccaaaccttagcaggcgctttcagtatagatggctggaattctcaagggtaatccaggggaccacaactttgctgcctcaatgggacaaatgtgtaaactttattgaaagtgccctcccttatgttgttggaaagatgtttgtagatgtgtacttccaggaagataagaaggaaatgatggaggaattggttgagggcgttcgctgggcctttattgacatgctagagaaagaaaatgagtggatggatgcaggaacgaaaaggaaagccaaagaaaaggcgagagctgttttggcaaaagttggctatccagagtttataatgaatgatactcatgttaatgaagacctcaaagctatcaagttttcagaagccgactactttggcaacgtcctacaaactcgcaagtatttagcacagtctgatttcttctggctaagaaaagccgttccaaaaacagagtggtttacaaatccgacgactgtcaatgccttctacagtgcatccaccaaccagatccgatttccagcaggagagctccagaagcctttcttttggggaacagaatatcctcgatctctgagttatggtgctataggagtaattgtcggacatgaatttacacatggatttgataataatggtagaaaatatgataaaaatggaaacctggatccttggtggtctactgaatcagaagaaaagtttaaggaaaaaacaaaatgcatgattaaccagtatagcaactattattggaagaaagctggcttaaatgtcaaggggaagaggaccctgggagaaaatattgctgataatggaggcctgcgggaagcttttagggcttacaggaaatggataaatgacagaaggcagggacttgaggagcctcttctaccaggcatcacattcaccaacaaccagctcttcttcctgagttatgctcatgtgaggtgcaattcctacagaccagaagctgcccgagaacaagtccaaattggtgctcacagtccccctcagtttagggtcaatggtgcaattagtaactttgaagaattccagaaagcttttaactgtccacccaattccacgatgaacagaggcatggactcctgccgactctggtagctgggacgctggtttatggcatcctgagacagttgcacagtgccagcggaggctgcactgagccttcatcgcccattgctttaggcctggagactttcatttttagtgcattttcattatttgggtaggtgacctgcttggatctagacagcatctgttcaaagttgtagggcttataaagtggaatataagaatgaactaagtatgtttctttagaaaatcaaaccaacaaaaataaatccctaggctacttttgttaaaatgctatctgctaaattgttgctattgtccattttagggtgttggccacagttatgtggtacatagcatttcaatctatagctttgtgggaagcctaaattgatgtatcctttaaaagttcaatctattaaacttgtagcctctcaatgatgaa

SEQ ID NO: 417252 - DNA, 507 bp, Homo sapiens
gatttcatcacgtcgacttaacatggtacgtaagaatttacagtgctagcagaatgctttctgtctttgtttttacagctggaccaagcaacactctccctggccgtgagggaagactaccttgataacagtacagaagccaagtctgtaagttttactcatattcaactatgtgccttaccaggctgctgtcaggcccattagttctaaggccgctgcttctttattggaaatgagcagtgtggctattcaatgaccatattcccaatgcaggaagacttttattcaggcagataaattccactccctgtccttctagaagtctgctcatcaaggctgtacaagtctcagtactcaatgcccttatctagcttgggagacagcactcccaaatgaagtaacaaagaaatgagcttgcagtcattcattcctcagaagtgcagagagctcacgtcgacgcggccgcgaatttagtagtagttagtagtcgacccgggaatttcggac

SEQ ID NO: 417253 - DNA, 3228 bp, Homo sapiens
aattgctactttgcactgcactggactatgactgatttttggcacatgctatcatacacaaagttcctgaaataaaatgctccaggatatcctaggaactcttagaaggctttaaaaagggactcacacactgaaagaatatctttgatgaagacaattcaggcaagcagaatgattcttgcaacagaattacatgattaattgagatcttgaagtgggtccggtgaatcctggccacctaacttatcatgatttgggggagtttcacgagaatccagttttgataaaacaattgtttttttcctccccaagtgactatacatttaaatagctaaaacatctgttcagcaacatagtaaaacatatatactcggaacgcttgagagaagagcctgccaaacagggactttgctgagggagagcaccaagataaagcaacactgtttgttttgtctagtcagggggaaagccaaggcaaccaatattttggtttttataattttcatttgtgaagaattatttgagaaagggtggcgaggggagatttcctgacggcagtttcttaagctgtccattagtagaagagcaagagagccttggatgtcaacgcctcgctcttgagaccagccaccaaaccacgaaaagtgactttcttctcgtgtgctctctacggcccttctgatggaagcagaaacagggagcagcgtggagactggaaagaaggccaacagaggcactcgaattgccctggtcgtgtttgtcggtggcaccctagttctgggcacgatcctctttctagtgagtcaaggtctcttaagtctccaagctaaacaggagtactgcctgaagccagaatgcatcgaagcggctgctgccatcttaagtaaagtaaatctgtctgtggatccttgtgataatttcttccggttcgcttgtgatggctggataagcaataatccaattcccgaagatatgccaagctatggggtttatccttggctgagacataatgttgacctcaagttgaaggaacttttggagaaatcaatcagtagaaggcgggacaccgaagccatacagaaagccaaaatcctttattcatcctgcatgaatgagaaagcgattgaaaaagcagatgccaagccactgctacacatcctacggcattcacctttccgctggcccgtgcttgaatctaatattggccctgaaggggtttggtcagagagaaagttcagccttctgcagacacttgcaacgtttcgtggtcaatacagcaattctgtgttcatccgtttgtatgtgtcccctgatgacaaagcatccaatgaacatatcttgaagctggaccaagcaacactctccctggccgtgagggaagactaccttgataacagtacagaagccaagtcttatcgggatgccctttacaagttcatggtggatactgccgtgcttttaggagctaacagttccagagcagagcatgacatgaagtcagtgctcagattggaaattaagatagctgagataatgattccacatgaaaaccgaaccagcgaggccatgtacaacaaaatgaacatttctgaactgagtgctatgattccccagttcgactggctgggctacatcaagaaggtcattgacaccagactctacccccatctgaaagacatcagcccctccgagaatgtggtggtccgcgtcccgcagtactttaaagatttgtttaggatattagggtctgagagaaagaagaccattgccaactatttggtgtggagaatggtttattccagaattccaaaccttagcaggcgctttcagtatagatggctggaattctcaagggtaatccaggggaccacaactttgctgcctcaatgggacaaatgtgtaaactttattgaaagtgccctcccttatgttgttggaaagatgtttgtagatgtgtacttccaggaagataagaaggaaatgatggaggaattggttgagggcgttcgctgggcctttattgacatgctagagaaagaaaatgagtggatggatgcaggaacgaaaaggaaagccaaagaaaaggcgagagctgttttggcaaaagttggctatccagagtttataatgaatgatactcatgttaatgaagacctcaaagctatcaagttttcagaagccgactactttggcaacgtcctacaaactcgcaagtatttagcacagtctgatttcttctggctaagaaaagccgttccaaaaacagagtggtttacaaatccgacgactgtcaatgccttctacagtgcatccaccaaccagatccgatttccagcaggagagctccagaagcctttcttttggggaacagaatatcctcgatctctgagttatggtgctataggagtaattgtcggacatgaatttacacatggatttgataataatggtagaaaatatgataaaaatggaaacctggatccttggtggtctactgaatcagaagaaaagtttaaggaaaaaacaaaatgcatgattaaccagtatagcaactattattggaagaaagctggcttaaatgtcaaggggaagaggaccctgggagaaaatattgctgataatggaggcctgcgggaagcttttagggcttacaggaaatggataaatgacagaaggcagggacttgaggagcctcttctaccaggcatcacattcaccaacaaccagctcttcttcctgagttatgctcatgtgaggtgcaattcctacagaccagaagctgcccgagaacaagtccaaattggtgctcacagtccccctcagtttagggtcaatggtgcaattagtaactttgaagaattccagaaagcttttaactgtccacccaattccacgatgaacagaggcatggactcctgccgactctggtagctgggacgctggtttatggcatcctgagacagttgcacagtgccagcggaggctgcactgagccttcatcgcccattgctttaggcctggagactttcatttttagtgcattttcattatttgggtaggtgacctgcttggatctagacagcatctgttcaaagttgtagggcttataaagtggaatataagaatgaactaagtatgtttctttagaaaatcaaaccaacaaaaataaatcccgatgcgtccgttttgttcgaaattggtcatatatatgcgcactgctaggacgta

SEQ ID NO: 417254 - DNA, 743 bp, Homo sapiens
accatgaagctctggaccgcagctaattacagagcctcctaagaagtgttaacctcagcattccatagtgaccgacctcctgaaccgggcaggcgagagctgttttggcaaaagttggctatccagagtttataatgaatgatactcatgttaatgaagacctcaaagctatcaagttttcagaagccgactactttggcaacgtcctacaaactcgcaagtatttagcacagtctgatttcttctggctaagaaaagccgttccaaaaacagagtggtttacaaatccgacgactgtcaatgccttctacagtgcatccaccaaccagatccgatttccagcaggagagctccagaagcctttcttttggggaacagaatatcctcgatctctgagttatggtgctataggagtaattgtcggacatgaatttacacatggatttgataataatggtagaaaatatgataaaaatggaaacctggatccttggtggtctactgaatcagaagaaaagtttaaggaaaaaacaaaatgcatgattaaccagtatagcaactattattggaagaaagctggcttaaatgtcaaggggaagaggaccctgggagaaaatattgctgataatggaggcctgcgggaagcttttaggctccaggaaatgctaatgacaaagccgggctgggagcccctctacagggtcattccaaaccttctccggtttcttttgggcgcctcacag

SEQ ID NO: 417255 - DNA, 2891 bp, Homo sapiens
aattgctactttgcactgcactggactatgactgatttttggcacatgctatcatacacaaagttcctgaaataaaatgctccaggatatcctaggaactcttagaaggctttaaaaagggactcacacactgaaagaatatctttgatgaagacaattcaggcaagcagaatgattcttgcaacagaattacatgattaattgagatcttgaagtgggtccggtgaatcctggccacctaacttatcatgatttgggggagtttcacgagaatccagttttgataaaacaattgtttttttcctccccaagtgactatacatttaaatagctaaaacatctgttcagcaacatagtaaaacatatatactcggaacgcttgagagaagagcctgccaaacagggactttgctgagggagagcaccaagataaagcaacactgtttgttttgtctagtcagggggaaagccaaggcaaccaatattttggtttttataattttcatttgtgaagaattatttgagaaagggtggcgaggggagatttcctgacggcagtttcttaagctgtccattagtagaagagcaagagagccttggatgtcaacgcctcgctcttgagaccagccaccaaaccacgaaaagtgactttcttctcgtgtgctctctacggcccttctgatggaagcagaaacagggagcagcgtggagactggaaagaaggccaacagaggcactcgaattgccctggtcgtgtttgtcggtggcaccctagttctgggcacgatcctctttctagtgagtcaaggtctcttaagtctccaagctaaacaggagtactgcctgaagccagaatgcatcgaagcggctgctgccatcttaagtaaagtaaatctgtctgtggatccttgtgataatttcttccggttcgcttgtgatggctggataagcaataatccaattcccgaagatatgccaagctatggggtttatccttggctgagacataatgttgacctcaagttgaaggaacttttggagaaatcaatcagtagaaggcgggacaccgaagccatacagaaagccaaaatcctttattcatcctgcatgaatgagaaagcgattgaaaaagcagatgccaagccactgctacacatcctacggcattcacctttccgctggcccgtgcttgaatctaatattggccctgaaggggtttggtcagagagaaagttcagccttctgcagacacttgcaacgtttcgtggtcaatacagcaattctgtgttcatccgtttgtatgtgtcccctgatgacaaagcatccaatgaacatatcttgaagctggaccaagcaacactctccctggccgtgagggaagactaccttgataacagtacagaagccaagtcttatcgggatgccctttacaagttcatggtggatactgccgtgcttttaggagctaacagttccagagcagagcatgacatgaagtcagtgctcagattggaaattaagatagctgagataatgattccacatgaaaaccgaaccagcgaggccatgtacaacaaaatgaacatttctgaactgagtgctatgattccccagttcgactggctgggctacatcaagaaggtcattgacaccagactctacccccatctgaaagacatcagcccctccgagaatgtggtggtccgcgtcccgcagtactttaaagatttgtttaggatattagggtctgagagaaagaagaccattgccaactatttggtgtggagaatggtttattccagaattccaaaccttagcaggcgctttcagtatagatggctggaattctcaagggtaatccaggggaccacaactttgctgcctcaatgggacaaatgtgtaaactttattgaaagtgccctcccttatgttgttggaaagatgtttgtagatgtgtacttccaggaagataagaaggaaatgatggaggaattggttgagggcgttcgctgggcctttattgacatgctagagaaagaaaatgagtggatggatgcaggaacgaaaaggaaagccaaagaaaaggcgagagctgttttggcaaaagttggctatccagagtttataatgaatgatactcatgttaatgaagacctcaaagctatcaagttttcagaagccgactactttggcaacgtcctacaaactcgcaagtatttagcacagtctgatttcttctggctaagaaaagccgttccaaaaacagagtggtttacaaatccgacgactgtcaatgccttctacagtgcatccaccaaccagatccgatttccagcaggagagctccagaagcctttcttttggggaacagaatatcctcgatctctgagttatggtgctataggagtaattgtcggacatgaatttacacatggatttgataataatggtagaaaatatgataaaaatggaaacctggatccttggtggtctactgaatcagaagaaaagtttaaggaaaaaacaaaatgcatgattaaccagtatagcaactattattggaagaaagctggcttaaatgtcaaggggaagaggaccctgggagaaaatattgctgataatggaggcctgcgggaagcttttagggcttacaggaaatggataaatgacagaaggcagggacttgaggagcctcttctaccaggcatcacattcaccaacaaccagctcttcttcctgagttatgctcatgtgaggtgcaattcctacagaccagaagctgcccgagaacaagtccaaattggtgctcacagtccccctcagtttaggatttccagcaggagagctccagaagcctttctcatggggtgaatggaggaaaggaacatact

SEQ ID NO: 417256 - DNA, 310 bp, Homo sapiens
gatcaatactaattctacagaaatataatagaggtctaaatcactaaaaacaaatcatcatctgaaatacagccaacacattctaatgtttttctttaaaaatatattcttctccttttcctttcttcgtgaattaatgagtcaaactcatgaaatctctacacagtgacccttcatttttatcttaaattttaagaaaatgagaaaattttgatgttaccactatcttttcatctgaacctttgcatagtgctattattccatgacctaatttagtgataagagattctgcttctgtgtctatttaaaa

SEQ ID NO: 417257 - DNA, 443 bp, Homo sapiens
aggcaaaggcctatttaatttgccatagaaaccattttatctgaagcatatgtagtcagtaataggttaaaaaggtggtttataaagcagggaatcattttttaaaattcatacatacatgaaatattttaatataaaacataaatgggtatttgttcgccaatcttttaacatttttaattgaagtaataaatgaatataatttttaagaaacaaaggcttatattatagccatctttacatatctctcagaatttttgtatgctgtattcctagaaatggaaatgcatggtctgagtgcactctggtcaatgaggggttttattttattttattttattttattttattttttgacagtctcactctgttgcccaggctggagtgcaatggcgcgatctcactgcaacctccacctcctgagttagaccctgtctcagcct

SEQ ID NO: 417258 - DNA, 227 bp, Homo sapiens
tttcctgtgataaagttggagtatggctgaatatgggagctgtaggttaggattccatggagacgataatttaggaggggactgtgccatcttaaagatggggcattggagctaagaatcacaggggaggatacgctcaggtggaaggggtgacaggagtgagaagtcacttggatttagggagtgagggagaaatttaaggtaatacccagatttgttgtttagac

SEQ ID NO: 417259 - DNA, 294 bp, Homo sapiens
aaagcctcatgtggtttgcattggacagataggctccagaataataatactgataataatggaagtgctgtttcaatcatgtattatgtattagatcattcagtctttgcaaggactctatgtgatgagtgttattattattcccattttatagacaaggaaattgagagcaacgggagattaaaaatcgcctgaggttatacaggtggtatatggagcagtgagtcaggccagcatccaagtccatgtgtttaaccagtacactgggtacaaagaagggaggaggagacaagg

SEQ ID NO: 417260 - DNA, 301 bp, Homo sapiens
ttttttaaaagaactgtagtaatgtttcataattggtattgtgcaaccgatctgaacagctcttactttatatagagctgaaaatgcccagtgatgttttctttttcattgtaactaggtcctggaatatgttttgaaatggcaaaatccatgtttcaaagtaaaatagctgttgaaagatacaggcaaagttgaatcttctgtcttcctggcaaaaatggcataaaaactgagttgctagctcaaattcctgggtttcatggaattatgattgaggcactacccttgtagtggccgtttc

SEQ ID NO: 417261 - DNA, 301 bp, Homo sapiens
ggatacctccctggggcagcccctgtgctttggggagatcctaggccagtgctgtcaagtagaaatagattggaagccaccatgtcgtttatattttctggtagccacatttaaaaagtgaaaaggacactggatagtcccagctacttgagaggtggaggcaggagaatcacttgagcccgggagttggaggccagcctgggcaacacagcgagatcccatcactcttttttgtttattgggagacagaatcttgctctgtcacccatcctggagtgcagtggcacgatttaggctcact

SEQ ID NO: 417262 - DNA, 520 bp, Homo sapiens
acaaggggagaatcgatacggaggaagagtcacctctaccttggagggcaacccagagagagcaatgttctatgtccaggagagaaaacagtttttagaaataggtgtggtcagaattcaaatgggtaaaaactgaatacgggccatttggaattgactggtcatttatgagcttccatagacagagcctttgggagggggctgtgtaaaactcaaatcgttggaggaatgaagagctgcagtgtaaagttgctggattttcttcttttgaatagtacctgggacaacttttcattggtatacaagtttatgatgtagaatggtgactccatggaaggacccatttgaacacccagaaatcttagaatatggagactgtgcctggaggctccctttggttaaccggtgtcaggaagaccctagcaaagagaattcatgatctgaaaggagaggaagaattgcttatagttgagaacaattatttgttccttgcattgtccacttccccttccagacttcc

SEQ ID NO: 417263 - DNA, 635 bp, Homo sapiens
attgcccctaatcgagaatgccattctaggctgaaaaatactataattccgtgtctagtgaattttagtggttgcaacgaaacaaaactttgggtgttcgccagcatgctttgtagtgggagacataagagatggaagatacagaacagtggggcaaatcaaggctgaagccccacctgggttaactagcacgggcagcatactggggacagttccgcaacacgtgcgcgggaagacaatgctctgagccatatttaagtctcaggtatccattcatggtcagtgggtaggaaaacacgtttcttttggagtagttatattgtaagccaacaaggtgatgaattattgaatgggttctttttgtataaacatacttatcatctttatttttcatcagttttgtaatgaacaagggaaagcagacacacgaaaacattttgcaaagagcttcaaatgtgaactcttttttggtgaatggccccctggtttgaggtgttatttccttcttgagtggtctctctgcttcaaggacactttttaatgcaaccattgttcagaaaaagtcaccctgttttctaactctttcccttttactcccactctcttttctctctgtctctctctctctctctctt

SEQ ID NO: 417264 - DNA, 1307 bp, Homo sapiens
accaaccacaataagaagcaccaattccccaattttttaatatgctgagccagagacatccccttagtggaactgtcttcctatcccccaccactcacctaacaaagtatcaactccaagagctatgaaaatcagtgccctgactcctacaaagcctgagtcatgagatgggggaaagggcgtgaagccgaaagtacagatgttcacaggaaatcccaacccttcaagcctgatgtctcatcttttgcaagcagctaaggagcttttcacataccatcattaaaacaagacccatgggaggaagctggctgcaggatgaagaggaaaaaacagaagactagtacactcaagacataccagagaagatccatttcataaatatttattgtgtgcctgaggtgccaagcactaggctaggtatgctgtggccaaggccaggggacctctggtaagccagagcggggcaaaagcaaacagagcggaactccactccactgtgataacttgcaaaagattagttctgctgttcgccaccgtgctggatgcagcaccagagacaggacgacacgaggacccagagggcgccgccatgctcatttcagaaggtgcagcctccgtgtccgtgggtccgcacccatggaggcaactaaccgtggatcaaaaatattcaggaaaaaaaaatggaaaatatacaagaaaaaataatacaaatttaaaaaccaacacagcacaagaactatttacacagcatttacatggtatgaggtatttgagtagcgcagagatgagttaaaggatacctgaggatgtgcataggttacatgtaagggatttgagcatcatccatggacaggtattcagggaggctccaggaaccaatccccattggacagtgagaagcaactgtaattccgtttttctatgtagagataaaaacaaattcagtggatttaaggctgggccagtcaactgagcctgattcccccagtctgaatgatgagtgggactctgaattcctttgacagaggtggacccattcaatcatcagtgaaatggggtccccacagccaaaagtttccacaggactctttacctcctttccccaccccaagtgagttgtcagaggacctctcctgaactcacagaacaggtccaatcaagttccacctccccattcatgtcctttccagaagctgggcgcggtggctcacgccctaagttccagctacgtgggaggctgagacaggagaatcgcctgagcccaggatttcaaggccagcctgggcaacatagcaagatactgtctc

SEQ ID NO: 417265 - DNA, 313 bp, Homo sapiens
ctctatacgaatcatgtgaattagactcacctctctttcagttgcactgctcgtacttcagtacatgtaggacacagtagagagaaaaatatctgctttttacttttaaagccaattgctggtctttatttctgcaagtcttttcttctaactcagctttcagttctctttcttaattcaactcttgcaactaatcctcatacttcagaccgaaacttaatgggaaaagatatgtgagattcatctctactgagaaaacctttcatgatgtgattaatacttatcctcaaggtctcctacaagtgaaggacaa

SEQ ID NO: 417266 - DNA, 423 bp, Homo sapiens
ttgaggtattataagagattgcacacatatggtcatttccatattttacagttgagaaaaccaagaactttatgacttcatttattcagcaacaaaaatttgccaaatatttattgagtctttacatatgccagacagtgttctggatagtaagaatatatcagtgaacaaaagacaaaaaatttctaattttatggagcattttggtagcatttttctaatttatttttagtttttaagttttaacttttattatagattaaagggtacatgtgtaggtttattattacatgggtaaattgtgtgatgctgaggcttggggtcccaatgatctcatcacccaggcaataagcacagtacccaacaggtactatgatcggcaccactgcactccatctgggcaacataacgagactgtatcta

SEQ ID NO: 417267 - DNA, 2103 bp, Homo sapiens
ggccggggggggcggggcctcgggactccgcccacgcctccgtctcctccgcgctccgccacagccggccgacaccacaccagccggggagccgccgccgccgccgccacctctgagcagccggctgggagcgagagccgacagctagtctgcaagccaccgctgtcgccatggggagccgcgtctcgcgggaagacttcgagtgggtctacaccgaccagccgcacgccgaccggcgccgggagatcctggcaaagtatccagagataaagtccttgatgaaacctgatcccaatttgatatggattataattatgatggttctcacccagttgggtgcattttacatagtaaaagacttggactggaaatgggtcatatttggggcctatgcgtttggcagttgcattaaccactcaatgactctggctattcatgagattgcccacaatgctgcctttggcaactgcaaagcaatgtggaatcgctggtttggaatgtttgctaatcttcctattgggattccatattcaatttcctttaagaggtatcacatggatcatcatcggtaccttggagctgatggcgtcgatgtagatattcctaccgattttgagggctggttcttctgtaccgctttcagaaagtttatatgggttattcttcagcctctcttttatgcctttcgacctctgttcatcaaccccaaaccaattacgtatctggaagttatcaataccgtggcacaggtcacttttgacattttaatttattactttttgggaattaaatccttagtctacatgttggcagcatctttacttggcctgggtttgcacccaatttctggacattttatagctgagcattacatgttcttaaagggtcatgaaacttactcatattatgggcctctgaatttacttaccttcaatgtgggttatcataatgaacatcatgatttccccaacattcctggaaaaagtcttccactggtgaggaaaatagcagctgaatactatgacaacctccctcactacaattcctggataaaagtactgtatgattttgtgatggatgatacaataagtccctactcaagaatgaagaggcaccaaaaaggagagatggtgctggagtaaatatcattagtgccaaagggattcttctccaaaactttagatgataaaatggaatttttgcattattaaacttgagaccagtgatgctcagaagctcccctggcacaatttcagagtaagagctcggtgataccaagaagtgaatctggcttttaaacagtcagcctgactctgtactgctcagtttcactcacaggaaacttgtgacttgtgtattatcgtcattgaggatgtttcactcatgtctgtcattttataagcatatcatttaaaaagcttctaaaaagctatttcgccaggcacggtggctcatgcctataatcccagcactttgggaggccaaggtgggtggatcacctgaggtcaggagttcgagaccagcctggccaacacggtgaaaccccatctctactaaaaatgcaaaaattagccgggcgtggcggcacatgcctgtaatcccagctacatgggaggctgaggtgggagaattgcttgaacccaggaggcggaggcagaggctgcagtgacccaagattgtgccactgcactccaccctgggcaacagagcaagaccccatctcaaaaataaataaatatatataaaaaataaaaagctatttctagtttatttcactataaagttttgctttattaaaaagctaataaacagctattaatcacagtgtattagtatttgttacatttttgtatttcactatctttatactatataatatggtaacttgggtaccgggggaactttaaaatttcatctcaaaaataatttttaaaaagcctgaggtatgatatagcataaaagattgagatgaaaatatatttccctgtaagctgaattactcatttaaaaattttaacttctatatgggacccgaattagacactgctgaatcctgtacagccttactcataaataaagtacttactgaatttcccattcaaa

SEQ ID NO: 417268 - DNA, 646 bp, Homo sapiens
cacacccaaatgtaaaaatccttttgaatgatgcctttataaatctttctctcactgtgtatttaagtgcaattaacatatgtcacgaacttgaaagttttctaaactcaataaggtaatgtccagttgttattcacagctctgtaacctcccgttgcgtcaagtctaaaccaagattatgtcacttgcaacaaagttattcagttcagaaaaaaaaaaaaaaaaaacttgagactagttccttgtaaaaagctatttcgccaggcacggtggctcatgcctataatcccagcactttgggaggccaaggtgggtggatcacctgaggtcaggagttcgagaccagcctggccaacacggtgaaaccccatctctactaaaaatgcaaaaattagccgggcgtggcggcacatgcctgtaatcccagctacatgggaggctgaggtgggagaattgcttgaacccaggaggcggaggcagaggctgcagtgacccaagattgtgccactgcactccaccctgggcaacagagcaagaccccatctcaaaaataaataaatatatataaaaaataaaaagctatttctagtttatttcactataaagttttgctttattaaaaagctaataaacagctattaatcac

SEQ ID NO: 417269 - DNA, 879 bp, Homo sapiens
agcgcgggagtccccgccaggcccacgccggccggttggggcgaagggtgtccccggctgtgccagccttgagtagatcttttcgctagaagattcctgtgccctcaggtgggcgccctttcctctcaccactccctctcctccggagcgggccgaggtgagcgggtgccggccttggggctgcctgagtgctaggcagggtgtggtcctgggcatccttgggcctaccagcgagccctgctcagggtgtcgggcgccggcgggcagtactggcgggggcggccgcagtcccggccttgggcccgttaagggggccggcgtccctccatatgccccccggggcttctcggacttgatgggccctggtcggttcacgccgcttgtcccattgatcctcacgacaagcctgggacgtaagaacggcggattcgtaggcatttttcatccatctcggttttgtggatgaaaagactgaaaatggaagacttgccaaataaggaaaatatgtggcgtggcctgctggtcccctgacagctaattgagaggccttaactctccagaggattcgggccttctgtgttacatagagaatgctcatctctcccaggctactcctaatatgctagggattgtgtggaatgctttacaaacattacccaatttcatcctcttggtaattctacttggttggtattatcgctgttttaaaaaatgaaataagaacgcgtgactaaatgctagggggattctaatgcgcattcggttgcctcttccagagcacgtgtttgttttttgtttgtttgttttttgagactgcacgtgtttgttttttgtttgtttgtttgtttgttttttgagactgagtctcactctgttgct

SEQ ID NO: 417270 - DNA, 413 bp, Homo sapiens
ctccacccgacggggtggggccctggctgcacctgaactgtcacctggagtcagggtggaaggtggaagaactgggtcttatttccttctccccttgttctttagggtctgtccttctgcagactccgttaccccaccctaaccatcctgcacaccccgtcgggtggagccgctggtttggaatgtttgctaatcttcctattgggattccatattcaatttcctttaagaggtatcacatggatcatcatcggtaccttggagctgatggcgtcgatgtagatattcctaccgattttgagggctggttcttctgtaccgctttcagaaagtttatatgggttattcttcagcctctcttttatgcctttcgacctctgttcatcaaccgtcggatagagcgggccgagctt

SEQ ID NO: 417271 - DNA, 2277 bp, Homo sapiens
ggccggggggggcggggcctcgggactccgcccacgcctccgtctcctccgcgctccgccacagccggccgacaccacaccagccggggagccgccgccgccgccgccacctctgagcagccggctgggagcgagagccgacagctagtctgcaagccaccgctgtcgccatggggagccgcgtctcgcgggaagacttcgagtgggtctacaccgaccagccgcacgccgaccggcgccgggagatcctggcaaagtatccagagataaagtccttgatgaaacctgatcccaatttgatatggattataattatgatggttctcacccagttgggtgcattttacatagtaaaagacttggactggaaatgggtcatatttggggcctatgcgtttggcagttgcattaaccactcaatgactctggctattcatgagattgcccacaatgctgcctttggcaactgcaaagcaatgtggaatcgctggtttggaatgtttgctaatcttcctattgggattccatattcaatttcctttaagaggtatcacatggatcatcatcggtaccttggagctgatggcgtcgatgtagatattcctaccgattttgagggctggttcttctgtaccgctttcagaaagtttatatgggttattcttcagcctctcttttatgcctttcgacctctgttcatcaaccccaaaccaattacgtatctggaagttatcaataccgtggcacaggtcacttttgacattttaatttattactttttgggaattaaatccttagtctacatgttggcagcatctttacttggcctgggtttgcacccaatttctggacattttatagctgagcattacatgttcttaaagggtcatgaaacttactcatattatgggcctctgaatttacttaccttcaatgtgggttatcataatgaacatcatgatttccccaacattcctggaaaaagtcttccactggtgaggaaaatagcagctgaatactatgacaacctccctcactacaattcctggataaaagtactgtatgattttgtgatggatgatacaataagtccctactcaagaatgaagaggcaccaaaaaggagagatggtgctggagtaaatatcattagtgccaaagggattcttctccaaaactttagatgataaaatggaatttttgcattattaaacttgagaccagtgatgctcagaagctcccctggcacaatttcagagtaagagctcggtgataccaagaagtgaatctggcttttaaacagtcagcctgactctgtactgctcagtttcactcacaggaaacttgtgacttgtgtattatcgtcattgaggatgtttcactcatgtctgtcattttataagcatatcatttaaaaagcttctaaaaagctatttcgccaggcacggtggctcatgcctataatcccagcactttgggaggccaaggtgggtggatcacctgaggtcaggagttcgagaccagcctggccaacacggtgaaaccccatctctactaaaaatgcaaaaattagccgggcgtggcggcacatgcctgtaatcccagctacatgggaggctgaggtgggagaattgcttgaacccaggaggcggaggcagaggctgcagtgacccaagattgtgccactgcactccaccctgggcaacagagcaagaccccatctcaaaaataaataaatatatataaaaaataaaaagctatttctagtttatttcactataaagttttgctttattaaaaagctaataaacagctattaatcacagtgtattagtatttgttacatttttgtatttcactatctttatactatataatatggtaacttgggtaccgggggaactttaaaatttcatctcaaaaataatttttaaaaagcctgaggtatgatatagcataaaagattgagatgaaaatatatttccctgtaagctgaattactcatttaaaaattttaacttctatatgggacccgaattagacactgctgaatcctgtacagccttactcataaataaagtacttactgaatttcccattcaaaaaaaacacacgggggcggctaaaaattcccgagggcaagttagcgatccgttttgtaaagaggccctatggaggttataaacaggaggcgcgtaaagcgagtgggaaacgcttgcgtctctgggacctcctgtgtgttggggcaccgaaagcggaaatgttgtggaacttgcga

SEQ ID NO: 417272 - DNA, 2161 bp, Homo sapiens
  misc_feature (2133)..(2133): n is a, c, g, or t
  misc_feature (2161)..(2161): n is a, c, g, or t
ggccggggggggcggggcctcgggactccgcccacgcctccgtctcctccgcgctccgccacagccggccgacaccacaccagccggggagccgccgccgccgccgccacctctgagcagccggctgggagcgagagccgacagctagtctgcaagccaccgctgtcgccatggggagccgcgtctcgcgggaagacttcgagtgggtctacaccgaccagccgcacgccgaccggcgccgggagatcctggcaaagtatccagagataaagtccttgatgaaacctgatcccaatttgatatggattataattatgatggttctcacccagttgggtgcattttacatagtaaaagacttggactggaaatgggtcatatttggggcctatgcgtttggcagttgcattaaccactcaatgactctggctattcatgagattgcccacaatgctgcctttggcaactgcaaagcaatgtggaatcgctggtttggaatgtttgctaatcttcctattgggattccatattcaatttcctttaagaggtatcacatggatcatcatcggtaccttggagctgatggcgtcgatgtagatattcctaccgattttgagggctggttcttctgtaccgctttcagaaagtttatatgggttattcttcagcctctcttttatgcctttcgacctctgttcatcaaccccaaaccaattacgtatctggaagttatcaataccgtggcacaggtcacttttgacattttaatttattactttttgggaattaaatccttagtctacatgttggcagcatctttacttggcctgggtttgcacccaatttctggacattttatagctgagcattacatgttcttaaagggtcatgaaacttactcatattatgggcctctgaatttacttaccttcaatgtgggttatcataatgaacatcatgatttccccaacattcctggaaaaagtcttccactggtgaggaaaatagcagctgaatactatgacaacctccctcactacaattcctggataaaagtactgtatgattttgtgatggatgatacaataagtccctactcaagaatgaagaggcaccaaaaaggagagatggtgctggagtaaatatcattagtgccaaagggattcttctccaaaactttagatgataaaatggaatttttgcattattaaacttgagaccagtgatgctcagaagctcccctggcacaatttcagagtaagagctcggtgataccaagaagtgaatctggcttttaaacagtcagcctgactctgtactgctcagtttcactcacaggaaacttgtgacttgtgtattatcgtcattgaggatgtttcactcatgtctgtcattttataagcatatcatttaaaaagcttctaaaaagctatttcgccaggcacggtggctcatgcctataatcccagcactttgggaggccaaggtgggtggatcacctgaggtcaggagttcgagaccagcctggccaacacggtgaaaccccatctctactaaaaatgcaaaaattagccgggcgtggcggcacatgcctgtaatcccagctacatgggaggctgaggtgggagaattgcttgaacccaggaggcggaggcagaggctgcagtgacccaagattgtgccactgcactccaccctgggcaacagagcaagaccccatctcaaaaataaataaatatatataaaaaataaaaagctatttctagtttatttcactataaagttttgctttattaaaaagctaataaacagctattaatcacagtgtattagtatttgttacatttttgtatttcactatctttatactatataatatggtaacttgggtaccgggggaactttaaaatttcatctcaaaaataatttttaaaaagcctgaggtatgatatagcataaaagattgagatgaaaatatatttccctgtaagctgaattactcatttaaaaattttaacttctatatgggacccgaattagacactgctgaatcctgtacagccttactcataaataaagtacttactgaatttcccattcaaaaaaaaaaaaataacataaaaaaaatgcggnccgaattcgaggctactttgcccattcn

SEQ ID NO: 417273 - DNA, 2168 bp, Homo sapiens
ggccggggggggcggggcctcgggactccgcccacgcctccgtctcctccgcgctccgccacagccggccgacaccacaccagccggggagccgccgccgccgccgccacctctgagcagccggctgggagcgagagccgacagctagtctgcaagccaccgctgtcgccatggggagccgcgtctcgcgggaagacttcgagtgggtctacaccgaccagccgcacgccgaccggcgccgggagatcctggcaaagtatccagagataaagtccttgatgaaacctgatcccaatttgatatggattataattatgatggttctcacccagttgggtgcattttacatagtaaaagacttggactggaaatgggtcatatttggggcctatgcgtttggcagttgcattaaccactcaatgactctggctattcatgagattgcccacaatgctgcctttggcaactgcaaagcaatgtggaatcgctggtttggaatgtttgctaatcttcctattgggattccatattcaatttcctttaagaggtatcacatggatcatcatcggtaccttggagctgatggcgtcgatgtagatattcctaccgattttgagggctggttcttctgtaccgctttcagaaagtttatatgggttattcttcagcctctcttttatgcctttcgacctctgttcatcaaccccaaaccaattacgtatctggaagttatcaataccgtggcacaggtcacttttgacattttaatttattactttttgggaattaaatccttagtctacatgttggcagcatctttacttggcctgggtttgcacccaatttctggacattttatagctgagcattacatgttcttaaagggtcatgaaacttactcatattatgggcctctgaatttacttaccttcaatgtgggttatcataatgaacatcatgatttccccaacattcctggaaaaagtcttccactgagctggagtttcctggatgggtgcagtggctcacacctgtaatcccagcactttgggaggcctaggtgaggaaaatagcagctgaatactatgacaacctccctcactacaattcctggataaaagtactgtatgattttgtgatggatgatacaataagtccctactcaagaatgaagaggcaccaaaaaggagagatggtgctggagtaaatatcattagtgccaaagggattcttctccaaaactttagatgataaaatggaatttttgcattattaaacttgagaccagtgatgctcagaagctcccctggcacaatttcagagtaagagctcggtgataccaagaagtgaatctggcttttaaacagtcagcctgactctgtactgctcagtttcactcacaggaaacttgtgacttgtgtattatcgtcattgaggatgtttcactcatgtctgtcattttataagcatatcatttaaaaagcttctaaaaagctatttcgccaggcacggtggctcatgcctataatcccagcactttgggaggccaaggtgggtggatcacctgaggtcaggagttcgagaccagcctggccaacacggtgaaaccccatctctactaaaaatgcaaaaattagccgggcgtggcggcacatgcctgtaatcccagctacatgggaggctgaggtgggagaattgcttgaacccaggaggcggaggcagaggctgcagtgacccaagattgtgccactgcactccaccctgggcaacagagcaagaccccatctcaaaaataaataaatatatataaaaaataaaaagctatttctagtttatttcactataaagttttgctttattaaaaagctaataaacagctattaatcacagtgtattagtatttgttacatttttgtatttcactatctttatactatataatatggtaacttgggtaccgggggaactttaaaatttcatctcaaaaataatttttaaaaagcctgaggtatgatatagcataaaagattgagatgaaaatatatttccctgtaagctgaattactcatttaaaaattttaacttctatatgggacccgaattagacactgctgaatcctgtacagccttactcataaataaagtacttactgaatttcccattcaaa

SEQ ID NO: 417274 - DNA, 1939 bp, Homo sapiens
ggccggggggggcggggcctcgggactccgcccacgcctccgtctcctccgcgctccgccacagccggccgacaccacaccagccggggagccgccgccgccgccgccacctctgagcagccggctgggagcgagagccgacagctagtctgcaagccaccgctgtcgccatggggagccgcgtctcgcgggaagacttcgagtgggtctacaccgaccagccgcacgccgaccggcgccgggagatcctggcaaagtatccagagataaagtccttgatgaaacctgatcccaatttgatatggattataattatgatggttctcacccagttgggtgcattttacatagtaaaagacttggactggaaatgggtcatatttggggcctatgcgtttggcagttgcattaaccactcaatgactctggctattcatgagattgcccacaatgctgcctttggcaactgcaaagcaatgtggaatcgctggtttggaatgtttgctaatcttcctattgggattccatattcaatttcctttaagaggtatcacatggatcatcatcggtaccttggagctgatggcgtcgatgtagatattcctaccgattttgagggctggttcttctgtaccgctttcagaaagtttatatgggttattcttcagcctctcttttatgcctttcgacctctgttcatcaaccccaaaccaattacgtatctggaagttatcaataccgtggcacaggtcacttttgacattttaatttattactttttgggaattaaatccttagtctacatgttggcagcatctttacttggcctgggtttgcacccaatttctggacattttatagctgagcattacatgttcttaaagggtcatgaaacttactcatattatgggcctctgaatttacttaccttcaatgtgggttatcataatgaacatcatgatttccccaacattcctggaaaaagtcttccactggtgaggaaaatagcagctgaatactatgacaacctccctcactacaattcctggataaaagtactgtatgattttgtgatggatgatacaataagtccctactcaagaatgaagaggcaccaaaaaggagagatggtgctggagtaaatatcattagtgccaaagggattcttctccaaaactttagatgataaaatggaatttttgcattattaaacttgagaccagtgatgctcagaagctcccctggcacaatttcagagtaagagctcggtgataccaagaagtgaatctggcttttaaacagtcagcctgactctgtactgctcagtttcactcacaggaaacttgtgacttgtgtattatcgtcattgaggatgtttcactcatgtctgtcattttataagcatatcatttaaaaagcttctaaaaagctatttcgccaggcacggtggctcatgcctataatcccagcactttgggaggccaaggtgggtggatcacctgaggtcaggagttcgagaccagcctggccaacacggtgaaaccccatctctactaaaaatgcaaaaattagccgggcgtggcggcacatgcctgtaatcccagctacatgggaggctgaggtgggagaattgcttgaacccaggaggcggaggcagaggctgcagtgacccaagattgtgccactgcactccacctggaaagagagacccatttgaaaataataatattttacaataaagtattgttagttatgaatataagtggttataaaagtaatacgtctatccaaaaaaaaaggggggtaaataccgaggcagtaggtcagttggaagggcaaaggggttaaaaggggggaaacgggaagggtggagacttggggtgacacagacgaaaatggcatgggggtaatacgaagagaaggaaaaagaaaagaataa

SEQ ID NO: 417275 - DNA, 2035 bp, Homo sapiens
aggacgccggagggaaaggaagggggagcgcgcccagcatcgcttgggcctcctccacccgctcaggaggggaaacaggagagccgggagcacaacagcctcgcgcgcccgccgccgcctcagccttaggggaggccactacgcctctggttacatttcttgatcatggtatctccccagctagcaaagtatccagagataaagtccttgatgaaacctgatcccaatttgatatggattataattatgatggttctcacccagttgggtgcattttacatagtaaaagacttggactggaaatgggtcatatttggggcctatgcgtttggcagttgcattaaccactcaatgactctggctattcatgagattgcccacaatgctgcctttggcaactgcaaagcaatgtggaatcgctggtttggaatgtttgctaatcttcctattgggattccatattcaatttcctttaagaggtatcacatggatcatcatcggtaccttggagctgatggcgtcgatgtagatattcctaccgattttgagggctggttcttctgtaccgctttcagaaagtttatatgggttattcttcagcctctcttttatgcctttcgacctctgttcatcaaccccaaaccaattacgtatctggaagttatcaataccgtggcacaggtcacttttgacattttaatttattactttttgggaattaaatccttagtctacatgttggcagcatctttacttggcctgggtttgcacccaatttctggacattttatagctgagcattacatgttcttaaagggtcatgaaacttactcatattatgggcctctgaatttacttaccttcaatgtgggttatcataatgaacatcatgatttccccaacattcctggaaaaagtcttccactggtgaggaaaatagcagctgaatactatgacaacctccctcactacaattcctggataaaagtactgtatgattttgtgatggatgatacaataagtccctactcaagaatgaagaggcaccaaaaaggagagatggtgctggagtaaatatcattagtgccaaagggattcttctccaaaactttagatgataaaatggaatttttgcattattaaacttgagaccagtgatgctcagaagctcccctggcacaatttcagagtaagagctcggtgataccaagaagtgaatctggcttttaaacagtcagcctgactctgtactgctcagtttcactcacaggaaacttgtgacttgtgtattatcgtcattgaggatgtttcactcatgtctgtcattttataagcatatcatttaaaaagcttctaaaaagctatttcgccaggcacggtggctcatgcctataatcccagcactttgggaggccaaggtgggtggatcacctgaggtcaggagttcgagaccagcctggccaacacggtgaaaccccatctctactaaaaatgcaaaaattagccgggcgtggcggcacatgcctgtaatcccagctacatgggaggctgaggtgggagaattgcttgaacccaggaggcggaggcagaggctgcagtgacccaagattgtgccactgcactccaccctgggcaacagagcaagaccccatctcaaaaataaataaatatatataaaaaataaaaagctatttctagtttatttcactataaagttttgctttattaaaaagctaataaacagctattaatcacagtgtattagtatttgttacatttttgtatttcactatctttatactatataatatggtaacttgggtaccgggggaactttaaaatttcatctcaaaaataatttttaaaaagcctgaggtatgatatagcataaaagattgagatgaaaatatatttccctgtaagctgaattactcatttaaaaattttaacttctatatgggacccgaattagacactgctgaatcctgtacagccttactcataaataaagtacttactgaatttcccattcaaa

SEQ ID NO: 417276 - DNA, 1727 bp, Homo sapiens
ggccggggggggcggggcctcgggactccgcccacgcctccgtctcctccgcgctccgccacagccggccgacaccacaccagccggggagccgccgccgccgccgccacctctgagcagccggctgggagcgagagccgacagctagtctgcaagccaccgctgtcgccatggggagccgcgtctcgcgggaagacttcgagtgggtctacaccgaccagccgcacgccgaccggcgccgggagatcctggcaaagtatccagagataaagtccttgatgaaacctgatcccaatttgatatggattataattatgatggttctcacccagttgggtgcattttacatagtaaaagacttggactggaaatgggtcatatttggggcctatgcgtttggcagttgcattaaccactcaatgactctggctattcatgagattgcccacaatgctgcctttggcaactgcaaagcaatgtggaatcgctggtttggaatgtttgctaatcttcctattgggattccatattcaatttcctttaagaggtatcacatggatcatcatcggtaccttggagctgatggcgtcgatgtagatattcctaccgattttgagggctggttcttctgtaccgctttcagaaagtttatatgggttattcttcagcctctcttttatgcctttcgacctctgttcatcaaccccaaaccaattacgtatctggaagttatcaataccgtggcacaggtcacttttgacattttaatttattactttttgggaattaaatccttagtctacatgttggcagcatctttacttggcctgggtttgcacccaatttctggacattttatagctgagcattacatgttcttaaagggtcatgaaacttactcatattatgggcctctgaatttacttaccttcaatgtgggttatcataatgaacatcatgatttccccaacattcctggaaaaagtcttccactggtgaggaaaatagcagctgaatactatgacaacctccctcactacaattcctggataaaagtactgtatgattttgtgatggatgatacaataagtccctactcaagaatgaagaggcaccaaaaaggagagatggtgctggagtaaatatcattagtgccaaagggattcttctccaaaactttagatgataaaaattagccgggcgtggcggcacatgcctgtaatcccagctacatgggaggctgaggtgggagaattgcttgaacccaggaggcggaggcagaggctgcagtgacccaagattgtgccactgcactccaccctgggcaacagagcaagaccccatctcaaaaataaataaatatatataaaaaataaaaagctatttctagtttatttcactataaagttttgctttattaaaaagctaataaacagctattaatcacagtgtattagtatttgttacatttttgtatttcactatctttatactatataatatggtaacttgggtaccgggggaactttaaaatttcatctcaaaaataatttttaaaaagcctgaggtatgatatagcataaaagattgagatgaaaatatatttccctgtaagctgaattactcatttaaaaattttaacttctatatgggacccgaattagacactgctgaatcctgtacagccttactcataaataaagtacttactgaatttcccattcaaa

SEQ ID NO: 417277 - DNA, 1338 bp, Homo sapiens
  misc_feature (14)..(14): n is a, c, g, or t
  misc_feature (18)..(18): n is a, c, g, or t
  misc_feature (34)..(34): n is a, c, g, or t
  misc_feature (38)..(38): n is a, c, g, or t
  misc_feature (42)..(42): n is a, c, g, or t
aacagttataactncgcngggcacagtggttcangccngtantcacagcatctttacttggcctgggtttgcacccaatttctggacattttatagctgagcattacatgttcttaaagggtcatgaaacttactcatattatgggcctctgaatttacttaccttcaatgtgggttatcataatgaacatcatgatttccccaacattcctggaaaaagtcttccactggtgaggaaaatagcagctgaatactatgacaacctccctcactacaattcctggataaaagtactgtatgattttgtgatggatgatacaataagtccctactcaagaatgaagaggcaccaaaaaggagagatggtgctggagtaaatatcattagtgccaaagggattcttctccaaaactttagatgataaaatggaatttttgcattattaaacttgagaccagtgatgctcagaagctcccctggcacaatttcagagtaagagctcggtgataccaagaagtgaatctggcttttaaacagtcagcctgactctgtactgctcagtttcactcacaggaaacttgtgacttgtgtattatcgtcattgaggatgtttcactcatgtctgtcattttataagcatatcatttaaaaagcttctaaaaagctatttcgccaggcacggtggctcatgcctataatcccagcactttgggaggccaaggtgggtggatcacctgaggtcaggagttcgagaccagcctggccaacacggtgaaaccccatctctactaaaaatgcaaaaattagccgggcgtggcggcacatgcctgtaatcccagctacatgggaggctgaggtgggagaattgcttgaacccaggaggcggaggcagaggctgcagtgacccaagattgtgccactgcactccaccctgggcaacagagcaagaccccatctcaaaaataaataaatatatataaaaaataaaaagctatttctagtttatttcactataaagttttgctttattaaaaagctaataaacagctattaatcacagtgtattagtatttgttacatttttgtatttcactatctttatactatataatatggtaacttgggtaccgggggaactttaaaatttcatctcaaaaataatttttaaaaagcctgaggtatgatatagcataaaagattgagatgaaaatatatttccctgtaagctgaattactcatttaaaaattttaacttctatatgggacccgaattagacactgctgaatcctgtacagccttactcataaataaagtacttactgaatttcccattcaaa

SEQ ID NO: 417278 - DNA, 1831 bp, Homo sapiens
ggccggggggggcggggcctcgggactccgcccacgcctccgtctcctccgcgctccgccacagccggccgacaccacaccagccggggagccgccgccgccgccgccacctctgagcagccggctgggagcgagagccgacagctagtctgcaagccaccgctgtcgccatggggagccgcgtctcgcgggaagacttcgagtgggtctacaccgaccagccgcacgccgaccggcgccgggagatcctggcaaagtatccagagataaagtccttgatgaaacctgatcccaatttgatatggattataattatgatggttctcacccagttgggtgcattttacatagtaaaagacttggactggaaatgggtcatatttggggcctatgcgtttggcagttgcattaaccactcaatgactctggctattcatgagattgcccacaatgctgcctttggcaactgcaaagcaatgtggaatcgctggtttggaatgtttgctaatcttcctattgggattccatattcaatttcctttaagaggtatcacatggatcatcatcggtaccttggagctgatggcgtcgatgtagatattcctaccgattttgagggctggttcttctgtaccgctttcagaaagtttatatgggttattcttcagcctctcttttatgcctttcgacctctgttcatcaaccccaaaccaattacgtatctggaagttatcaataccgtggcacaggtcacttttgacattttaatttattactttttgggaattaaatccttagtctacatgttggcagcatctttacttggcctgggtttgcacccaatttctggacattttatagctgagcattacatgttcttaaagggtcatgaaacttactcatattatgggcctctgaatttacttaccttcaatgtgggttatcataatgaacatcatgatttccccaacattcctggaaaaagtcttccactgagctggagtttcctggatgggtgcagtggctcacacctgtaatcccagcactttgggaggcctagcgccaggcctacgctgacggcacacacactagcacggctgaactactactgcacaaccctccctcactacaacttcctggcactaaaagtactgctactgacttctcgctcgactgcgcactgactacaataaagtccctactcacagaactgcaaccagcgcaccccaacacacacggcagcacgcactgcgtgcctgccgcacgcttaccactacttcactcttacgctgcccaaaaagcggcaccttcccttctcccaaacaaccttctagccacttgactaaccctgccccccccctcccgccactctacttcacaccctttgacccaacccagctgcactgcctccacgcaacagctcgccccctgcgccaaccaaacatcacacgaagcttaagaagccatccgcgctttgaatacccacacgcacaggcggcacatccttgggctatctcacaccaccaccgctcacagcccctcgaccttcccttgcctccctggcctccccgcctttccctcctctcccctcgcgcaaaacccctctgctccacacctcggcccgctccctcaacttccgcctcaactctccgaccccgcacacttcctttccacacccgccccatctctccctagccacctcatccacaccctcaaaccccactcatctccctctccgcacccaaccgccctcctcacaacgcaccccttcttctccccccccagcccctccacgcctgcccccaccagcccctcctcctatctacgcgcc

SEQ ID NO: 417279 - DNA, 1277 bp, Homo sapiens
ggccggggggggcggggcctcgggactccgcccacgcctccgtctcctccgcgctccgccacagccggccgacaccacaccagccggggagccgccgccgccgccgccacctctgagcagccggctgggagcgagagccgacagctagtctgcaagccaccgctgtcgccatggggagccgcgtctcgcgggaagacttcgagtgggtctacaccgaccagccgcacgccgaccggcgccgggagatcctggcaaagtatccagagataaagtccttgatgaaacctgatcccaatttgatatggattataattatgatggttctcacccagttgggtgcattttacatagtaaaagacttggactggaaatgggtcatatttggggcctatgcgtttggcagttgcattaaccactcaatgactctggctattcatgagattgcccacaatgctgcctttggcaactgcaaagcaatgtggaatcgctggtttggaatgtttgctaatcttcctattgggattccatattcaatttcctttaagaggtatcacatggatcatcatcggtaccttggagctgatggcgtcgatgtagatattcctaccgattttgagggctggttcttctgtaccgctttcagaaagtttatatgggttattcttcagcctctcttttatgcctttcgacctctgttcatcaaccccaaaccaattacgtatctggaagttatcaataccgtggcacaggtcacttttgacattttaatttattactttttgggaattaaatccttagtctacatgttggcagcatctttacttggcctgggtttgcacccaatttctggacattttatagctgagcattacatgttcttaaagggtcatgaaacttactcatattatgggcctctgaatttacttaccttcaatgtgggttatcataatgaacatcatgatttccccaacattcctggaaaaagtcttccactggtaagtaaaggatttgatacatattctaattttgttttttcatttgtttgttttttgagacggtgtctcactcagtcgcccaggctggcgggcagtggcacgatctcggctcactgtaacctccacctcccgggttcaaacgattctcatgcctcagtctcccaagtagttgggattacaggcgcatgctaccacgcccagctaatttttgtatttttagtagagatggggttttgccatgttggccaggctagtattttgtcagtccaagcagttcattaa

SEQ ID NO: 417280 - DNA, 1403 bp, Homo sapiens
  misc_feature (14)..(14): n is a, c, g, or t
  misc_feature (18)..(18): n is a, c, g, or t
  misc_feature (34)..(34): n is a, c, g, or t
  misc_feature (38)..(38): n is a, c, g, or t
  misc_feature (42)..(42): n is a, c, g, or t
aacagttataactncgcngggcacagtggttcangccngtantcacagcatctttacttggcctgggtttgcacccaatttctggacattttatagctgagcattacatgttcttaaagggtcatgaaacttactcatattatgggcctctgaatttacttaccttcaatgtgggttatcataatgaacatcatgatttccccaacattcctggaaaaagtcttccactgagctggagtttcctggatgggtgcagtggctcacacctgtaatcccagcactttgggaggcctaggtgaggaaaatagcagctgaatactatgacaacctccctcactacaattcctggataaaagtactgtatgattttgtgatggatgatacaataagtccctactcaagaatgaagaggcaccaaaaaggagagatggtgctggagtaaatatcattagtgccaaagggattcttctccaaaactttagatgataaaatggaatttttgcattattaaacttgagaccagtgatgctcagaagctcccctggcacaatttcagagtaagagctcggtgataccaagaagtgaatctggcttttaaacagtcagcctgactctgtactgctcagtttcactcacaggaaacttgtgacttgtgtattatcgtcattgaggatgtttcactcatgtctgtcattttataagcatatcatttaaaaagcttctaaaaagctatttcgccaggcacggtggctcatgcctataatcccagcactttgggaggccaaggtgggtggatcacctgaggtcaggagttcgagaccagcctggccaacacggtgaaaccccatctctactaaaaatgcaaaaattagccgggcgtggcggcacatgcctgtaatcccagctacatgggaggctgaggtgggagaattgcttgaacccaggaggcggaggcagaggctgcagtgacccaagattgtgccactgcactccaccctgggcaacagagcaagaccccatctcaaaaataaataaatatatataaaaaataaaaagctatttctagtttatttcactataaagttttgctttattaaaaagctaataaacagctattaatcacagtgtattagtatttgttacatttttgtatttcactatctttatactatataatatggtaacttgggtaccgggggaactttaaaatttcatctcaaaaataatttttaaaaagcctgaggtatgatatagcataaaagattgagatgaaaatatatttccctgtaagctgaattactcatttaaaaattttaacttctatatgggacccgaattagacactgctgaatcctgtacagccttactcataaataaagtacttactgaatttcccattcaaa

SEQ ID NO: 417281 - DNA, 1381 bp, Homo sapiens
gtctataaccgtgtccatcagtatgtatctggacttggagtgataatcggacccaatttctggacattttatagctgagcattacatgttcttaaagggtcatgaaacttactcatattatgggcctctgaatttacttaccttcaatgtgggttatcataatgaacatcatgatttccccaacattcctggaaaaagtcttccactgagctggagtttcctggatgggtgcagtggctcacacctgtaatcccagcactttgggaggcctaggtgaggaaaatagcagctgaatactatgacaacctccctcactacaattcctggataaaagtactgtatgattttgtgatggatgatacaataagtccctactcaagaatgaagaggcaccaaaaaggagagatggtgctggagtaaatatcattagtgccaaagggattcttctccaaaactttagatgataaaatggaatttttgcattattaaacttgagaccagtgatgctcagaagctcccctggcacaatttcagagtaagagctcggtgataccaagaagtgaatctggcttttaaacagtcagcctgactctgtactgctcagtttcactcacaggaaacttgtgacttgtgtattatcgtcattgaggatgtttcactcatgtctgtcattttataagcatatcatttaaaaagcttctaaaaagctatttcgccaggcacggtggctcatgcctataatcccagcactttgggaggccaaggtgggtggatcacctgaggtcaggagttcgagaccagcctggccaacacggtgaaaccccatctctactaaaaatgcaaaaattagccgggcgtggcggcacatgcctgtaatcccagctacatgggaggctgaggtgggagaattgcttgaacccaggaggcggaggcagaggctgcagtgacccaagattgtgccactgcactccaccctgggcaacagagcaagaccccatctcaaaaataaataaatatatataaaaaataaaaagctatttctagtttatttcactataaagttttgctttattaaaaagctaataaacagctattaatcacagtgtattagtatttgttacatttttgtatttcactatctttatactatataatatggtaacttgggtaccgggggaactttaaaatttcatctcaaaaataatttttaaaaagcctgaggtatgatatagcataaaagattgagatgaaaatatatttccctgtaagctgaattactcatttaaaaattttaacttctatatgggacccgaattagacactgctgaatcctgtacagccttactcataaataaagtacttactgaatttcccattcaaa

SEQ ID NO: 417282 - DNA, 1768 bp, Homo sapiens
  misc_feature (32)..(32): n is a, c, g, or t
gacactatagaaaagttgtaaaaaaagcaggntggtacggtccggaattcccggggagccgccgccgccgccgccacctctgagcagccggctgggagcgagagccgacagctagtctgcaagccaccgctgtcgccatggggagccgcgtctcgcgggaagacttcgagtgggtctacaccgaccagccgcacgccgaccggcgccgggagatcctggcaaagtatccagagataaagtccttgatgaaacctgatcccaatttgatatggattataattatgatggttctcacccagttgggtgcattttacatagtaaaagacttggactggaaatgggtcatatttggggcctatgcgtttggcagttgcattaaccactcaatgactctggctattcatgagattgcccacaatgctgcctttggcaactgcaaagcaatgtggaatcgctggtttggaatgtttgctaatcttcctattgggattccatattcaatttcctttaagaggtatcacatggatcatcatcggtaccttggagctgatggcgtcgatgtagatattcctaccgattttgagggctggttcttctgtaccgctttcagaaagtttatatgggttattcttcagcctctcttttatgcctttcgacctctgttcatcaaccccaaaccaattacgtatctggaagttatcaataccgtggcacaggtcacttttgacattttaatttattactttttgggaattaaatccttagtctacatgttggcagcatctttacttggcctgggtttgcacccaatttctggacattttatagctgagcattacatgttcttaaagggtcatgaaacttactcatattatgggcctctgaatttacttaccttcaatgtgggttatcataatgaacatcatgatttccccaacattcctggaaaaagtcttccactgacagggtcttggtggcgcatacctgtcttggtggcacgcacctgtcatcccagctactcaggaggcctgaagtgcaagaatcgcttgaacccgggaggcagaggttgcagtgagcagagactgcgccacaactacattccagcctgggagacagagtgagactccatccccccaccgccccccaaaaaaaggatcagagacaagtggaggaggaaactgagaatcaaggatgttaggtaacttgcatcaagttggccagcttgatctctgagtagtggcagaaccagaacccgatttgaaccagcctcactctaagccccagcccttgccacaccaccaccacccatcaattacatatccacaaagaacctccgtctggtcacgtatgaaatgagggattgctgccgtccagttgggaatcctggagtctgaatgccccaccacagacggcagtgatcagaaagatattcttctctggggagggctgggccccatccactccccagtcaactccccacattccagggagatgcagtgagctcttctctgcagccagctcaggctcatgactgcactgccagggaagagagtaacattgctccagacccatttgtacctgactgctctaaaggttaccttggatctgggaaagtttgctgagtaaattaataacataagcaaggacgtaagaagaactttaacctacctcacagaattctatactaagaggccaaactgtttttgagaaccaaaggacaatgcatacaacgagtctggttattcctagagaatcctaactgggagct

SEQ ID NO: 417283 - DNA, 1274 bp, Homo sapiens
  misc_feature (32)..(32): n is a, c, g, or t
gacactatagaaaagttgtaaaaaaagcaggntggtacggtccggaattcccggggagccgccgccgccgccgccacctctgagcagccggctgggagcgagagccgacagctagtctgcaagccaccgctgtcgccatggggagccgcgtctcgcgggaagacttcgagtgggtctacaccgaccagccgcacgccgaccggcgccgggagatcctgggtgaggaaaatagcagctgaatactatgacaacctccctcactacaattcctggataaaagtactgtatgattttgtgatggatgatacaataagtccctactcaagaatgaagaggcaccaaaaaggagagatggtgctggagtaaatatcattagtgccaaagggattcttctccaaaactttagatgataaaatggaatttttgcattattaaacttgagaccagtgatgctcagaagctcccctggcacaatttcagagtaagagctcggtgataccaagaagtgaatctggcttttaaacagtcagcctgactctgtactgctcagtttcactcacaggaaacttgtgacttgtgtattatcgtcattgaggatgtttcactcatgtctgtcattttataagcatatcatttaaaaagcttctaaaggccaaggtgggtggatcacctgaggtcaggagttcgagaccagcctggccaacacggtgaaaccccatctctactaaaaatgcaaaaattagccgggcgtggcggcacatgcctgtaatcccagctacatgggaggctgaggtgggagaattgcttgaacccaggaggcggaggcagaggctgcagtgacccaagattgtgccactgcactccaccctgggcaacagagcaagaccccatctcaaaaataaataaatatatataaaaaataaaaagctatttctagtttatttcactataaagttttgctttattaaaaagctaataaacagctattaatcacagtgtattagtatttgttacatttttgtatttcactatctttatactatataatatggtaacttgggtaccgggggaactttaaaatttcatctcaaaaataatttttaaaaagcctgaggtatgatatagcataaaagattgagatgaaaatatatttccctgtaagctgaattactcatttaaaaattttaacttctatatgggacccgaattagacactgctgaatcctgtacagccttactcataaataaagtacttactgaatttcccattcaaa

SEQ ID NO: 417284 - DNA, 426 bp, Homo sapiens
cccccctacaacttcctgtactctagcaacctcctgtacccatctcaaaaataaataaatatatataaaaaataaaaagctatttctagtttatttcactataaagttttgctttattaaaaagctaataaacagctattaatcacagtgtattagtatttgttacatttttgtatttcactatctttatactatataatatggtaacttgggtaccgggggaactttaaaatttcatctcaaaaataatttttaaaaagcctgaggtatgatatagcataaaagattgagatgaaaatatatttccctgtaagctgaattactcatttaaaaattttaacttctatatgggacccgaattagacactgctgaatcctgtacagccttactcataaataaagtacttactgaatttcccattcaaa

SEQ ID NO: 417285 - DNA, 678 bp, Homo sapiens
tatctggaagttatcaaagagaggctgaagaataacccatatacgtaattggtttggggttgatgaacagaggtcgaaaggcataaaagagaggctgaagaataacccaaaccaattacgtatctggaagttatcaataccgtggcacaggtcacttttgacattttaatttattactttttgggaattaaatccttagtctacatgttggcagcatctttacttggcctgggtttgcacccaatttctggacattttatagctgagcattacatgttcttaaagggtcatgaaacttactcatattatgggcctctgaatttacttaccttcaatgtgggttatcataatgaacatcatgatttccccaacattcctggaaaaagtcttccactggtaagtaaaggatttgatacatattctaattttgttttttcatttgtttgttttttgagacggtgtctcactcagtcgcccaggctggcgggcagtggcacgatctcggctcactgtaacctccacctcccgggttcaaacgattctcatgcctcagtctcccaagtagttgggattacaggcgcatgctaccacgcccagctaatttttgtatttttagtagagatggggttttgccatgttggccaggctagtattttgtcagtccaagcagttcattaa

SEQ ID NO: 417286 - DNA, 2444 bp, Homo sapiens
ggccggggggggcggggcctcgggactccgcccacgcctccgtctcctccgcgctccgccacagccggccgacaccacaccagccggggagccgccgccgccgccgccacctctgagcagccggctgggagcgagagccgacagctagtctgcaagccaccgctgtcgccatggggagccgcgtctcgcgggaagacttcgagtgggtctacaccgaccagccgcacgccgaccggcgccgggagatcctggcaaagtatccagagataaagtccttgatgaaacctgatcccaatttgatatggattataattatgatggttctcacccagttgggtgcattttacatagtaaaagacttggactggaaatgggtcatatttggggcctatgcgtttggcagttgcattaaccactcaatgactctggctattcatgagattgcccacaatgctgcctttggcaactgcaaagcaatgtggaatcgctggtttggaatgtttgctaatcttcctattgggattccatattcaatttcctttaagaggtatcacatggatcatcatcggtaccttggagctgatggcgtcgatgtagatattcctaccgattttgagggctggttcttctgtaccgctttcagaaagtttatatgggttattcttcagcctctcttttatgcctttcgacctctgttcatcaaccccaaaccaattacgtatctggaagttatcaataccgtggcacaggtcacttttgacattttaatttattactttttgggaattaaatccttagtctacatgttggcagcatctttacttggcctgggtttgcacccaatttctggacattttatagctgagcattacatgttcttaaagggtcatgaaacttactcatattatgggcctctgaatttacttaccttcaatgtgggttatcataatgaacatcatgatttccccaacattcctggaaaaagtcttccactggtgaggaaaatagcagctgaatactatgacaacctccctcactacaattcctggataaaagtactgtatgattttgtgatggatgatacaataagtccctactcaagaatgaagaggcaccaaaaaggagagatggtgctggagtaaatatcattagtgccaaagggattcttctccaaaactttagatgataaaatggaatttttgcattattaaacttgagaccagtgatgctcagaagctcccctggcacaatttcagagtaagagctcggtgataccaagaagtgaatctggcttttaaacagtcagcctgactctgtactgctcagtttcactcacaggaaacttgtgacttgtgtattatcgtcattgaggatgtttcactcatgtctgtcattttataagcatatcatttaaaaagcttctaaaaagctatttcgccaggcacggtggctcatgcctataatcccagcactttgggaggccaaggtgggtggatcacctgaggtcaggagttcgagaccagcctggccaacacggtgaaaccccatctctactaaaaatgcaaaaattagccgggcgtggcggcacatgcctgtaatcccagctacatgggaggctgaggtgggagaattgcttgaacccaggaggcggaggcagaggctgcagtgacccaagattgtgccactgcactccaccctgggcaacagagcaagaccccatctcaaaaataaataaatatatataaaaaataaaaagctatttctagtttatttcactataaagttttgctttattaaaaagctaataaacagctattaatcacagtgtattagtatttgttacatttttgtatttcactatctttatactatataatatggtaacttgggtaccgggggaactttaaaatttcatctcaaaaataatttttaaaaagcctgaggtatgatatagcataaaagattgagatgaaaatatatttccctgtaagctgaattactcatttaaaaattttaacttctatatgggacccgaattagacactgctgaatcctgtacagccttactcataaataaagtacttactgaatttcccattcaaaaaaaaaaaaaaaaaaaaaaaaaaaaaaaaaaaaaaaaaaaaaaaaaaacaaaagaaaaagaaagagaaaaaaaaaaaaaaaaacaaaggggggggggaggaaaaaaggacggagggaggagcacagaagacggagaagagtaggaaggggggggtgcacaagggcgaggataaagaggaggacggggaaaaaagagggggagagagaaaagacggagaagaaagagagagaaacccaaagaggggagagagagaggaggaaacagaaggaaacgacggcgagaacacaaggagaaggagagggaaccagggagggggggggaagggggaggagttaaatcg

SEQ ID NO: 417287 - DNA, 1823 bp, Homo sapiens
ggccggggggggcggggcctcgggactccgcccacgcctccgtctcctccgcgctccgccacagccggccgacaccacaccagccggggagccgccgccgccgccgccacctctgagcagccggctgggagcgagagccgacagctagtctgcaagccaccgctgtcgccatggggagccgcgtctcgcgggaagacttcgagtgggtctacaccgaccagccgcacgccgaccggcgccgggagatcctggcaaagtatccagagataaagtccttgatgaaacctgatcccaatttgatatggattataattatgatggttctcacccagttgggtgcattttacatagtaaaagacttggactggaaatgggtcatatttggggcctatgcgtttggcagttgcattaaccactcaatgactctggctattcatgagattgcccacaatgctgcctttggcaactgcaaagcaatgtggaatcgctggtttggaatgtttgctaatcttcctattgggattccatattcaatttcctttaagaggtatcacatggatcatcatcggtaccttggagctgatggcgtcgatgtagatattcctaccgattttgagggctggttcttctgtaccgctttcagaaagtttatatgggttattcttcagcctctcttttatgcctttcgacctctgttcatcaaccccaaaccaattacgtatctggaagttatcaataccgtggcacaggtcacttttgacattttaatttattactttttgggaattaaatccttagtctacatgttggcagcatctttacttggcctgggtttgcacccaatttctggacattttatagctgagcattacatgttcttaaagggtcatgaaacttactcatattatgggcctctgaatttacttaccttcaatgtgggttatcataatgaacatcatgatttccccaacattcctggaaaaagtcttccactggtgaggaaaatagcagctgaatactatgacaacctccctcactacaattcctggataaaagtactgtatgattttgtgatggatgatacaataagtccctactcaagaatgaagaggcaccaaaaaggagagatggtgctggagtaaatatcattagtgccaaagggattcttctccaaaactttagatgataaaatggaatttttgcattattaaacttgagaccagtgatgctcagaagctcccctggcacaatttcagagtaagagctcggtgataccaagaagtgaatctggcttttaaacagtcagcctgactctgtactgctcagtttcactcacaggaaacttgtgacttgtgtattatcgtcattgaggatgtttcactcatgtctgtcattttataagcatatcatttaaaaagcttctaaaaagctatttcgccaggcacggtggctcatgcctataatcccagcactttgggaggccaaggtgggtggatcacctgaggtcaggagttcgagaccagcctggccaacacggtgaaaccccatctctactaaaaatgcaaaaattagccgggcgtggcggcacatgcctgtaatcccagctacatgggaggctgaggtgggagaattgcttgaacccaggaggcggaggcagaggctgcagtgacccaagattgtgccactgcactccaccctgggcaacagagcaagaccccatctcaaaaataaataaatatatataaaaaataaaaagctatttctagtttatttcactataaagttttgctttattaaaaagctaataaacagctattaatcac

SEQ ID NO: 417288 - DNA, 1447 bp, Homo sapiens
ggccggggggggcggggcctcgggactccgcccacgcctccgtctcctccgcgctccgccacagccggccgacaccacaccagccggggagccgccgccgccgccgccacctctgagcagccggctgggagcgagagccgacagctagtctgcaagccaccgctgtcgccatggggagccgcgtctcgcgggaagacttcgagtgggtctacaccgaccagccgcacgccgaccggcgccgggagatcctggcaaagtatccagagataaagtccttgatgaaacctgatcccaatttgatatggattataattatgatggttctcacccagttgggtgcattttacatagtaaaagacttggactggaaatgggtcatatttggggcctatgcgtttggcagttgcattaaccactcaatgactctggctattcatgagattgcccacaatgctgcctttggcaactgcaaagcaatgtggaatcgctggtttggaatgtttgctaatcttcctattgggattccatattcaatttcctttaagaggtatcacatggatcatcatcggtaccttggagctgatggcgtcgatgtagatattcctaccgattttgagggctggttcttctgtaccgctttcagaaagtttatatgggttattcttcagcctctcttttatgcctttcgacctctgttcatcaaccccaaaccaattacgtatctggaagttatcaataccgtggcacaggtcacttttgacattttaatttattactttttgggaattaaatccttagtctacatgttggcagcatctttacttggcctgggtttgcacccaatttctggacattttatagctgagcattacatgttcttaaagggtcatgaaacttactcatattatgggcctctgaatttacttaccttcaatgtgggttatcataatgaacatcatgatttccccaacattcctggaaaaagtcttccactggtgaggaaaatagcagctgaatactatgacaacctccctcactacaattcctggataaaagtactgtatgattttgtgatggatgatacaataagtccctactcaagaatgaagaggcaccaaaaaggagagatggtgctggagtaaatatcattagtgccaaagggattcttctccaaaactttagatgataaaaattagccgggcgtggcggcacatgcctgtaatcccagctacatgggaggctgaggtgggagaattgcttgaacccaggaggcggaggcagaggctgcagtgacccaagattgtgccactgcactccaccctgggcaacagagcaagaccccatctcaaaaataaataaatatatataaaaaataaaaagctatttctagtttatttcactataaagttttgctttattaaaaagctaataaacagctattaatcac

SEQ ID NO: 417289 - DNA, 2008 bp, Homo sapiens
agcgcgggagtccccgccaggcccacgccggccggttggggcgaagggtgtccccggctgtgccagccttgagtagatcttttcgctagaagattcctgtgccctcaggtgggcgccctttcctctcaccactccctctcctccggagcgggccgagcaaagtatccagagataaagtccttgatgaaacctgatcccaatttgatatggattataattatgatggttctcacccagttgggtgcattttacatagtaaaagacttggactggaaatgggtcatatttggggcctatgcgtttggcagttgcattaaccactcaatgactctggctattcatgagattgcccacaatgctgcctttggcaactgcaaagcaatgtggaatcgctggtttggaatgtttgctaatcttcctattgggattccatattcaatttcctttaagaggtatcacatggatcatcatcggtaccttggagctgatggcgtcgatgtagatattcctaccgattttgagggctggttcttctgtaccgctttcagaaagtttatatgggttattcttcagcctctcttttatgcctttcgacctctgttcatcaaccccaaaccaattacgtatctggaagttatcaataccgtggcacaggtcacttttgacattttaatttattactttttgggaattaaatccttagtctacatgttggcagcatctttacttggcctgggtttgcacccaatttctggacattttatagctgagcattacatgttcttaaagggtcatgaaacttactcatattatgggcctctgaatttacttaccttcaatgtgggttatcataatgaacatcatgatttccccaacattcctggaaaaagtcttccactggtgaggaaaatagcagctgaatactatgacaacctccctcactacaattcctggataaaagtactgtatgattttgtgatggatgatacaataagtccctactcaagaatgaagaggcaccaaaaaggagagatggtgctggagtaaatatcattagtgccaaagggattcttctccaaaactttagatgataaaatggaatttttgcattattaaacttgagaccagtgatgctcagaagctcccctggcacaatttcagagtaagagctcggtgataccaagaagtgaatctggcttttaaacagtcagcctgactctgtactgctcagtttcactcacaggaaacttgtgacttgtgtattatcgtcattgaggatgtttcactcatgtctgtcattttataagcatatcatttaaaaagcttctaaaaagctatttcgccaggcacggtggctcatgcctataatcccagcactttgggaggccaaggtgggtggatcacctgaggtcaggagttcgagaccagcctggccaacacggtgaaaccccatctctactaaaaatgcaaaaattagccgggcgtggcggcacatgcctgtaatcccagctacatgggaggctgaggtgggagaattgcttgaacccaggaggcggaggcagaggctgcagtgacccaagattgtgccactgcactccaccctgggcaacagagcaagaccccatctcaaaaataaataaatatatataaaaaataaaaagctatttctagtttatttcactataaagttttgctttattaaaaagctaataaacagctattaatcacagtgtattagtatttgttacatttttgtatttcactatctttatactatataatatggtaacttgggtaccgggggaactttaaaatttcatctcaaaaataatttttaaaaagcctgaggtatgatatagcataaaagattgagatgaaaatatatttccctgtaagctgaattactcatttaaaaattttaacttctatatgggacccgaattagacactgctgaatcctgtacagccttactcataaataaagtacttactgaatttcccattcaaa

SEQ ID NO: 417290 - DNA, 1504 bp, Homo sapiens
tatctggaagttatcaaagagaggctgaagaataacccatatacgtaattggtttggggttgatgaacagaggtcgaaaggcataaaagagaggctgaagaataacccaaaccaattacgtatctggaagttatcaataccgtggcacaggtcacttttgacattttaatttattactttttgggaattaaatccttagtctacatgttggcagcatctttacttggcctgggtttgcacccaatttctggacattttatagctgagcattacatgttcttaaagggtcatgaaacttactcatattatgggcctctgaatttacttaccttcaatgtgggttatcataatgaacatcatgatttccccaacattcctggaaaaagtcttccactggtgaggaaaatagcagctgaatactatgacaacctccctcactacaattcctggataaaagtactgtatgattttgtgatggatgatacaataagtccctactcaagaatgaagaggcaccaaaaaggagagatggtgctggagtaaatatcattagtgccaaagggattcttctccaaaactttagatgataaaatggaatttttgcattattaaacttgagaccagtgatgctcagaagctcccctggcacaatttcagagtaagagctcggtgataccaagaagtgaatctggcttttaaacagtcagcctgactctgtactgctcagtttcactcacaggaaacttgtgacttgtgtattatcgtcattgaggatgtttcactcatgtctgtcattttataagcatatcatttaaaaagcttctaaaaagctatttcgccaggcacggtggctcatgcctataatcccagcactttgggaggccaaggtgggtggatcacctgaggtcaggagttcgagaccagcctggccaacacggtgaaaccccatctctactaaaaatgcaaaaattagccgggcgtggcggcacatgcctgtaatcccagctacatgggaggctgaggtgggagaattgcttgaacccaggaggcggaggcagaggctgcagtgacccaagattgtgccactgcactccaccctgggcaacagagcaagaccccatctcaaaaataaataaatatatataaaaaataaaaagctatttctagtttatttcactataaagttttgctttattaaaaagctaataaacagctattaatcacagtgtattagtatttgttacatttttgtatttcactatctttatactatataatatggtaacttgggtaccgggggaactttaaaatttcatctcaaaaataatttttaaaaagcctgaggtatgatatagcataaaagattgagatgaaaatatatttccctgtaagctgaattactcatttaaaaattttaacttctatatgggacccgaattagacactgctgaatcctgtacagccttactcataaataaagtacttactgaatttcccattcaaa

SEQ ID NO: 417291 - DNA, 1801 bp, Homo sapiens
ggccggggggggcggggcctcgggactccgcccacgcctccgtctcctccgcgctccgccacagccggccgacaccacaccagccggggagccgccgccgccgccgccacctctgagcagccggctgggagcgagagccgacagctagtctgcaagccaccgctgtcgccatggggagccgcgtctcgcgggaagacttcgagtgggtctacaccgaccagccgcacgccgaccggcgccgggagatcctggcaaagtatccagagataaagtccttgatgaaacctgatcccaatttgatatggattataattatgatggttctcacccagttgggtgcattttacatagtaaaagacttggactggaaatgggtcatatttggggcctatgcgtttggcagttgcattaaccactcaatgactctggctattcatgagattgcccacaatgctgcctttggcaactgcaaagcaatgtggaatcgctggtttggaatgtttgctaatcttcctattgggattccatattcaatttcctttaagaggtatcacatggatcatcatcggtaccttggagctgatggcgtcgatgtagatattcctaccgattttgagggctggttcttctgtaccgctttcagaaagtttatatgggttattcttcagcctctcttttatgcctttcgacctctgttcatcaaccccaaaccaattacgtatctggaagttatcaataccgtggcacaggtcacttttgacattttaatttattactttttgggaattaaatccttagtctacatgttggcagcatctttacttggcctgggtttgcacccaatttctggacattttatagctgagcattacatgttcttaaagggtcatgaaacttactcatattatgggcctctgaatttacttaccttcaatgtgggttatcataatgaacatcatgatttccccaacattcctggaaaaagtcttccactgacagggtcttggtggcgcatacctgtcttggtggcacgcacctgtcatcccagctactcaggaggcctgaagtgcaagaatcgcttgaacccgggaggcagaggttgcagtgagcagagactgcgccacaactacattccagcctgggagacagagtgagactccatccccccaccgccccccaaaaaaaggatcagagacaagtggaggaggaaactgagaatcaaggatgttaggtaacttgcatcaagttggccagcttgatctctgagtagtggcagaaccagaacccgatttgaaccagcctcactctaagccccagcccttgccacaccaccaccacccatcaattacatatccacaaagaacctccgtctggtcacgtatgaaatgagggattgctgccgtccagttgggaatcctggagtctgaatgccccaccacagacggcagtgatcagaaagatattcttctctggggagggctgggccccatccactccccagtcaactccccacattccagggagatgcagtgagctcttctctgcagccagctcaggctcatgactgcactgccagggaagagagtaacattgctccagacccatttgtacctgactgctctaaaggttaccttggatctgggaaagtttgctgagtaaattaataacataagcaaggacgtaagaagaactttaacctacctcacagaattctatactaagaggccaaactgtttttgagaaccaaaggacaatgcatacaacgagtctggttattcctagagaatcctaactgggagct

SEQ ID NO: 417292 - DNA, 1272 bp, Homo sapiens
  misc_feature (32)..(32): n is a, c, g, or t
gacactatagaaaagttgtaaaaaaagcaggntggtacggtccggaattcccggggagccgccgccgccgccgccacctctgagcagccggctgggagcgagagccgacagctagtctgcaagccaccgctgtcgccatggggagccgcgtctcgcgggaagacttcgagtgggtctacaccgaccagccgcacgccgaccggcgccgggagatcctgggtgaggaaaatagcagctgaatactatgacaacctccctcactacaattcctggataaaagtactgtatgattttgtgatggatgatacaataagtccctactcaagaatgaagaggcaccaaaaaggagagatggtgctggagtaaatatcattagtgccaaagggattcttctccaaaactttagatgataaaatggaatttttgcattattctcggtgataccaagaagtgaatctggcttttaaacagtcagcctgactctgtactgctcagtttcactcacaggaaacttgtgacttgtgtattatcgtcattgaggatgtttcactcatgtctgtcattttataagcatatcatttaaaaagcttctaaaaagctatttcgccaggcacggtggctcatgcctataatcccagcactttgggaggccaaggtgggtggatcacctgaggtcaggagttcgagaccagcctggccaacacggtgaaaccccatctctactaaaaatgcaaaaattagccgggcgtggcggcacatgcctgtaatcccagctacatgggaggctgaggtgggagaattgcttgaacccaggaggcggaggcagaggctgcagtgacccaagattgtgccactgcactccaccctgggcaacagagcaagaccccatctcaaaaataaataaatatatataaaaaataaaaagctatttctagtttatttcactataaagttttgctttattaaaaagctaataaacagctattaatcacagtgtattagtatttgttacatttttgtatttcactatctttatactatataatatggtaacttgggtaccgggggaactttaaaatttcatctcaaaaataatttttaaaaagcctgaggtatgatatagcataaaagattgagatgaaaatatatttccctgtaagctgaattactcatttaaaaattttaacttctatatgggacccgaattagacactgctgaatcctgtacagccttactcataaataaagtacttactgaatttcccattcaaa

SEQ ID NO: 417293 - DNA, 892 bp, Homo sapiens
agctgagcatgagtggtgtaacccacatacgccatgaagctcgcatggctctggagaaaaagctgaactaggccgtattggatcgtcatgccttgggttatgcccgcacggacccacatctctgtgacttcctggagactcacttcctagatgagcaagtgcagcttatcaagaagatgggtgactacctgaccaacctccacaggatgggtggcccggaggctgggctgggcgagtatctcttcgaaaggctcactctcaagcacgactaagagccttctgagcccagcgacttctgaagggccccttgcaaagtaatagggcttctgcctaagcctctccctccagccaataggcagctttcttaactatcctaacaagccttggaccaaatggaaataaagctttttaggatagttaagaaagctgcctatgggcggaggcagaggctgcagtgacccaagattgtgccactgcactccaccctgggcaacagagcaagaccccatctcaaaaataaataaatatatataaaaaataaaaagctatttctagtttatttcactataaagttttgctttattaaaaagctaataaacagctattaatcacagtgtattagtatttgttacatttttgtatttcactatctttatactatataatatggtaacttgggtaccgggggaactttaaaatttcatctcaaaaataatttttaaaaagcctgaggtatgatatagcataaaagattgagatgaaaatatatttccctgtaagctgaattactcatttaaaaattttaacttctatatgggacccgaattagacactgctgaatcctgtacagccttactcataaataaagtacttactgaatttcccattcaaa

SEQ ID NO: 417294 - DNA, 6586 bp, Homo sapiens
  misc_feature (3)..(3): n is a, c, g, or t
  misc_feature (5)..(5): n is a, c, g, or t
  misc_feature (7)..(8): n is a, c, g, or t
aanantnnaggttttctcacgatgagtcggaggaggatatcgtgtaaagatctgggccatgctgactgccaagggtggctgtataagaaaaaggaaaagggaagtttcctaagcaacaaatggaaaaagttctgggtgatactgaaggggtcgtcactgtactggtatagcaatcaaatggcagagaaagctgatggatttgtcaacctgcctgatttcactgtggaaagagcatctgaatgcaagaaaaagcatgcttttaagatcagccatccacagatcaagaccttttattttgcagctgagaatgtgcaggaaatgaacgtgtggttaaataaacttggatcggctgtaatccatcaggaatccactacaaaggatgaagaatgttacagtgaaagtgaacaggaagatccagaaatagctgcggagacaccaccccctcctcacgcttcccagactcagtctttgactgcacagcaggcatcttcatcctcacccagcctgagtggaacgtcgtattctttctcttccctggaaaatacagtgaagacacccagcagttttccttcctccttatctaaagagagacaatccttgcctgacacagttaacagtttgtctgctgctgaagatgagggacaaccaataacgtttgctgtgcaagttcattcacctgtaccctcagaggcaggcatccacaaggccctggaaaacagttttgtcacatcagaaagtggatttttgaactctttatctagtgatgatacttcttcattgagtagcaatcatgaccatcttactgtcccagataagcctgctggatcaaagatcatggacaaagaagagacaaaagtgtctgaagatgatgaaatggagaagctgtacaaatcattagagcaagctagtctatctcctcttggggaccgacgaccttcgactaaaaaggagttgagaaaatcctttgttaagcggtgtaaaaatccatctataaacgagaaactccacaaaatccgaacattgaatagcacattaaagtgtaaagaacatgatctggccatgattaaccagttgctggatgacccgaagctgacagccaggaaatacagagagtggaaagtcatgaacaccctgctgatccaggacatctatcagcagcagcgggcttcgcctgcccctgatgacactgatgacaccccccaggaactcaagaaatcaccttcttctccctctgttgaaaattccatttgagacaaagtcagggttttctcctcttatattttatcacaagcaactcttcaagatgttgcaaaagcttacatttttccttaaaaggaaaactgaaacccagtccttcaagcatcagcttcccatctaaagatgcacgttagatgaagataatcaccgaatacaccagggctcctcatttcagtcgtaacgcatccattgagattggaatgattgagttcagttgaaaggcgttttttgtgttcctactgggagctcacggtgatgtggggctctaggggggatgtgagaaatgtctcttctgttcattgctctccagagaatgctatggacaagaatcaaattttaccaggagtaattgcccatggaaacattctgtttttcaaaagaagaatgtacatattccacttgactgggaagctgtgtggcccaaatcactgtttgagtggaggaatgttttctagagcagtgactggaaggacaaacgtggtgttgcagaacaaaaattccttgcctttggtatggaatggtggtgccttttccatgtgatgagaaatgcttcatagacagtggcatgtgggagagctgaaggaggaggcgtgttccatattccactcattcaaaggacagcttggtgttttcacactttatgcaggttaggggatctgattaatgtttcctttccttacaacagctagagaaaacatctcatcacaattggagacctctacttcctttgagctttcctactcaatggtaggagataggaatatgttccgcaaagaatgtctactgctcttgtccttggctgtgatccctatacatagtgtgaatttatatccaggtttcccaggatcaatattgacaagacgactttggcatctgaattgttttaatatctttactcaaaaaaacaaaaaaacaaaaacccatggaagcaacaaaagagttaaacatgagggatttatttttgtatgtttatatgtcacttgtgtgctatgtgaatagctatgtttgttatttaaatatatttatagaagttcaaattactagtgtttaaaagatgatatactattatatattgtgcttagtatatatttgatgagtctatactttttgcttgagaaaaatagaaatactattgattcactggtgttatgatgttgcactgtgtctgaggaatgctcaggaaatcttgtgggaaaaaaatggggcatgcattcataatttttcattttcttccccaccccaacccccatgagctcttaaatttagatttctatctcttgtaagtcactcttttaaccagcaaaggactttcatcttagattatcctttctattaaataaactttaagctttgtgccatttatgcctgcaaaccttagaccaaaggcaacacaactaatgtcatcttttcattaaagactaatagaaatttagaaatcattgtgttaaagagagctatagagaaacaatatgaaagtcttcccttactaatcaccatgaatatttctcaccataggaataaccacaacccaccaagtacccatgttggccctgcctacccgtaacaaattgttcacacaacctattttgttttatagcttcaaagtgtggcttgacattcaaatggaaggaaccacctgaattatatctgcaaacaaaatggaaatagttgttgaatagttccccaagctttactaagaagccttaatactctgtaaacaaacaaacaaacaaaaaacaaccttagcattaagaaataaaaacaaaaaacaagaagcaagttgtactgctagaaacttctctaagataagaggccaggccagtcagtttggcccagcaaacatgtgggtacttctccacctagggaagccactgaagatgagtttgacctgtggtgacctgacagagagaacattcagatcctcagattgcaccctgatgccctggtttaggaaagcagtgctttaaccttttgcccctggaaattactgattctttctgtgattagcagataccagaagggaaattatttaggattggcaatgtaaagagtattgaaggaacaacaaataacaatagcagaaataacagtgtgacataaagtgcccttccacctatttttctttggtttgcaacaccagcctgtagacttccagtttttcttaaattgaagagctccagacacttttgagcagggtttgtgaatagctttgaatgctttcctttggcttttcgtgaagacatatttccccagcctttcaactgtaaactcctttagtaccattgaaacttaaggcaaaaaagatccctgggattacttagccaaggcttaaatttatttttcaaagtcaagaacattagcctagaagtttttgctttgctagttaaagcttactttgcagagcttcccaaagtgaaagggaaactgaacttcacaattttgcacctggctttctggagccccattgcctgctcattcgtgtttttccccctgtaaattattttgcttttgaccaggttgtgctagaaagtagggctgcttctgtgagttctcagcctaggctgtggccactaagacgtgggtggggggatagacaggagtgagagggagagtgggtgacactttccgtgacacttaatgtaggaagacatgggcttctctctcttggcctcaagccacttttctggtccaaagaatattgggaaaactggattactttcagtatatttcttgagaccgggtcatctctgaaatgcatttggggtagtttcctggggtccaagggccaattcctatacccagtcctgcagtgtctgtgagctgtggaatgagagagaaaaccatggctgctcaggaaggaagtggagaatctctcagcacacgtagatccaaatctgtggcacctgctaaagattaggatttggagaggactcctctttggggttgtgaagaggaccttttccctctgttgttagcctgtagatccagaacggagcctgatgtgatgccttcactggttgatatattgcaaatagacactctgagccctgcattgcaagggcgtcttttgctttaaagaattcttagttttgccacaacagctcaaatctcagaataggatcaaaggcctagaaagactcctaaagtataggattacaaagactccaggaagcgtaagaaagagattgtgtttggagtcagatttcaatgtgaaacccatgccttacatttacacagcactttgtagtttgcaaattggtgtgttttcagccccctcccgctgccccatgctctgagatgattgtggattattacagtgaagtgcctggcccggagcccccagtgatgaagcaggaacttgagtctcaggactcccagcggctctctgcccatttcctcctctccgccccccacctcgcttcacctgttaccttgtgaagttgctgttggcacatagcccactaggaaaccaagaagtttgactgggagcgtgtgtttcattgcactgggcttagcatacggctggccctggtggctgtttggctaaattctccatttgaaacctaaagggccctctctgtgcttgagcacagtctcctcctagtggtcctgcctcaacctgctggcgggctgtctatggattggggtttcacctaatcatgctgtgtttcctttcttttctttctgtacattagactacttgggaggtgctgtgtgatccttggatgaaaaacatatatttaaagaaatggagagtgtttattttgtttgctttttgaggcatgtgctgtcaaatgttagagaccaaacttagtgattagaggttggtcctttgaccttcttctcttaattgcttttcatgtaatcatgataatttactcaggtagcactccagtcacaaacaatgtcacagagatgaaacagattcaaagaaaaaatatttttaagtcttttgaaaagaagtgctattcaaatttaagacatgtttaaattcataggtacattatctcttagtaagaaatacttttttttttctttttttagacagagtcttgctctgttgcccaggctggagtgcagtggcacgattttagctcactgcaacctctgcctccctggttgaagtgattctcctgcctcagcctcccgagtagctgggactacgcccggctaatttttatatttttagtagagaccggggtttaccatgttgcccaggctggtttcaaactcctgacctcaggtgatctgcctgcctctgcctcccagagtgctgggattacaggtgtgagccaccacacctggccgaaagacagtattttgatatagccacatacatgatttaatgagtaatgttaagtacagaaaagctgccatatccacatagttttagggggcatttcttcttcagtctaacaagaatatgatatccaattgtggttttccaatttatttctcttccaatttctttttgtatacctcacaggagaaattgaatcctagaactgggagatgactgccctgcccagggttttgtaatacataattgaaaataaaagtccctgaaactaaatgtttgcagcctgtatgaaatggactgtggaagggggataatttctctcctcacagaaagccactcgtctccttgaatgaggcattgagcagacacacgtttctctgtgtcgtggggcaggaagcaattcccttgcctcttcagcacatctcagttctttcccacatgaccccagaaccacatagaaaacattgaaaataatggattcttcattgtatttgaattttttttttttaacctttagcccaaaagggaagtgtgcctcgtggaaagagcaaatgccgtaaaatagaaaccaggagttttaatcgccatatattttaatgtgcttgcatgatgggaatgtgacttttagcactgcatggtgtttgggggcaagatattaatgtggaaatcttagcttaagttttactgtgctctcatcctgtgtcagctacccctctaaactgaaaaagaggcatggctcatttctctcctgctttatgtttttgaggttgacttgtaagataaaaataaaaataagaaaaaaatatatctaggcaaatgacatgaaaaaaaagttgaaatatactactggtgttcatttttgtcctgcagtgttgctttctcaaagaaataaacatgtggctggaagtgtttaatggctgcgttttgatcgtctacaacaaggttacagtgccctctggtggcagtcatcaaaatcgcttctagacttgtttttatttttaaataaaagatctaattatattggaaatc

SEQ ID NO: 417295 - DNA, 6297 bp, Homo sapiens
ctctttggtcaacatttgctttctatttgaattttaggtggttaaataaacttggatcggctgtaatccatcaggaatccactacaaaggatgaagaatgttacagtgaaagtgaacaggaagatccagaaatagctgcggagacaccaccccctcctcacgcttcccagactcagtctttgactgcacagcaggcatcttcatcctcacccagcctgagtggaacgtcgtattctttctcttccctggaaaatacagtgaagacacccagcagttttccttcctccttatctaaagagagacaatccttgcctgacacagttaacagtttgtctgctgctgaagatgagggacaaccaataacgtttgctgtgcaagttcattcacctgtaccctcagaggcaggcatccacaaggccctggaaaacagttttgtcacatcagaaagtggatttttgaactctttatctagtgatgatacttcttcattgagtagcaatcatgaccatcttactgtcccagataagcctgctggatcaaagatcatggacaaagaagagacaaaagtgtctgaagatgatgaaatggagaagctgtacaaatcattagagcaagctagtctatctcctcttggggaccgacgaccttcgactaaaaaggagttgagaaaatcctttgttaagcggtgtaaaaatccatctataaacgagaaactccacaaaatccgaacattgaatagcacattaaagtgtaaagaacatgatctggccatgattaaccagttgctggatgacccgaagctgacagccaggaaatacagagagtggaaagtcatgaacaccctgctgatccaggacatctatcagcagcagcgggcttcgcctgcccctgatgacactgatgacaccccccaggaactcaagaaatcaccttcttctccctctgttgaaaattccatttgagacaaagtcagggttttctcctcttatattttatcacaagcaactcttcaagatgttgcaaaagcttacatttttccttaaaaggaaaactgaaacccagtccttcaagcatcagcttcccatctaaagatgcacgttagatgaagataatcaccgaatacaccagggctcctcatttcagtcgtaacgcatccattgagattggaatgattgagttcagttgaaaggcgttttttgtgttcctactgggagctcacggtgatgtggggctctaggggggatgtgagaaatgtctcttctgttcattgctctccagagaatgctatggacaagaatcaaattttaccaggagtaattgcccatggaaacattctgtttttcaaaagaagaatgtacatattccacttgactgggaagctgtgtggcccaaatcactgtttgagtggaggaatgttttctagagcagtgactggaaggacaaacgtggtgttgcagaacaaaaattccttgcctttggtatggaatggtggtgccttttccatgtgatgagaaatgcttcatagacagtggcatgtgggagagctgaaggaggaggcgtgttccatattccactcattcaaaggacagcttggtgttttcacactttatgcaggttaggggatctgattaatgtttcctttccttacaacagctagagaaaacatctcatcacaattggagacctctacttcctttgagctttcctactcaatggtaggagataggaatatgttccgcaaagaatgtctactgctcttgtccttggctgtgatccctatacatagtgtgaatttatatccaggtttcccaggatcaatattgacaagacgactttggcatctgaattgttttaatatctttactcaaaaaaacaaaaaaacaaaaacccatggaagcaacaaaagagttaaacatgagggatttatttttgtatgtttatatgtcacttgtgtgctatgtgaatagctatgtttgttatttaaatatatttatagaagttcaaattactagtgtttaaaagatgatatactattatatattgtgcttagtatatatttgatgagtctatactttttgcttgagaaaaatagaaatactattgattcactggtgttatgatgttgcactgtgtctgaggaatgctcaggaaatcttgtgggaaaaaaatggggcatgcattcataatttttcattttcttccccaccccaacccccatgagctcttaaatttagatttctatctcttgtaagtcactcttttaaccagcaaaggactttcatcttagattatcctttctattaaataaactttaagctttgtgccatttatgcctgcaaaccttagaccaaaggcaacacaactaatgtcatcttttcattaaagactaatagaaatttagaaatcattgtgttaaagagagctatagagaaacaatatgaaagtcttcccttactaatcaccatgaatatttctcaccataggaataaccacaacccaccaagtacccatgttggccctgcctacccgtaacaaattgttcacacaacctattttgttttatagcttcaaagtgtggcttgacattcaaatggaaggaaccacctgaattatatctgcaaacaaaatggaaatagttgttgaatagttccccaagctttactaagaagccttaatactctgtaaacaaacaaacaaacaaaaaacaaccttagcattaagaaataaaaacaaaaaacaagaagcaagttgtactgctagaaacttctctaagataagaggccaggccagtcagtttggcccagcaaacatgtgggtacttctccacctagggaagccactgaagatgagtttgacctgtggtgacctgacagagagaacattcagatcctcagattgcaccctgatgccctggtttaggaaagcagtgctttaaccttttgcccctggaaattactgattctttctgtgattagcagataccagaagggaaattatttaggattggcaatgtaaagagtattgaaggaacaacaaataacaatagcagaaataacagtgtgacataaagtgcccttccacctatttttctttggtttgcaacaccagcctgtagacttccagtttttcttaaattgaagagctccagacacttttgagcagggtttgtgaatagctttgaatgctttcctttggcttttcgtgaagacatatttccccagcctttcaactgtaaactcctttagtaccattgaaacttaaggcaaaaaagatccctgggattacttagccaaggcttaaatttatttttcaaagtcaagaacattagcctagaagtttttgctttgctagttaaagcttactttgcagagcttcccaaagtgaaagggaaactgaacttcacaattttgcacctggctttctggagccccattgcctgctcattcgtgtttttccccctgtaaattattttgcttttgaccaggttgtgctagaaagtagggctgcttctgtgagttctcagcctaggctgtggccactaagacgtgggtggggggatagacaggagtgagagggagagtgggtgacactttccgtgacacttaatgtaggaagacatgggcttctctctcttggcctcaagccacttttctggtccaaagaatattgggaaaactggattactttcagtatatttcttgagaccgggtcatctctgaaatgcatttggggtagtttcctggggtccaagggccaattcctatacccagtcctgcagtgtctgtgagctgtggaatgagagagaaaaccatggctgctcaggaaggaagtggagaatctctcagcacacgtagatccaaatctgtggcacctgctaaagattaggatttggagaggactcctctttggggttgtgaagaggaccttttccctctgttgttagcctgtagatccagaacggagcctgatgtgatgccttcactggttgatatattgcaaatagacactctgagccctgcattgcaagggcgtcttttgctttaaagaattcttagttttgccacaacagctcaaatctcagaataggatcaaaggcctagaaagactcctaaagtataggattacaaagactccaggaagcgtaagaaagagattgtgtttggagtcagatttcaatgtgaaacccatgccttacatttacacagcactttgtagtttgcaaattggtgtgttttcagccccctcccgctgccccatgctctgagatgattgtggattattacagtgaagtgcctggcccggagcccccagtgatgaagcaggaacttgagtctcaggactcccagcggctctctgcccatttcctcctctccgccccccacctcgcttcacctgttaccttgtgaagttgctgttggcacatagcccactaggaaaccaagaagtttgactgggagcgtgtgtttcattgcactgggcttagcatacggctggccctggtggctgtttggctaaattctccatttgaaacctaaagggccctctctgtgcttgagcacagtctcctcctagtggtcctgcctcaacctgctggcgggctgtctatggattggggtttcacctaatcatgctgtgtttcctttcttttctttctgtacattagactacttgggaggtgctgtgtgatccttggatgaaaaacatatatttaaagaaatggagagtgtttattttgtttgctttttgaggcatgtgctgtcaaatgttagagaccaaacttagtgattagaggttggtcctttgaccttcttctcttaattgcttttcatgtaatcatgataatttactcaggtagcactccagtcacaaacaatgtcacagagatgaaacagattcaaagaaaaaatatttttaagtcttttgaaaagaagtgctattcaaatttaagacatgtttaaattcataggtacattatctcttagtaagaaatacttttttttttctttttttagacagagtcttgctctgttgcccaggctggagtgcagtggcacgattttagctcactgcaacctctgcctccctggttgaagtgattctcctgcctcagcctcccgagtagctgggactacgcccggctaatttttatatttttagtagagaccggggtttaccatgttgcccaggctggtttcaaactcctgacctcaggtgatctgcctgcctctgcctcccagagtgctgggattacaggtgtgagccaccacacctggccgaaagacagtattttgatatagccacatacatgatttaatgagtaatgttaagtacagaaaagctgccatatccacatagttttagggggcatttcttcttcagtctaacaagaatatgatatccaattgtggttttccaatttatttctcttccaatttctttttgtatacctcacaggagaaattgaatcctagaactgggagatgactgccctgcccagggttttgtaatacataattgaaaataaaagtccctgaaactaaatgtttgcagcctgtatgaaatggactgtggaagggggataatttctctcctcacagaaagccactcgtctccttgaatgaggcattgagcagacacacgtttctctgtgtcgtggggcaggaagcaattcccttgcctcttcagcacatctcagttctttcccacatgaccccagaaccacatagaaaacattgaaaataatggattcttcattgtatttgaattttttttttttaacctttagcccaaaagggaagtgtgcctcgtggaaagagcaaatgccgtaaaatagaaaccaggagttttaatcgccatatattttaatgtgcttgcatgatgggaatgtgacttttagcactgcatggtgtttgggggcaagatattaatgtggaaatcttagcttaagttttactgtgctctcatcctgtgtcagctacccctctaaactgaaaaagaggcatggctcatttctctcctgctttatgtttttgaggttgacttgtaagataaaaataaaaataagaaaaaaatatatctaggcaaatgacatgaaaaaaaagttgaaatatactactggtgttcatttttgtcctgcagtgttgctttctcaaagaaataaacatgtggctggaagtgtttaatggctgcgttttgatcgtctacaacaaggttacagtgccctctggtggcagtcatcaaaatcgcttctagacttgtttttatttttaaataaaagatctaattatattggaaatc

SEQ ID NO: 417296 - DNA, 772 bp, Homo sapiens
tattctttttttggttttatttgtgaaaaatagactgcacagcaggcatcttcatcctcacccagcctgagtggaacgtcgtattctttctcttccctggaaaatacagtgaagacacccagcagttttccttcctccttatctaaagagagacaatccttgcctgacacagttaacagtttgtctgctgctgaagatgagggacaaccaataacgtttgctgtgcaagttcattcacctgtaccctcagaggcaggcatccacaaggccctggaaaacagttttgtcacatcagaaagtggatttttgaactctttatctagtgatgatacttcttcattgagtagcaatcatgaccatcttactgtcccagataagcctgctggatcaaagatcatggacaaaggtaaaccaataaattatttattcttcgttagagagtgaatatttgtttgtatatggaactgtaatattaatttgtaacaagaatggttaaactcatgaatgatgattcaataattagtcaagtggggctatgcccagaggttgctttgtagaggagtttgcatgtggacaactccagctactaggccactaattacttgctataagtgtcactaaccaattgcttcagaactccaagacatgtgatcataaaataatgatacttttccaccaatcggagaaaaaacttgcctcttttttggtcccatgtcccatgcgctggagcctgtggtggttaaatcaggattttgtagtctggtattcataa

SEQ ID NO: 417297 - DNA, 1773 bp, Homo sapiens
ctctttggtcaacatttgctttctatttgaattttaggtggttaaataaacttggatcggctgtaatccatcaggaatccactacaaaggatgaagaatgttacagtgaaagtgaacaggaagatccagaaatagctgcggagacaccaccccctcctcacgcttcccagactcagtctttgactgcacagcaggcatcttcatcctcacccagcctgagtggaacgtcgtattctttctcttccctggaaaatacagtgaagacacccagcagttttccttcctccttatctaaagagagacaatccttgcctgacacagttaacagtttgtctgctgctgaagatgagggacaaccaataacgtttgctgtgcaagttcattcacctgtaccctcagaggcaggcatccacaaggccctggaaaacagttttgtcacatcagaaagtggatttttgaactctttatctagtgatgatacttcttcattgagtagcaatcatgaccatcttactgtcccagataagcctgctggatcaaagatcatggacaaagaagagacaaaagtgtctgaagatgatgaaatggagaagctgtacaaatcattagagcaagctagtctatctcctcttggggaccgacgaccttcgactaaaaaggagttgagaaaatcctttgttaagcggtgtaaaaatccatctataaacgagaaactccacaaaatccgaacattgaatagcacattaaagtgtaaagaacatgatctggccatgattaaccagttgctggatgacccgaagctgacagccaggaaatacagagagtggaaagtcatgaacaccctgctgatccaggacatctatcagcagcagcgggcttcgcctgcccctgatgacactgatgacaccccccaggaactcaagaaatcaccttcttctccctctgttgaaaattccatttgagacaaagtcagggttttctcctcttatattttatcacaagcaactcttcaagatgttgcaaaagcttacatttttccttaaaaggaaaactgaaacccagtccttcaagcatcagcttcccatctaaagatgcacgttagatgaagataatcaccgaatacaccagggctcctcatttcagtcgtaacgcatccattgagattggaatgattgagttcagttgaaaggcgttttttgtgttcctactgggagctcacggtgatgtggggctctaggggggatgtgagaaatgtctcttctgttcattgctctccagagaatgctatggacaagaatcaaattttaccaggagtaattgcccatggaaacattctgtttttcaaaagaagaatgtacatattccacttgactgggaagctgtgtggcccaaatcactgtttgagtggaggaatgttttctagagcagtgactggaaggacaaacgtggtgttgcagaacaaaaattccttgcctttggtatggaatggtggtgccttttccatgtgatgagaaatgcttcatagacagtggcatgtgggagagctgaaggaggaggcgtgttccatattccactcattcaaaggacagcttggtgttttcacactttatgcagtgttgctttctcaaagaaataaacatgtggctggaagtgtttaatggctgcgttttgatcgtctacaacaaggttacagtgccctctggtggcagtcatcaaaatcgcttctagacttgtttttatttttaaataaaagatctaattatattggaaatc

SEQ ID NO: 417298 - DNA, 3547 bp, Homo sapiens
acagaaacaatcttcaatagaacttaaatcatgtgccatttaatactgttgctggacagctgataaaactaccttctgacaaagtttgatttaattagactctaataaaaggtcctatgagactttctaaaagactatattgggaagaaagaaacctcagaaaagtctaaattatcaagtagtaccatttaaatactcttactggacagctaataagctaccttcagacaaagattgaatgattaaattgaactccatacagaactgctaaggtgtcttcaaaaaggacttgagaagatgaaagcatctttagaagggccacttaaattcacttgcttgatagaaataaagcctcaagcaagttgttataacttcaggattcgacttcactgactctaagagtatagacatccataatttgaactaatgaatagtccacttctgttcattgcttctctgtcacccccatttgccactaccataatgagtgatagatacatcttcatcacctctggaaatcatctcaggatctaaatggaaactgtataaagcctatcatttttactgatttaaactatgtaaactcattattctttttatgtaatgtgctgttgttattgtttacctgcataaaaatatttatgagggttttcaacagtttacttgagacctcatttttgcccatttttttccttcccgatatcatgatctcctcagctgaactttcttaccttgggggttgttcaggaactgactctcatggggaaagagggattactatttctgtgttcctatctcttggtaactgcttaaccacagtcagtcttgaactaatggaaggagcactggacttgggttcttgagacctgggttcatgttcagttctgccactgattattgtgacattgggccagtcacttgatttctctgagcctcagtttcatcacctgttaagtgaggatagtaatacctggcacaaatatcacaatattagtgataattgaatataattataagtacccaatggctattaaaagtaaaactaggaagtgctgaataaccataatatcattatatttgtagcattttggaccttatcaatgaacaactgagaaaactaggtttttgaattcttttactttttaaagtaacttcctcccatttttatgtcaattatagaaaattttaaaaagaaaattaaatgtgcctataattttataagccggaggtaactaagttggtatttttcttcttagtacctctttgtctcatcataaattgttcatcaatgtcaaaaacttggaaaataaagataagcatatagaaaaaaataaaaaccacccataatcacaaatcccagaagcaatgttaatattttggtggatttatttccagtctttttctatggctatatgtgcacatatataatttttacatagaaaaagtcataatgcatacagctttgttgcttttagcatttttatcatgaatattttcctacatttatgcaaagtatttgtaaatatcattttcaatggtgtataatatttcatcataggatgacatcatggtttagttaaccattttcttttgttggatatttgagggtctttccaaatttggccattgtaatttcacaatgtctttttcattacctaactgaaaatatttgctttggtgaaagcagaggattttttgttgtttgtttgtttgtttttgaagaagtccttttaatagctacatttcattgactaagtggaacttcaagagacaggtagaagaaaaaaaaaaagaaacagtagatgtaatttcaagattgaggatttattttgttagtgactgttccagaagctgaattttggtgttagagcaattcaggagggacagtttgccaccattttatgatactttactgtagaaaagttttcaggatttagaccaggaaagagacatcctaaccatatgggttgattttattttatggaccctgtgaagtctgggactgatcaggtttctcttttgttggctactagaaagcttggagtcaaatgtgtggtcaatgcatagcacttgtaatgggactctacggtatgtatgcactttgtattagctttctgccaggctccatttcgtgttcctatctttattgtttttgttttttccttttactttcttatctactttgaatttatgctatcatgttgtattttgtgtattcttgtaagccacctgacatccatcttggaacatggtggggaataaacacactaataaataaatacattaataaatacatgaataaataaaccaataaggaaaaaacaatgaggcaaatgaatgcagccaggactctgaaaattgcatagtgcctccaagaataatcaatgttaaggacttgaagcttggaagaacatattggaaagaagcaggtgaggctgcgaggctgcatttagaggtgacgtgttctgtgtgacgtctgtgtctactgaagcatgcttatatgtcttgtgtcttctgctgcacttgagcattaggtgtgtttcagaggatatgcagtgctgcgtaatggactgtgtctttagagggcacagttcatgtgcattttatttgtggggaatctagagagatttgggagttggtgagcctgggaatgatgtgatgatcctttttcatggaggcataggaaggaatcattgtatataaatcaaatcaagacaaataggaagtttcctaccatttactaactagttactgggtgccaagctatgtgccaggcactttacatgtattgatttaacacttaacagccactctatattattccctttttacagatgaggcaatttaagctcaaagcatttaagtagacaaccaacctagaatcacatagcaaatgacagaagccagaggcctcccaagtctctctaactccaaaccctatgcttactctactatatcacactaccttgcaataggacaaagggaatatgtggtaaactatgttcccagcatctaaaagccaggagtggttttcatttttctttaagaagatgatagtgtgatttgaaacatatctgaatttcagaagaggggacttttaaaaattgccactcataaggaaagaaagaactttttcacatatttttgaaagaaacgatggtgagaagatattcttgataatagagatatgctaacatttgctttgggtgttttgtaggttagatttttttggtgtgtactttataggcttgcatattgcttactttaaacagctgaagttctaagtaagagtgttcatatatgtgaaagagttcttaaagtactatatagttttgttattgtattgaatatatattgttctaattcctagagtatgtcatcttctatatactctatacagcaggaatccttgctgtacaacaattatattaaagaaaactctcagttatcctttatggtcttgtcaatcaaatgttttggtcaatgcatattactaactttcatctaattaatgcacaataaaatatacttagtgtgaaaaaaaaaa

SEQ ID NO: 417299 - DNA, 5019 bp, Homo sapiens
  misc_feature (1160)..(1160): n is a, c, g, or t
ttttcatgcttgctccctggcctgaatctagaaagtaaaactttgctggaatgaagttggggttgaaacagtttcggtttgtaaccatactgtctctgtctcatctactcagctctgcctttgtaatgtaaaagcagccatagatggtatgtaaatgaatgaacatggccatgttctgatagcattttatttacaaaaacaggcagtgggctaaatttgggctatagtttgccaacccctcttctaggcaaagaactgcctgagcgtaggaagctggactgaggttctctgctagtgtgtgaacttgtggatgccaaagccaatctcttcccttcatgtcagacactttgcaaatgttacctcttttagatctcccattaactctaaaaggtggagggtgctattatgcttccatttcatacattgttctaagagattatcacactactagtaagttaggatagtaggaatttgaacttcaggtctgtcagaccctaaaaccccatgccctggaaatggttttctaaggctggcctgtggttcgttggttgatttcaattagaatttaagaattttttcagaatacatctaggtgtaaagatttttttgtcaatattactccacaaactagattatttcttttggcctgataactcaggaactttcttgtattacttctctcccttcttactggtttcttctttggactctcctgttgcacaggtattggatctcctggacctatccagttcctttcttttctatgctgtcatatttttcatctcttattgctctgtgttctgggagcttccaggacagttgctctttcacacaactaatttggttttcagttatatcagttctcctatttagcctttctttttttggaggcagggctggggcagactcatgctctgtcgcccaggctggagtgcagtggcctgatcacagctcactgcagccttgacctctgggactcaagcgatcctccagcctcagcctcccgggtagctgggactataggcatatgccaccatgcccagctaatcaggtgtttgtttgtttgtttggtagagacagactaccagagtctcgctaagttgcccaggctggtctcaaactcctggcctcaagcagtcctcccaccctggcctcccaangtgttgggcttacaggcatgagccaccgtgcccggccctgttaagcctttctatctagattttttccctcctaatcatgttggtgtttttttgtttgttttcatttttgttttgttttgttttgagacggagttttgctcttgttgcccaagctggtgtgcaatggcacgatctcggttcaccgcaacctctgccttccaggttcaaacgattctcctgcctcagcccccagagtagctgggattacaggcatgtgccaccacacctggctaattttgtatttttagtagagatggggtttctctatgttggtcaggctgctcttaaactaccaacctcaggtgatctgcctgcctcggcctcccaaagtgttgggattacaggcgtgagccaccatgcccggccagtttttaaagaactccttcttactactcagattactcctttttaaatagtggcttttaaaaaatatcaatgtagactgggcacagtggctcacacctataatcccagcactttgggaggctgaggcaggctgatcacctgaggtcaggagttcaagaccaggctggccaacatagtgaaaccctgtctctactaaaaatacaaaacttagccaggcctgcagttccagctactagggaggctaaggtgtgaggatcgctcgaaccaggaggccgttgcagtgaaccaagatcacgccagtgcacttcagcctgggtgacggagtgagactccgtctcgagaaaagaaaaaaaaacgcaatgcagcagtggctcacgcacataatcatagcattttgggaggccaaggcaagaagatcacttgagaccaagagttcaagaccagcctgggcaacaacaagaccccctccccccatctctacaaaaaatttaagaaaaaaaatttttttaaatcaatatggcatcctgttgcacaaattgcagtatattttgaaagatttattctgtttcttttgtcacctccatttcccagggctactgttgctctgtttgagctatgccctggaccattgagtggcttagactgtgctcacaataggtgtcccttcatcccttcagaagacaaacatggacatacgtcctaaaccaggaaggggttcagtgatggctcaggaaaatcggggcagggtgcagttatcctctaggcgagctgccgttttctttttcctttcctctcttgtggttgcctagaattagcttgggcactactatggtttttttctgtctgcaggccccaggagaccttctgtggacccaatatacttaacaatcatatgcagtgtagacctgctctggtgtcaattctaaccaaaacaaaaaaaaagcatttatgagacactcagggaaattcaagcagtaactgaataatattagatgatactaaggaattagtgttactttttaaattggataatagtattatgtttatgttaagaatcttgatctcttggtgatacatacctaagtaattgcatttgaaatgctaggtctcggatttgccttaaaagaattcagttagaatggcgtgggtatagaccagtggttccttactgggggctatttcccccacaaaggcatttagcaatgcttggagatacttttggtcatcaaaattgggaatttgctacagacatctaataattagaggctagggatattgttaaatgtcctacagtgcacatgacagacccacataacagagaattgtatagcccaaaatgtcattagtgtgacgttgagaaaatatatatgcagcatatgttttgtaaaaaagaagcccttaccagtctctgtgacaaactctctactctgtgtagagcactgtttttccagctgagtctagatgggaagccccgcttgtcatttgggctgtgggtgtactggtgctgggttggcaggcctttgcttaagtaccatcctggtacctcaaggtccactttcaaccccagtcccaattccctctgagcttgaggtgtttccaggcccaaactggtagaactagtacttagttttcagctggaggctctttggctctgtttgatctcttggacatcgagtctggtctgttttgtcttccagaaatctctcaaagattctgatctacatatgccaccgtttgctgcctttcagatatgctgttgattcattagtatttttatatttcttctaccatgtcagtgtgctttgggggaagatgaagtagtcgtgatgcccatcgcccgagagttctctccagacctagtcctggtgtctgctggatttgatgctgctgagggtcacccggccccactgggtggctaccatgtttctgccaaatgttttggatacatgacgcagcaactgatgaacctggcaggaggcgcagtggtgctggccttggagggtggccatgacctcacagccatctgtgacgcctctgaggcctgtgtggctgctcttctgggtaacagggtggatcccctttcagaagaaggctggaaacagaaacccaacctcaatgccatccgctctctggaggccgtgatccgggtgcacagtaaatactggggctgcatgcagcgcctggcctcctgtccagactcctgggtgcctagagtgccaggggctgacaaagaagaagtggaggcagtgaccgcactggcgtccctctctgtgggcatcctggctgaagataggccctcggagcagctggtggaggaggaagaacctatgaatctctaaggctctggaaccatctgcccgcccaccatgcccttgggacctggttctcttctaacccctggcaatagcccccattcctgggtctttagagatcctgtgggcaagtagttggaaccagagaacagcctgcctgctttgacagttatcccagggagcgtgagaaaatccctgggtctagaatgggaactggagaggaccctgagaggagacgggctgggcggcgacccccacagggctctcgagaacagattctcccctccagtatgggccctggctgtggcccccattcctcaggactgcacagaggaggactggctccggctccgtcgggctcacccttaaccactattcctggctctgcaaaccccagactttgcacacagccccaggctccacacagaaatgtgaacttggcctcagacaggctggcccttcctaggctctaggggctaggggggagtggggagccaagaggtcccatattcctgagtgcaggggtagtccctctcacctgcttcctcagacgactctggaagcttccctctaccaccgggcactgagacgaagctccctgacagccgagactggcagccctccatctggtccgtaccctcgccagaggcccccctacatcaacctcctggcgatgccctggtggagcagatgggtgctctgggagtcctgtgcttcctgatccaatggtgccaaacccttcatctcccccagaagcgcagcatacccctgggacccctcggccactgcccactcggggagccttctctgtttctggggcctcccccaccatagctctgattcccaccccacataggaatagcctgactgagggggaaggggtgggagagaagatacagacatggaggaggggaggctgctctggcaaagtcttcaaggcttttgggggtccaggcctggggtcaagaaggaaaatgtgtgtgagcatgtgtgtgagtgaggcgtgtgtgtgagcgtgtgtgtgagtgaggcgtgtgtgtgtgtctttcctaggacccaccataccctgtgtatgtatgcatgtttttgtaaaaaggaagaaaatggaaaaaaatctgaacaataaatgttttatttgcttt

SEQ ID NO: 417300 - DNA, 4921 bp, Homo sapiens
  misc_feature (1160)..(1160): n is a, c, g, or t
  misc_feature (3504)..(3504): n is a, c, g, or t
  misc_feature (3523)..(3523): n is a, c, g, or t
  misc_feature (3606)..(3606): n is a, c, g, or t
  misc_feature (3641)..(3641): n is a, c, g, or t
  misc_feature (4053)..(4053): n is a, c, g, or t
  misc_feature (4065)..(4065): n is a, c, g, or t
ttttcatgcttgctccctggcctgaatctagaaagtaaaactttgctggaatgaagttggggttgaaacagtttcggtttgtaaccatactgtctctgtctcatctactcagctctgcctttgtaatgtaaaagcagccatagatggtatgtaaatgaatgaacatggccatgttctgatagcattttatttacaaaaacaggcagtgggctaaatttgggctatagtttgccaacccctcttctaggcaaagaactgcctgagcgtaggaagctggactgaggttctctgctagtgtgtgaacttgtggatgccaaagccaatctcttcccttcatgtcagacactttgcaaatgttacctcttttagatctcccattaactctaaaaggtggagggtgctattatgcttccatttcatacattgttctaagagattatcacactactagtaagttaggatagtaggaatttgaacttcaggtctgtcagaccctaaaaccccatgccctggaaatggttttctaaggctggcctgtggttcgttggttgatttcaattagaatttaagaattttttcagaatacatctaggtgtaaagatttttttgtcaatattactccacaaactagattatttcttttggcctgataactcaggaactttcttgtattacttctctcccttcttactggtttcttctttggactctcctgttgcacaggtattggatctcctggacctatccagttcctttcttttctatgctgtcatatttttcatctcttattgctctgtgttctgggagcttccaggacagttgctctttcacacaactaatttggttttcagttatatcagttctcctatttagcctttctttttttggaggcagggctggggcagactcatgctctgtcgcccaggctggagtgcagtggcctgatcacagctcactgcagccttgacctctgggactcaagcgatcctccagcctcagcctcccgggtagctgggactataggcatatgccaccatgcccagctaatcaggtgtttgtttgtttgtttggtagagacagactaccagagtctcgctaagttgcccaggctggtctcaaactcctggcctcaagcagtcctcccaccctggcctcccaangtgttgggcttacaggcatgagccaccgtgcccggccctgttaagcctttctatctagattttttccctcctaatcatgttggtgtttttttgtttgttttcatttttgttttgttttgttttgagacggagttttgctcttgttgcccaagctggtgtgcaatggcacgatctcggttcaccgcaacctctgccttccaggttcaaacgattctcctgcctcagcccccagagtagctgggattacaggcatgtgccaccacacctggctaattttgtatttttagtagagatggggtttctctatgttggtcaggctgctcttaaactaccaacctcaggtgatctgcctgcctcggcctcccaaagtgttgggattacaggcgtgagccaccatgcccggccagtttttaaagaactccttcttactactcagattactcctttttaaatagtggcttttaaaaaatatcaatgtagactgggcacagtggctcacacctataatcccagcactttgggaggctgaggcaggctgatcacctgaggtcaggagttcaagaccaggctggccaacatagtgaaaccctgtctctactaaaaatacaaaacttagccaggcctgcagttccagctactagggaggctaaggtgtgaggatcgctcgaaccaggaggccgttgcagtgaaccaagatcacgccagtgcacttcagcctgggtgacggagtgagactccgtctcgagaaaagaaaaaaaaacgcaatgcagcagtggctcacgcacataatcatagcattttgggaggccaaggcaagaagatcacttgagaccaagagttcaagaccagcctgggcaacaacaagaccccctccccccatctctacaaaaaatttaagaaaaaaaatttttttaaatcaatatggcatcctgttgcacaaattgcagtatattttgaaagatttattctgtttcttttgtcacctccatttcccagggctactgttgctctgtttgagctatgccctggaccattgagtggcttagactgtgctcacaataggtgtcccttcatcccttcagaagacaaacatggacatacgtcctaaaccaggaaggggttcagtgatggctcaggaaaatcggggcagggtgcagttatcctctaggcgagctgccgttttctttttcctttcctctcttgtggttgcctagaattagcttgggcactactatggtttttttctgtctgcaggccccaggagaccttctgtggacccaatatacttaacaatcatatgcagtgtagacctgctctggtgtcaattctaaccaaaacaaaaaaaaagcatttatgagacactcagggaaattcaagcagtaactgaataatattagatgatactaaggaattagtgttactttttaaattggataatagtattatgtttatgttaagaatcttgatctcttggtgatacatacctaagtaattgcatttgaaatgctaggtctcggatttgccttaaaagaattcagttagaatggcgtgggtatagaccagtggttccttactgggggctatttcccccacaaaggcatttagcaatgcttggagatacttttggtcatcaaaattgggaatttgctacagacatctaataattagaggctagggatattgttaaatgtcctacagtgcacatgacagacccacataacagagaattgtatagcccaaaatgtcattagtgtgacgttgagaaaatatatatgcagcatatgttttgtaaaaaagaagcccttaccagtctctgtgacaaactctctactctgtgtagagcactgtttttccagctgagtctagatgggaagccccgcttgtcatttgggctgtgggtgtactggtgctgggttggcaggcctttgcttaagtaccatcctggtacctcaaggtccactttcaaccccagtcccaattccctctgagcttgaggtgtttccaggcccaaactggtagaactagtacttagttttcagctggaggctctttggctctgtttgatctcttggacatcgagtctggtctgttttgtcttccagaaatctctcaaagattctgatctacatatgccaccgtttgctgcctttcagatatgctgttgattcattagtatttttatatttcttctaccatgtcagtgtgctttgggggaagatgaagtaaattcatggatttagcccagtgtcttaagccaaaggtgcctaattactttcttcttcttctttttttttttttttttgaggcagagtctcgctccgtcacccaggctggagtgcagtgncacgatcttggctcactgnaacctccgcctcctgggtacaagcgattctcctgcctcagcctcctgagtagctgggaccagaggggtgtgccaccacacccnctaattttgtatttttagcagagacggggtttcancatattggccaggctggtcttgaactcctgaccttgtgatccacccgcctcggcctcccaaagtgctgggatgtgcctaattactttcttataatacctgatatactgccccctgttgttggaatttaacaaagacatttagtgataaattactatttttttttgttctttggctcaacgtaatccattgtttgttttgtgcctgttatgtgtgagaccctgtgctaggttttaggtgtacagtgagaatgaagcagacatgtaatccttgctcttgtggaatttatgctataaaggagggatattcattaatcaacaaagtcaaatatgtaattataaagtgtgagaggtattatcaaggaaaataataaggtccttgccttacaaaaatagtataggaaataacagcaantttttttttttnttgagacagagtctcgctctattgcccaggctgaagtgcagtggcgcaatctcggctcactacaacctctgccccccaggttcaagcgattctcctgcctcagcctcctaagtagctgagattacaggcatgtgccaccacacctggctaattttttttgtatttttagtagagatggggtttcaccatgttggccaagctggtctcgaattcttgacctcatgatctgcccacctcggcttcccaaagtgctgggattgcaggcgtgagccactgtgcctggccgtaacagctaaaatgaagtacacactgtgtgctagttactgtgccaacaactttacatgaaagatctcatttaatacgcagaataacttatttcagaaatgaggaaactgagacttatgatcctaatttagtattaggaagtcagagaagacctgtgtgggaaaagtgacacacagagaaccagacaagtaggagataaccaggcaaagaacagagagaggctgtgtaaagcagaaggaataacatgctcaaaggcctgaggatgaatgaatgaaagcatggaaggacaccagtggctgaaattgagtgagcaaggaaagagtgcaagagatagggcaggtaggggctaaatcgagggggttgttagagtccaggataaggagattagatttcattctgaggcatgagaaactgttggagggttttacctaagagtgggacacaacctgagttgctttcctagagatcactctgctttgtggagaatggattggcaggggcagaggcttactgtgatccaggtgagagaggatggaggttgggactacactggtggcaataaaaaaaatgc

SEQ ID NO: 417301 - DNA, 304 bp, Homo sapiens
  misc_feature (213)..(213): n is a, c, g, or t
  misc_feature (266)..(266): n is a, c, g, or t
  misc_feature (285)..(285): n is a, c, g, or t
ccgaccccatttctcttttgcaaaaagactatattccccaaacttctttctcatactttaaaatttctatttattatatatcttatagcgtacatgatatattcgtacaatgttacatgcttataatttataaatatgcatatgttgcaggtgcctgcttacaagtttgtcacacataagggatttgcccaggctggtcacaaactcctgggntcaagcgatccatctgcctcggcctctcaacgtgctgggattacaggcgtaancacttgcacctgaccccanctttcttcgaccccgcccg

SEQ ID NO: 417302 - DNA, 344 bp, Homo sapiens
tgcaaataatgtttttattcaatgtcaacttcttattaaaacatcccagggcttgactcttctgagtcttttatatactttttttctacaacaaaggagaaagcaatcactattgatttgggcacatatcaaaaaatgaaaaaagagaaataaataaatagttgcatttcaattgtggccaccatacagctaatagtttatcataactcttaaaggttggtccctaggctcttatacaggttcaccctttgctgacctcttacaatctttctgtcagcattttgaatgctactgattctgtgagtaatattttcaacggaggtcagacaggccagtaagtccag

SEQ ID NO: 417303 - DNA, 5633 bp, Homo sapiens
aaacatcacctgcaggtcccaaaacacccaaagctcaagccgggcctgcagctacagtttccaaagcacctgcagcttccaaagcacctgcagctcccaaagtacctgtgacccccagagtctccagagctcccaaaacacctgcagctcagaaggtgcccacggatgcagggccaaccttggatgtagccagacttctgagtgaggtccagcctacatcaagggctagtgtctccttactgaagggccaggggcaggctggaaggcagggtccccagtccagtggcaccttggccctcagcagtaagcaccagtttcagatggaggggctcctgggggcttgggagggggccccaaggcagccacctcgccacctgcaagcgaacagcacagtgaccagcttccagaggtaccacgaggccctgaatacacccttcgagctgaacctgtcaggggaacctggaaaccaggggttgcggcgagtggtcatcgatggcagcagtgtggccatggtgcatggcctgcagcacttcttctcctgccgaggaattgccatggcagtgcagtttttctggaaccggggacaccgagaggtcactgtgtttgtacccacctggcagctgaagaagaaccggagggtgagagagagccactttctgacgaagctacactcgctcaagatgctttcaatcacaccctcccagcttgagaatggcaagaagatcaccacctacgattataggttcatggtaaagctggcagaggagacagatggcatcattgtcaccaatgagcagattcacatcctgatgaatagttccaagaaactgatggtcaaagatcgcttgctgcctttcacctttgcggggaatctcttcatggtgcctgatgaccccctgggccgtgatggccccaccttggatgagtttctgaagaagccaaacaggttggacactgacattggcaacttcctgaaggtgtggaagacccttcctcccagctcagccagtgtcactgagctgagtgatgacgctgactctgggcccctggagagtctgccgaatatggaagaagtcagggaagagaaggaggagaggcaggatgaggagcagagacaggggcagggcacacagaaggcggctgaggaggacgaccttgactcttcgctggcgtcagtgttcagggtggagtgcccgtccctttcggaggagatcctgcggtgcctcagcctccatgatccccctgatggggccctggacatcgacctcctgccaggggcagcttctccctacctgggcatcccctgggatggaaaggctccctgccagcaggttcttgcccacctggcccagctcaccatccccagcaacttcaccgcactctccttcttcatgggcttcatggactcccacagggatgccatcctgactatgaagccctagtgggccccctgcacagcctcctcaagcagaagcctgactggcagtgggaccaggagcatgaggaggccttcctggccctgaagcgagccctggtgtctgccctctgcctgatggcccccaactcccagctgcccttccgcctggaggtgaccgtgagccacgtggccctgacggccatcctccatcaggagcactcagggaggaagcaccccatagcctatacctcaaaacccctcctccctgatgaggagagccagggcccccagtcagggggtgacagcccctatgctgtggcctgggccctcaagcatttttcccgctgcattggagacaccccggtggtcctggacctttcctatgcctcccggaccactgcggaccctgaggtgcgggagggccgcagggtttccaaagcttggttgatccgatggtccctcttggttcaggacaaaggcaagagggccctggaattggccctcctccagggcctgctgggggagaaccgcctgctcacccccgcggcctccatgcctcgcttcttccaggttctgccgcctttctctgacctgtccacgttcgtctgcatccacatgtcgggctactgcttctaccgtgaggatgagtggtgtgctggctttggtctctatgttctatcgcccaccagcccccctgtctccctttccttctcctgctccccttacacgccaacctatgcccacctggcagccgtggcctgcggcctggagcgctttggccagtccccactcccagtggttttcctcactcactgcaactggatcttcagcctcctgtgggagctcctgcccctctggagggctcggggcttcctctcctctgatggggctccactccctcacccaagcctgctctcctacattatatccctcacctctggcctctcatcccttccgtttatctaccgaacctcctaccggggctctctgtttgctgtgacagtggacaccctggccaagcagggtgcccaggggggtgggcagtggtggagtttgccaaaggatgtgccagcccctacagtgagtccccatgccatgggcaaggggcccaatttgctggcattacagctgagtgacagcaccctggccgacatcattgccaggctgcaggctgggcagaaactgtctggctcctcaccgtttagttctgcctttaactcactcagcctcgacaaggagagtggcctgcttatgttcaagggagataagaagcccagggtctgggtagtcccgacgcaactccggagggatctgattttctctgtgcatgacattcccttgggggcccaccagaggcccgaagagacctacaagaagttgcgtttgctggggtggtggcctgggatgcaggagcatgtgaaagattactgcaggagctgcttgttctgcatcccccgaaatctcataggcagcgagttgaaggttattgagtccccatggcccctcaggtcgaccgccccctggtcgaacctgcagatcgaggtggtgggcccggtcaccataagtgaggagggccataagcatgtacttattgtggctgacccaaacaccaggtgggtggaggcattccccctgaagccctacacacacacggctgtggcccaggtgctgcttcagcatgtgtttgcaaggtggggtgttcctgtgaggctggaggcagcccaggggccccagtttgcccggcacgtccttgtgagctgtgggctggccctgggagcccaggtggcctccctgagtcgggacctccagttcccctgcctgacgagctcaggggcctactgggaattcaagagggccctcaaggagttcatcttcctgcatgggaagaagtgggcggcctccctgcctttgctgcacctggccttcagggcctcctccactgatgccacaccgttcaaggtcctgaccgggggtgagtcaaggctcacggagcccctgtggtgggagatgagcagcgcaaacattgaagggctcaagatggacgtcttcctgctacagctggtgggggagctgctggagctccactggagggtggctgacaaggcgagtgaaaaggccgagaacaggcgtttcaagcgggagagccaggagaaggagtggaatgtgggtgaccaggtccttttgctgtccctccccaggaatggcagcagtgccaaatgggtgggtcccttctatatcggggaccggctgagcctgtcactctataggatatggggcttcccaaccccagagaagctggggtgcatctatcccagcagtctgatgaaggcctttgccaagagtggcaccccgctgtccttcaaggtcttggagcagtgagcgggagcagcgggggtgccccctgccccagggccgtgggtttctgctgctaggcctccccctgtcccagcagtgctctcagtccactgggggccctcagttgtgccttttgtagagaacttgcttcataaagctttgctgaattgccttgaactagggaccagcatccccatggaaacatccccagtttggggtacttggagaatttgccaaaggctgtcagatatgggtccctggcagttttacactgggaaatagagtgctcctctaggctataccaggctcagtgtcttctccccaagtatcctctttccccttcacatgtaggtgtgtggtggtgtgcacacacactcacgaaagaatctatcttggccatgaaactgtggctgttgaccttggaattggaaccacagtcctttcccatacagaaaccccaaatgtgggctcctccctccaacctgttcttttggggaccctttgcccttagagctgtcacagatgacataagcctgggcaggctgtggggaggccgctgcctcctagcctcacggtcagctttctcaagccaggtgtggcctgcacagctgtcagggcagggctggccatcctcccaggcctcaagggcagtgtcttggagtgggaggatggccagccacaagccaccagcttgtcagcatgggaagggcaagggggaaatgggttggcctacctcatttgactccagccaatggagacaattcctgacccctgctttgatggtgttgaccccacaggaatcaaggatcttgatgccaagtgtggcatctctacctgaagagctgcttctgttagacccaggggccccggcctctgttttaagggggcagggcgtctgcaacaggagtggcacacggtgaagtgctggcatggctctacctcccaacccctcccaaccccatcccaaagcctacagtcctctgctccttctacctccactgtatcctgcatcccagaccctacagattgtgtgattgcttcatctgtatcaccccccgagtcctgtggacctgccttctgtgtagagcaaaacccaggctccctcacagccattctttgcagagatcacccttgcagtgagtgtgagttccttccaggtgtgtgcgcgtacactcaccctctgaattgctgccgctgccaaggaagtgggctccaggtgaaggccagtgccacgtcactctggctggccttcttagtagtttcatttctccggaagctgagccagtctcctggtctagcccaggttgccagaacgcttggcattgcagagtgctagagccagtggagaacttgccaacttgattgttttacagcagaggaaagaggatcacagagggaaagtgattcacccaaagtcacacagcaagttcatggctgagctgagaccaggattaagcttcctgactcccagttcaccatgaaaagggttctggcaacaggttcaagctggagaatccttcaaaatgctacacccacattctctccaactcttcatctccctgatcttccagacaaactacctggatgttgcccttaaaccatttctagctgttaaccctatccagaaaaatgattgagtgatagctgagaagtggaaagtgtgggatttttggcaggtgctctctttcctccgccccccgcgccattctttctcttcctcctctctgtaatggtatgtccagcctcactctccctccctggtgctgtatgcgttccccctgttagctacatttgtgatcacatacccttcttttaagtgaatttttttcatttgatttgtcaataaacgaatcaaactgga

SEQ ID NO: 417304 - DNA, 429 bp, Homo sapiens
ccctccccagcagcagaaggaagccccagccatggtgtccgtgggagagagtcctggaccctttgtggacatggggaccctccagaacaggggcccagaaaattcaaagagattatctagcctgggagccactgggtccctgatcacagcccagagcacaccgcaggaggcagcaaaccagctggtacgggtcggttccaacaaccaagatggtatggacagtgctcaagaggaagggacagtgcaagccaccagcagccaggactccacgaaccacacacaagccttgttgaagcaaaggcaggtccagcctcactctccctccctggtgctgtatgcgttccccctgttagctacatttgtgatcacatacccttcttttaagtgaatttttttcatttgatttgtcaataaacgaatcaaactgga

SEQ ID NO: 417305 - DNA, 303 bp, Homo sapiens
cctgtccaaccggacgcattcacatgagtgctgaggtcatagcgttcgaatcgtgtgagtgagaacctctggtgattgagtgatagctgagaagtggaaagtgtgggatttttggcaggtgctctctttcctccgccccccgcgccattctttctcttcctcctctctgtaatggtatgtccagcctcactctccctccctggtgctgtatgcgttccccctgttagctacatttgtgatcacatacccttcttttaagtgaatttttttcatttgatttgtcaataaacgaatcaaactgga

SEQ ID NO: 417306 - DNA, 1911 bp, Homo sapiens
tgctacaaccccgggcaggaagagctcgtcgcggtagcagcggtcgaaggggaccaagctccagagggcgggcgcccgagccgtgcggggagcgggcggggcagccatgctcctgtctgggggcgatccttctcctgctccccttacacgccaacctatgcccacctggcagccgtggcctgcggcctggagcgctttggccagtccccactcccagtggttttcctcactcactgcaactggatcttcagcctcctgtgggagctcctgcccctctggagggctcggggcttcctctcctctgatggggctccactccctcacccaagcctgctctcctacattatatccctcacctctggcctctcatcccttccgtttatctaccgaacctcctaccggggctctctgtttgctgtgacagtggacaccctggccaagcagggtgcccaggggggtgggcagtggtggagtttgccaaaggatgtgccagcccctacagtgagtccccatgccatgggcaaggggcccaatttgctggcattacagctgagtgacagcaccctggccgacatcattgccaggctgcaggctgggcagaaactgtctggctcctcaccgtttagttctgcctttaactcactcagcctcgacaaggagagtggcctgcttatgttcaagggagataagaagcccagggtctgggtagtcccgacgcaactccggagggatctgattttctctgtgcatgacattcccttgggggcccaccagaggcccgaagagacctacaagaagttgcgtttgctggggtggtggcctgggatgcaggagcatgtgaaagattactgcaggagctgcttgttctgcatcccccgaaatctcataggcagcgagttgaaggttattgagggccccggcctctgttttaagggggcagggcgtctgcaacaggagtggcacacggtgaagtgctggcatggctctacctcccaacccctcccaaccccatcccaaagcctacagtcctctgctccttctacctccactgtatcctgcatcccagaccctacagattgtgtgattgcttcatctgtatcaccccccgagtcctgtggacctgccttctgtgtagagcaaaacccaggctccctcacagccattctttgcagagatcacccttgcagtgagtgtgagttccttccaggtgtgtgcgcgtacactcaccctctgaattgctgccgctgccaaggaagtgggctccaggtgaaggccagtgccacgtcactctggctggccttcttagtagtttcatttctccggaagctgagccagtctcctggtctagcccaggttgccagaacgcttggcattgcagagtgctagagccagtggagaacttgccaacttgattgttttacagcagaggaaagaggatcacagagggaaagtgattcacccaaagtcacacagcaagttcatggctgagctgagaccaggattaagcttcctgactcccagttcaccatgaaaagggttctggcaacaggttcaagctggagaatccttcaaaatgctacacccacattctctccaactcttcatctccctgatcttccagacaaactacctggatgttgcccttaaaccatttctagctgttaaccctatccagaaaaatgattgagtgatagctgagaagtggaaagtgtgggatttttggcaggtgctctctttcctccgccccccgcgccattctttctcttcctcctctctgtaatggtatgtccagcctcactctccctccctggtgctgtatgcgttccccctgttagctacatttgtgatcacatacccttcttttaagtgaatttttttcatttgatttgtcaataaacgaatcaaactgga

SEQ ID NO: 417307 - DNA, 5546 bp, Homo sapiens
aaacatcacctgcaggtcccaaaacacccaaagctcaagccgggcctgcagctacagtttccaaagcacctgcagcttccaaagcacctgcagctcccaaagtacctgtgacccccagagtctccagagctcccaaaacacctgcagctcagaaggtgcccacggatgcagggccaaccttggatgtagccagacttctgagtgaggtccagcctacatcaagggctagtgtctccttactgaagggccaggggcaggctggaaggcagggtccccagtccagtggcaccttggccctcagcagtaagcaccagtttcagatggaggggctcctgggggcttgggagggggccccaaggcagccacctcgccacctgcaagcgaacagcacagtgaccagcttccagaggtaccacgaggccctgaatacacccttcgagctgaacctgtcaggggaacctggaaaccaggggttgcggcgagtggtcatcgatggcagcagtgtggccatggtgcatggcctgcagcacttcttctcctgccgaggaattgccatggcagtgcagtttttctggaaccggggacaccgagaggtcactgtgtttgtacccacctggcagctgaagaagaaccggagggtgagagagagccactttctgacgaagctacactcgctcaagatgctttcaatcacaccctcccagcttgagaatggcaagaagatcaccacctacgattataggttcatggtaaagctggcagaggagacagatggcatcattgtcaccaatgagcagattcacatcctgatgaatagttccaagaaactgatggtcaaagatcgcttgctgcctttcacctttgcggggaatctcttcatggtgcctgatgaccccctgggccgtgatggccccaccttggatgagtttctgaagaagccaaacaggttggacactgacattggcaacttcctgaaggtgtggaagacccttcctcccagctcagccagtgtcactgagctgagtgatgacgctgactctgggcccctggagagtctgccgaatatggaagaagtcagggaagagaaggaggagaggcaggatgaggagcagagacaggggcagggcacacagaaggcggctgaggaggacgaccttgactcttcgctggccatcgacctcctgccaggggcagcttctccctacctgggcatcccctgggatggaaaggctccctgccagcaggttcttgcccacctggcccagctcaccatccccagcaacttcaccgcactctccttcttcatgggcttcatggactcccacagggatgccatcctgactatgaagccctagtgggccccctgcacagcctcctcaagcagaagcctgactggcagtgggaccaggagcatgaggaggccttcctggccctgaagcgagccctggtgtctgccctctgcctgatggcccccaactcccagctgcccttccgcctggaggtgaccgtgagccacgtggccctgacggccatcctccatcaggagcactcagggaggaagcaccccatagcctatacctcaaaacccctcctccctgatgaggagagccagggcccccagtcagggggtgacagcccctatgctgtggcctgggccctcaagcatttttcccgctgcattggagacaccccggtggtcctggacctttcctatgcctcccggaccactgcggaccctgaggtgcgggagggccgcagggtttccaaagcttggttgatccgatggtccctcttggttcaggacaaaggcaagagggccctggaattggccctcctccagggcctgctgggggagaaccgcctgctcacccccgcggcctccatgcctcgcttcttccaggttctgccgcctttctctgacctgtccacgttcgtctgcatccacatgtcgggctactgcttctaccgtgaggatgagtggtgtgctggctttggtctctatgttctatcgcccaccagcccccctgtctccctttccttctcctgctccccttacacgccaacctatgcccacctggcagccgtggcctgcggcctggagcgctttggccagtccccactcccagtggttttcctcactcactgcaactggatcttcagcctcctgtgggagctcctgcccctctggagggctcggggcttcctctcctctgatggggctccactccctcacccaagcctgctctcctacattatatccctcacctctggcctctcatcccttccgtttatctaccgaacctcctaccggggctctctgtttgctgtgacagtggacaccctggccaagcagggtgcccaggggggtgggcagtggtggagtttgccaaaggatgtgccagcccctacagtgagtccccatgccatgggcaaggggcccaatttgctggcattacagctgagtgacagcaccctggccgacatcattgccaggctgcaggctgggcagaaactgtctggctcctcaccgtttagttctgcctttaactcactcagcctcgacaaggagagtggcctgcttatgttcaagggagataagaagcccagggtctgggtagtcccgacgcaactccggagggatctgattttctctgtgcatgacattcccttgggggcccaccagaggcccgaagagacctacaagaagttgcgtttgctggggtggtggcctgggatgcaggagcatgtgaaagattactgcaggagctgcttgttctgcatcccccgaaatctcataggcagcgagttgaaggttattgagtccccatggcccctcaggtcgaccgccccctggtcgaacctgcagatcgaggtggtgggcccggtcaccataagtgaggagggccataagcatgtacttattgtggctgacccaaacaccaggtgggtggaggcattccccctgaagccctacacacacacggctgtggcccaggtgctgcttcagcatgtgtttgcaaggtggggtgttcctgtgaggctggaggcagcccaggggccccagtttgcccggcacgtccttgtgagctgtgggctggccctgggagcccaggtggcctccctgagtcgggacctccagttcccctgcctgacgagctcaggggcctactgggaattcaagagggccctcaaggagttcatcttcctgcatgggaagaagtgggcggcctccctgcctttgctgcacctggccttcagggcctcctccactgatgccacaccgttcaaggtcctgaccgggggtgagtcaaggctcacggagcccctgtggtgggagatgagcagcgcaaacattgaagggctcaagatggacgtcttcctgctacagctggtgggggagctgctggagctccactggagggtggctgacaaggcgagtgaaaaggccgagaacaggcgtttcaagcgggagagccaggagaaggagtggaatgtgggtgaccaggtccttttgctgtccctccccaggaatggcagcagtgccaaatgggtgggtcccttctatatcggggaccggctgagcctgtcactctataggatatggggcttcccaaccccagagaagctggggtgcatctatcccagcagtctgatgaaggcctttgccaagagtggcaccccgctgtccttcaaggtcttggagcagtgagcgggagcagcgggggtgccccctgccccagggccgtgggtttctgctgctaggcctccccctgtcccagcagtgctctcagtccactgggggccctcagttgtgccttttgtagagaacttgcttcataaagctttgctgaattgccttgaactagggaccagcatccccatggaaacatccccagtttggggtacttggagaatttgccaaaggctgtcagatatgggtccctggcagttttacactgggaaatagagtgctcctctaggctataccaggctcagtgtcttctccccaagtatcctctttccccttcacatgtaggtgtgtggtggtgtgcacacacactcacgaaagaatctatcttggccatgaaactgtggctgttgaccttggaattggaaccacagtcctttcccatacagaaaccccaaatgtgggctcctccctccaacctgttcttttggggaccctttgcccttagagctgtcacagatgacataagcctgggcaggctgtggggaggccgctgcctcctagcctcacggtcagctttctcaagccaggtgtggcctgcacagctgtcagggcagggctggccatcctcccaggcctcaagggcagtgtcttggagtgggaggatggccagccacaagccaccagcttgtcagcatgggaagggcaagggggaaatgggttggcctacctcatttgactccagccaatggagacaattcctgacccctgctttgatggtgttgaccccacaggaatcaaggatcttgatgccaagtgtggcatctctacctgaagagctgcttctgttagacccaggggccccggcctctgttttaagggggcagggcgtctgcaacaggagtggcacacggtgaagtgctggcatggctctacctcccaacccctcccaaccccatcccaaagcctacagtcctctgctccttctacctccactgtatcctgcatcccagaccctacagattgtgtgattgcttcatctgtatcaccccccgagtcctgtggacctgccttctgtgtagagcaaaacccaggctccctcacagccattctttgcagagatcacccttgcagtgagtgtgagttccttccaggtgtgtgcgcgtacactcaccctctgaattgctgccgctgccaaggaagtgggctccaggtgaaggccagtgccacgtcactctggctggccttcttagtagtttcatttctccggaagctgagccagtctcctggtctagcccaggttgccagaacgcttggcattgcagagtgctagagccagtggagaacttgccaacttgattgttttacagcagaggaaagaggatcacagagggaaagtgattcacccaaagtcacacagcaagttcatggctgagctgagaccaggattaagcttcctgactcccagttcaccatgaaaagggttctggcaacaggttcaagctggagaatccttcaaaatgctacacccacattctctccaactcttcatctccctgatcttccagacaaactacctggatgttgcccttaaaccatttctagctgttaaccctatccagaaaaatgattgagtgatagctgagaagtggaaagtgtgggatttttggcaggtgctctctttcctccgccccccgcgccattctttctcttcctcctctctgtaatggtatgtccagcctcactctccctccctggtgctgtatgcgttccccctgttagctacatttgtgatcacatacccttcttttaagtgaatttttttcatttgatttgtcaataaacgaatcaaactgga

SEQ ID NO: 417308 - DNA, 189 bp, Homo sapiens
  misc_feature (25)..(25): n is a, c, g, or t
  misc_feature (61)..(61): n is a, c, g, or t
gagcggaaggcgcaggccacagggngcagagcgcaaggccatggcgaggacgcggccccgncgggcgttccagagccggccggaccgaccctgcgggagcggcctccccggaccgtgggggtcctggcgggcgcgggggacacgaggggcgccggcaaagcagggggtcacccgggccccgcaccccct

SEQ ID NO: 417309 - DNA, 646 bp, Homo sapiens
gaatgcagcttcacctttccacatcactccagactagatgcgtaatcagtccctctgacactgctgctggaatagtaatctgacacctgccgtcagctgagggtccttggctattgactgtgcagagctgtgggagagtggacagcccagagacaaccggagaagcagatcttattactggaataattgcacctttgtgttccaacactgcacagtatttttctcaggagccaaaactggcttctaagattcttggattccaggctcaccattccaggcaaggtgatagggaattgtaataacttcaccttattcccggtatcagattaacatgcatgttggctttgaaagatgtggcatttccatccttagagtctatgaacatgtacggattatttatgggtgtagaggatgccccccaaagtaaagcagttctctcctttattcatcattcctcccacagcactgccaggctttgtcttctttgtctctaattgcagtgctaaagggaaatgtccccaggccagagcaaagaacctttaccttcaaatataccttggatcaaagagagaaagcccctgcatccctccatcagattgatagtgtgagacactttttctcttgattatgggtaccgtggacttga

SEQ ID NO: 417310 - DNA, 402 bp, Homo sapiens
tcaggcaatgctgagatcatgggctttgtcagggcttgcagatgtgctgcctatgacttcgttaacataattgattaggagctaggacatatttagtattaatcaggctgtttttagtgaggctgattatgccagtcctcttgatgcactattttagtctggaacttccttagaaccaagctgcaaaaagaaaaaaaaaataaaggctttatgtaaaaaggaggaactttcatgtggcactaaagtatgctgttatatttgaggaatacaattatatcaggtcaaaatgtaggagaatgtacatatttcaattttaatgttttttaaaagtagagctcatatagagactagattattaaatttgttcacaggagactagaaacaaataaaacttcattagta

SEQ ID NO: 417311 - DNA, 754 bp, Homo sapiens
cagcggggcacgtgagcgatggagaccatctggatctaccagttccgcctcatcgtgatcggggactccaccgtgggcaagtcctgcctcctgcaccgcttcacccagggccgcttccccgggctgcgctcccccgcctgcgaccccaccgtcggcgtggacttcttctcccgcctgctggagatcgagccgggcaagaggatcaagctacagctctgggacacggcgggacaggagcggttcagatcaataacccgatcttattaccgcaactcagttggtggatttttagtatttgacattactaaccgacgatcttttgaacatgtgaaagattggctagaagaagcaaaaatgtatgtacagccatttcggattgtatttctgctagtgggacataaatgtgatttagcttcacaacgtcaagttacaagggaagaagctgaaaaactgtcagcagactgtggaatgaagtatatagaaacctcagcaaaggatgctacaaatgttgaagaatccttcacaatcttgacgagagacatatatgaacttattaaaaagggagaaatttgtattcaggatggctgggaaggggttaaaagtggttttgttccaaatactgtgcattcttctgaggaagcagtaaagcccaggaaagaatgcttctgctgacttcaaacatgctgaagaactaacaggaacagattgggtgtcagttcaggataaataccaacattaacagcagaatgatgca

SEQ ID NO: 417312 - DNA, 573 bp, Homo sapiens
gaaaggaactctaggtctggttgccagattcagcaaatgaaaatacaggatgcccagttacatcaaatttcaataaacaatgaatcattctttcatctaagcatgttccatggagtttgtctgaaattcaaatgtaactgggtgtcctgtattttatctggcaactcttaactatagggccactcccatctctctgccctctgtcttgtcttcctctcatcatcaataggctgtctccctgcttccatttcccctctgatgcccatctctggaacaactgagctgtacctgtccatgtattcttatttaaaatcaattattggctgggcgcgttggctcacgcctctaatcccagcactttgggaggccaaggtgggtggatcacgaggtcaagagattgagatcttcttggccaacatggtgaaaccccatctctactaaaaatacaaaaattagttgggcgtggtgggaggctgagtcaggagaatcgcttgaacccgggaggcggaagttgcagtgagccaagatggcgccactacactccagcctggcgacagagcgaggcgccgtctc

SEQ ID NO: 417313 - DNA, 140 bp, Homo sapiens
gacggacgccttagcactcccctctcacgcctctgccttcggcctcagtgattggcgtctcctcaaggagccatgatttctttgtccattttttaaatgtgctgaggccctttaggagaaaaaccacgcagccaaatgag

SEQ ID NO: 417314 - DNA, 335 bp, Homo sapiens
  misc_feature (26)..(27): n is a, c, g, or t
gggttttaaagtttggggttttaaanncccttgggggaaagcccaaatttaaacaccccccttattattaaatttacctaaaatgggaaggggcttttagtcactgaaatatgcatcgtgtaacaaagatgaagaaaatacatggcttgtgcccatcataaaaaaagattcagactgaaggcttagctttggttttttcaattaagattgttctcctgtgcacagtgtcattgtttattagaacttcagactttcggtggggcgggcgtttatatttatttatgtgaaagtcaaattcatgtacagtaaatttgttataagaatattaaaaaaaa

SEQ ID NO: 417315 - DNA, 2239 bp, Homo sapiens
aaaatgctatgcctcctgttatccacagcctagagtttttatatttggaaagtttagaaaattctatcctcgtttctccttctttgaatggcacaaataaatacactacataaatttttctggtttgaaaggctctaggcgataactttattaattcaacctgaaaatatcaagccattaaattttgtccgggtagaataaatccctgtggcctcttttaaagcaatgtaggtctctgttgcccatggggcatatctgtgtcccaatccacaagagataggaccaacaaacaatgaatgtgcaacctaactctttctccttggaaagaagaaagtgtgcacgaagtagaggagggtgggcagaccctgccttgcccctcctgttacccccttctctgtcatttgttcctaactccatttcataggcaggctcagaatacctgagtctgaaaatatcaggataacacttgtgaattgtgacaatcactacaatgtcccatatctgaggagttttttttaatgctatttatccgctggacacgattgcacattagggctgcataatcctctaactctagggaaaaataaaaacttttgatttgtcttaagattcttctccaaggtcgcaaacaagaaattcccctccacaaccaagagatgtgcattttagtaacatcagatgtgttcttctgttttatcaactacttactcttcccacacgcttagttctaaatctaacctttcccccctcgaatagggggcaggggaggatgaggaaacactggaacaactgaacacccctgcccattttctccaagagccttttgtattctagcatatctgtgcaatcttttcttttttcttcacatgacactgtaagcttaggcctgaaataactgggaagagagatgcgtatcagaatttctccgcaagagctaaacaaaacatacatcttccttagcatgaattggactgggggcggagtgggagggcttggaggaaaggggaaagaagggactatatttgaataaatatgaataaatgtattagatacttttcacaatcagataacttttaaaaaggtcattttttatctttctaataatgtaagccttaataaaagcaaatcttagtcacaaatttgaggagactgcccaataataagtttacatgtatttgaactgaaaaattgttaaccatgcttttgctccaagatgtgtgaggccattcaggggctgtagggccctggatatacacacaaacaagtgtgtgtatatctggagccccacacattgtaataaacacagctgcatttatttgactatgtgatcccatgtacatgtaaaaacattcaaacaaacacactcagcggatttatttattgtgcaatggggcaattattcaaataaacatgctcaatgcaattatttgaatctcacattgcatgttcatcaatcatagcactaaaaaaaagagggggaaaaaacaccaaagaattcacatggggaaaaaatatatatatgaaaaccaccttattatagattttatagggcagctgaggttatggctcccttcttaactgtaactcaactattctgtattcaatgacatttgtttctaatgattaattggttcactcacttgatcatataatagcaaactttataaacctgtattgtgtagagatgtgaaatctctatatttcaagagcagaagagttctttctagacaccttacatcaagggacactggtccaattattatcgcttatataagcactcctataaattctgaaaaattttatacatgcaacaaaacattcctacatttgaagacattaagaaaaatcacaggtgactcatctgatcattctatatattaataaatattatgacatatatgtgaacacatcacaaatcatattggtgtaccaagaggcaatttatgcctctcttaagtatgtactgacataacctaatatactaaaatgggaaggggcttttagtcactgaaatatgcatcgtgtaacaaagatgaagaaaatacatggcttgtgcccatcataaaaaaagattcagactgaaggcttagctttggttttttcaattaagattgttctcctgtgcacagtgtcattgtttattagaacttcagactttcggtggggcgggcgtttatatttatttatgtgaaagtcaaattcatgtacagtaaatttgttataagaatattaaaaaaaa

SEQ ID NO: 417316 - DNA, 1597 bp, Homo sapiens
aaaatgctatgcctcctgttatccacagcctagagtttttatatttggaaagtttagaaaattctatcctcgtttctccttctttgaatggcacaaataaatacactacataaatttttctggtttgaaaggctctaggcgataactttattaattcaacctgaaaatatcaagccattaaattttgtccgggtagaataaatccctgtggcctcttttaaagcaatgtaggtctctgttgcccatggggcatatctgtgtcccaatccacaagagataggaccaacaaacaatgaatgtgcaacctaactctttctccttggaaagaagaaagtgtgcacgaagtagaggagggtgggcagaccctgccttgcccctcctgttacccccttctctgtcatttgttcctaactccatttcataggcaggctcagaatacctgagtctgaaaatatcaggataacacttgtgaattgtgacaatcactacaatgtcccatatctgaggagttttttttaatgctatttatccgctggacacgattgcacattagggctgcataatcctctaactctagggaaaaataaaaacttttgatttgtcttaagattcttctccaaggtcgcaaacaagaaattccccccacacattgtaataaacacagctgcatttatttgactatgtgatcccatgtacatgtaaaaacattcaaacaaacacactcagcggatttatttattgtgcaatggggcaattattcaaataaacatgctcaatgcaattatttgaatctcacattgcatgttcatcaatcatagcactaaaaaaaagagggggaaaaaacaccaaagaattcacatggggaaaaaatatatatatgaaaaccaccttattatagattttatagggcagctgaggttatggctcccttcttaactgtaactcaactattctgtattcaatgacatttgtttctaatgattaattggttcactcacttgatcatataatagcaaactttataaacctgtattgtgtagagatgtgaaatctctatatttcaagagcagaagagttctttctagacaccttacatcaagggacactggtccaattattatcgcttatataagcactcctataaattctgaaaaattttatacatgcaacaaaacattcctacatttgaagacattaagaaaaatcacaggtgactcatctgatcattctatatattaataaatattatgacatatatgtgaacacatcacaaatcatattggtgtaccaagaggcaatttatgcctctcttaagtatgtactgacataacctaatatactaaaatgggaaggggcttttagtcactgaaatatgcatcgtgtaacaaagatgaagaaaatacatggcttgtgcccatcataaaaaaagattcagactgaaggcttagctttggttttttcaattaagattgttctcctgtgcacagtgtcattgtttattagaacttcagactttcggtggggcgggcgtttatatttatttatgtgaaagtcaaattcatgtacagtaaatttgttataagaatattaaaaaaaa

SEQ ID NO: 417317 - DNA, 356 bp, Homo sapiens
atttaaattttcatttatttttatcaagatagggtctcactatgttgcccaggttggtctcaaacttttggcctaaagcaatcctcccaccttggcctcccaatgtgctgggattacaatgtgagccaccacgtccagcctcctgggatatttctcaatgaaacattggatgccaagattggttttgtgccacatgccaatttcacagaagccagtctatgagccaccagctctactcagcaattacagtttctggaactttggctaaattcctgtagatgcaccactgcttgtggcctgactctttgccacccaagtgcgctcagcctcccctggggagtctgccaggcttgcat

SEQ ID NO: 417318 - DNA, 1197 bp, Homo sapiens
atctgagatgaggggctcccagaggcttgggcaagtccagcggggggcatcgggaagaccctctctggtgctggtgttctgggacatgacactgactgtcccttatttgttaaaatttgcaatatctctcaagtaaataatagccaacatttgttgaatgctttcatgactcccgggctaaggcctttatgagcgttgtctcaaggggccccaacagccatcccacagggagggggataacagcccccatttatagataagggagctgaccggatgctctgagaagtggcaggtgttgaaggaaggataaagcagtgatgggccagaatccccaaggttcccttttttgttcatcaggcccttcctgagatgtgatttttaatcttttaactttttttaattaatagcaatgcgtggcctcatatttctatgaaccatttagtgatactcccgcttcctgcatgccacacactgtgctgggaattgctcatgggttgtcctgtttcatcttctccgtagccctgtgagatcggcaatattagtccccctacagccaaggaaactgcccagagccacacaactcttgaggggcgaggagggcttgaacctgagtctgcccagctccagaactgagcttgcagccattagccacagctgtctcctgcatgtctgagcaaagaaaggcctttacacagcatcaccctgtgccatcccatgcaccgtgggactcagctaaaggactgtgcaaagagggggctcctgagttggatttaggcaaaaggggcagaattcgtttgatttttagagaaaatctctggagagtttcttttgattcatagaattccttttagatttctttccagcataccaactagctttagtagtgctgctacaaccagctcttataagtaagagtgaaaaagtattcttttcttctttaaaaaataagtttttcttgcttatagttaattctagaaaggcaatactaaaggtatatatttttttcaaaatgctattttttactgcacttgataattatcctgacagctctgatctctgtaatagattcactcttcagctctgggcagaaccagaggcagggttcacaccaaatttgtaaataccatatgtgggtctggtgtccaggaacttttttctttctgttaaaaaaaagaaaaaaaaaagaaaaaaaaaaag

SEQ ID NO: 417319 - DNA, 5120 bp, Homo sapiens
ttttcttttttaaaataaaaaccatagatttcccaccctctttaatcccttctttttaaaaatgttctcttctctgctctacgtcctccctttacttcctcactgtgcagtctccctcaaggatctactgtgaaaggtgtgtttgtagtgatatccaacctaactcagtaacgaagtcgttacttagctcttagctgtgaaataactctggaaacttccccaccccaaccataaattcttacttataaagaaacaggtccccaaactggaaacagcttagtccaggcctcagcgagaaggaaggacaccatgactgctccatgctgggcacagccgggcagtcttgccaagtgcctgctggaggctgtgccggcaagaggcctgcagcaaggagattcccttccctcgggccattatcaatactgtctttatctggaggtggggaagcgcagccctctgagacagcaggacaatggtcagttcagagagggtgagggcagcaaacgcttcagaggacacagaagccagaggacccccccccgccccacagctgggtcagcctggaaaatccatctattagggactttttggcagccagatggcagcaatagcccattaggtctcatcccgagttccaagtcttggctgcaaatgagcctcagttcgccttactggagagcacccccagattcctgggcacagttcatttccagccctttctagatctgatcttttagggggaaagacagcttaaaatgttcttttcattttaaagaaaattattctgtctgcttaagttggaggctacttactctttcacctgacattttctttccttttattcttccagatcaggaatgaaatttccatgctgctcataaagataatattattgtactaattatttttattaccattgtaattatgatcattatgttgatattttagtcagggttttaaatgcacatttattccaagtatctttgtgttttctctttaatatttaaacttattctctctgtgagtatataagtagactggagggacatccagatgtccagttttgtcaggcaaaaaaaaaaaggaaagacttaggaagtaggaaaattgtttctgtcatctctatcccaacaagagacgtcaagaaagatccaccacagaacaaaagtttaaagaagaatcaaagccttgattgggcttctgacaacatggtcaccatcaaggttgtcattttctagatcccagaggcctgggatgcgacgtcaggtggcatctcatgggctcggggaatgtcgagtcactgactgtccagcccttagccagcttctctcccacatcctcagagctctcctgtgcttctgaaatctgttaactaaatctttggcttgcctctggtatttaagcaagaaaattccctcccagaggtgaccccatccgcttccccacaatccatccttttgccatcggcgcacctggggcgtggcttaggttcttcaatgcagggacatttgccccctcccagaagctgctgggcacagtgaggtggcgtaagagtgactggcaggtggtaccttccccaggaaatttcaccacaccacccagttcctcagcctgccccctccccctgtgatgcatgcccccagcacccaattctagccagctggaagtgggtggagggacagcaggaggccagagaaaccctgaacaaagctgggcggctgctcaggcatcacaggctgcaccccctctgaaagcatccccactgggctccggccacatcttcagtgcactgtgctgtgtgcgctgggtgctcacacgctgtccccagacccacaaagtgctaggccccagttgaagaaaggggtgaaatagccagcttcaccgaagggaagggaagggaagtattgggcgatgccagccccacagacgctcagcaaacattagtgcacattctcctagtcctcacccaatggcctcctctacccccatgcatggagctgccacatcagaagccccaagagaagctccctgcaggagaggccagctccctggatgcccaattgcatacctggccgaatctgccattgagtcaccttagcaaataggctgctgtcactaggaccaagctctcaagcagagggatgccaacctagtccttacttagcccacgaatcatctagagcatcctctagtcttttgtgggctccctccttcccatttgaagagacattgttcagaggaagaggggaagatttgaaatgtcaggtcacggaggagtgtttaactggagcctggtgaaccgcagggcaatttgcttctgctcactgggttctgactggcccgtctggacgtgggcccccatgtctctgtgcttagggcctcttcatgatgttttggatgtttccaagggaagtgggtgagcagatcaaggggtgggagagtcgaggcttgatgccagttaatactgtgaagtggagcgtgcggtcagtggaattcagaggaaaaagaagggttggagcaaagcggcattcatctcctggactgttagcctttctagtcttcctggtggctgaggtgttcacgggctgggggagccagctgacctttgtcctcttcaacctagaagactcagcccgcccagacaccaacgtgtgagacggatggacatcaggaagggaaggggagattagcccaactgctgacagaacgatttcccttggttggaccttgggaatggcaaacactcatattggaacaagcttggggtggaagatttaggccgtgtgagcgtgtgtgagtgagtggaacaaactttcttggaaactggagggaggagatgaggaggcttcgggaagtattactgatggctcatggttgagagagcgacgtggggacccagctcgccccagcttttgtcccaggttctctttgtctgatgctgagggcagggtggggtgtgggaccaccactcttgttggcctgtcaagtagaccctaggacagaaaatggaaagaaggaaatggctcggtgctctcaactagcagagagaattgaggagaggtaagggttccttctgcaggccagcctgggactccacagcgccagcaggagtgacttggccacaagacattccagccccagggactttgcaggcttcattccctgtctgtgtcttttccttctggtgtgttttacagacttctgatggggaagcttcaaacttgagcaggccagagatgtccttaccaaattggaaaggaaggtgaaactgttcctttctttagccaaagaacccttctcaaagacgcctccagaaatggacaaaatggccttcccttcgttcctttccaggcaataatgacatcattagtgatgcaattctatttgtctttctctttcctctctgtccttttttttaaaaaaaaaaaatgcatttatttcaaaactgtgctattcttttaagaggagtggaggtgaccccttcgatgctgctgctatcgggagacaaggtgccataccaatacgtgggcttgactaatcccaggccaccatgggagagagcaaagcagggctgccaggagttcagttgcatcaagggcgtagagcacgcgggggctgggctcggaatagcagtacttttccactttgatgccttagaactctcacttctcatctccacagaccagactcagtaaaatctcaggccactagagaatggaaggcggtgaaacaggatttaaatgcaaaaaaaacctattggaggcttttggcaccgtggctcactagagggacccagcatagtagaggtttctcttgttgcagcttctgaaaagttcaaaaaagaactccaggccgttcttccctcaaacccagtgagagtttgcagagaagtgccccctgcagggctcccgtcccagaacaccagcaccagagagggtcttcccgatgccccccgctggacttgcccaagcctctgggagcccctcatctcagatccctgtgttgaacatgacactgactgtcccttatttgttaaaatttgcaatatctctcaagtaaataatagccaacatttgttgaatgctttcatgactcccgggctaaggcctttatgagcgttgtctcaaggggccccaacagccatcccacagggagggggataacagcccccatttatagataagggagctgaccggatgctctgagaagtggcaggtgttgaaggaaggataaagcagtgatgggccagaatccccaaggttcccttttttgttcatcaggcccttcctgagatgtgatttttaatcttttaactttttttaattaatagcaatgcgtggcctcatatttctatgaaccatttagtgatactcccgcttcctgcatgccacacactgtgctgggaattgctcatgggttgtcctgtttcatcttctccgtagccctgtgagatcggcaatattagtccccctacagccaaggaaactgcccagagccacacaactcttgaggggcgaggagggcttgaacctgagtctgcccagctccagaactgagcttgcagccattagccacagctgtctcctgcatgtctgagcaaagaaaggcctttacacagcatcaccctgtgccatcccatgcaccgtgggactcagctaaaggactgtgcaaagagggggctcctgagttggatttaggcaaaaggggcagaattcgtttgatttttagagaaaatctctggagagtttcttttgattcatagaattccttttagatttctttccagcataccaactagctttagtagtgctgctacaaccagctcttataagtaagagtgaaaaagtattcttttcttctttaaaaaataagtttttcttgcttatagttaattctagaaaggcaatactaaaggtatatatttttttcaaaatgctattttttactgcacttgataattatcctgacagctctgatctctgtaatagattcactcttcagctctgggcagaaccagaggcagggttcacaccaaatttgtaaataccatatgtgggtctggtgtccaggaacttttttctttctgttaaaaaaaagaaaaaaaaaagaaaaaaaaaaag

SEQ ID NO: 417320 - DNA, 5067 bp, Homo sapiens
ttttcttttttaaaataaaaaccatagatttcccaccctctttaatcccttctttttaaaaatgttctcttctctgctctacgtcctccctttacttcctcactgtgcagtctccctcaaggatctactgtgaaaggtgtgtttgtagtgatatccaacctaactcagtaacgaagtcgttacttagctcttagctgtgaaataactctggaaacttccccaccccaaccataaattcttacttataaagaaacaggtccccaaactggaaacagcttagtccaggcctcagcgagaaggaaggacaccatgactgctccatgctgggcacagccgggcagtcttgccaagtgcctgctggaggctgtgccggcaagaggcctgcagcaaggagattcccttccctcgggccattatcaatactgtctttatctggaggtggggaagcgcagccctctgagacagcaggacaatggtcagttcagagagggtgagggcagcaaacgcttcagaggacacagaagccagaggacccccccccgccccacagctgggtcagcctggaaaatccatctattagggactttttggcagccagatggcagcaatagcccattaggtctcatcccgagttccaagtcttggctgcaaatgagcctcagttcgccttactggagagcacccccagattcctgggcacagttcatttccagccctttctagatctgatcttttagggggaaagacagcttaaaatgttcttttcattttaaagaaaattattctgtctgcttaagttggaggctacttactctttcacctgacattttctttccttttattcttccagatcaggaatgaaatttccatgctgctcataaagataatattattgtactaattatttttattaccattgtaattatgatcattatgttgatattttagtcagggttttaaatgcacatttattccaagtatctttgtgttttctctttaatatttaaacttattctctctgtgagtatataagtagactggagggacatccagatgtccagttttgtcaggcaaaaaaaaaaaggaaagacttaggaagtaggaaaattgtttctgtcatctctatcccaacaagagacgtcaagaaagatccaccacagaacaaaagtttaaagaagaatcaaagccttgattgggcttctgacaacatggtcaccatcaaggttgtcattttctagatcccagaggcctgggatgcgacgtcaggtggcatctcatgggctcggggaatgtcgagtcactgactgtccagcccttagccagcttctctcccacatcctcagagctctcctgtgcttctgaaatctgttaactaaatctttggcttgcctctggtatttaagcaagaaaattccctcccagaggtgaccccatccgcttccccacaatccatccttttgccatcggcgcacctggggcgtggcttaggttcttcaatgcagggacatttgccccctcccagaagctgctgggcacagtgaggtggcgtaagagtgactggcaggtggtaccttccccaggaaatttcaccacaccacccagttcctcagcctgccccctccccctgtgatgcatgcccccagcacccaattctagccagctggaagtgggtggagggacagcaggaggccagagaaaccctgaacaaagctgggcggctgctcaggcatcacaggctgcaccccctctgaaagcatccccactgggctccggccacatcttcagtgcactgtgctgtgtgcgctgggtgctcacacgctgtccccagacccacaaagtgctaggccccagttgaagaaaggggtgaaatagccagcttcaccgaagggaagggaagggaagtattgggcgatgccagccccacagacgctcagcaaacattagtgcacattctcctagtcctcacccaatggcctcctctacccccatgcatggagctgccacatcagaagccccaagagaagctccctgcaggagaggccagctccctggatgcccaattgcatacctggccgaatctgccattgagtcaccttagcaaataggctgctgtcactaggaccaagctctcaagcagagggatgccaacctagtccttacttagcccacgaatcatctagagcatcctctagtcttttgtgggctccctccttcccatttgaagagacattgttcagaggaagaggggaagatttgaaatgtcaggtcacggaggagtgtttaactggagcctggtgaaccgcagggcaatttgcttctgctcactgggttctgactggcccgtctggacgtgggcccccatgtctctgtgcttagggcctcttcatgatgttttggatgtttccaagggaagtgggtgagcagatcaaggggtgggagagtcgaggcttgatgccagttaatactgtgaagtggagcgtgcggtcagtggaattcagaggaaaaagaagggttggagcaaagcggcattcatctcctggactgttagcctttctagtcttcctggtggctgaggtgttcacgggctgggggagccagctgacctttgtcctcttcaacctagaagactcagcccgcccagacaccaacgtgtgagacggatggacatcaggaagggaaggggagattagcccaactgctgacagaacgatttcccttggttggaccttgggaatggcaaacactcatattggaacaagcttggggtggaagatttaggccgtgtgagcgtgtgtgagtgagtggaacaaactttcttggaaactggagggaggagatgaggaggcttcgggaagtattactgatggctcatggttgagagagcgacgtggggacccagctcgccccagcttttgtcccaggttctctttgtctgatgctgagggcagggtggggtgtgggaccaccactcttgttggcctgtcaagtagaccctaggacagaaaatggaaagaaggaaatggctcggtgctctcaactagcagagagaattgaggagaggtaagggttccttctgcaggccagcctgggactccacagcgccagcaggagtgacttggccacaagacattccagccccagggactttgcaggcttcattccctgtctgtgtcttttccttctggtgtgttttacagacttctgatggggaagcttcaaacttgagcaggccagagatgtccttaccaaattggaaaggaaggtgaaactgttcctttctttagccaaagaacccttctcaaagacgcctccagaaatggacaaaatggccttcccttcgttcctttccaggcaataatgacatcattagtgatgcaattctatttgtctttctctttcctctctgtccttttttttaaaaaaaaaaaatgcatttatttcaaaactgtgctattcttttaagaggagtggaggtgaccccttcgatgctgctgctatcgggagacaaggtgccataccaatacgtgggcttgactaatcccaggccaccatgggagagagcaaagcagggctgccaggagttcagttgcatcaagggcgtagagcacgcgggggctgggctcggaatagcagtacttttccactttgatgccttagaactctcacttctcatctccacagaccagactcagtaaaatctcaggccactagagaatggaaggcggtgaaacaggatttaaatgcaaaaaaaacctattggaggcttttggcaccgtggctcactagagggacccagcatagtagaggtttctcttgttgcagcttctgaaaagttcaaaaaagaactccaggccgttcttccctcaaacccagtgagagtttgcagagaagtgccccctgcagggctcccgtcccagaacaccagcaccagagagggtcttcccgatgccccccgctggacttgcccaagcctctgggagcccctcatctcagatccctgtgttgaacatgacactgactgtcccttattttttcatgactcccgggctaaggcctttatgagcgttgtctcaaggggccccaacagccatcccacagggagggggataacagcccccatttatagataagggagctgaccggatgctctgagaagtggcaggtgttgaaggaaggataaagcagtgatgggccagaatccccaaggttcccttttttgttcatcaggcccttcctgagatgtgatttttaatcttttaactttttttaattaatagcaatgcgtggcctcatatttctatgaaccatttagtgatactcccgcttcctgcatgccacacactgtgctgggaattgctcatgggttgtcctgtttcatcttctccgtagccctgtgagatcggcaatattagtccccctacagccaaggaaactgcccagagccacacaactcttgaggggcgaggagggcttgaacctgagtctgcccagctccagaactgagcttgcagccattagccacagctgtctcctgcatgtctgagcaaagaaaggcctttacacagcatcaccctgtgccatcccatgcaccgtgggactcagctaaaggactgtgcaaagagggggctcctgagttggatttaggcaaaaggggcagaattcgtttgatttttagagaaaatctctggagagtttcttttgattcatagaattccttttagatttctttccagcataccaactagctttagtagtgctgctacaaccagctcttataagtaagagtgaaaaagtattcttttcttctttaaaaaataagtttttcttgcttatagttaattctagaaaggcaatactaaaggtatatatttttttcaaaatgctattttttactgcacttgataattatcctgacagctctgatctctgtaatagattcactcttcagctctgggcagaaccagaggcagggttcacaccaaatttgtaaataccatatgtgggtctggtgtccaggaacttttttctttctgttaaaaaaaagaaaaaaaaaagaaaaaaaaaaag

SEQ ID NO: 417321 - DNA, 2118 bp, Homo sapiens
ttttcttttttaaaataaaaaccatagatttcccaccctctttaatcccttctttttaaaaatgttctcttctctgctctacgtcctccctttacttcctcactgtgcagtctccctcaaggatctactgtgaaaggtgtgtttgtagtgatatccaacctaactcagtaacgaagtcgttacttagctcttagctgtgaaataactctggaaacttccccaccccaaccataaattcttacttataaagaaacaggtccccaaactggaaacagcttagtccaggcctcagcgagaaggaaggacaccatgactgctccatgctgggcacagccgggcagtcttgccaagtgcctgctggaggctgtgccggcaagaggcctgcagcaaggagattcccttccctcgggccattatcaatactgtctttatctggaggtggggaagcgcagccctctgagacagcaggacaatggtcagttcagagagggtgagggcagcaaacgcttcagaggacacagaagccagaggacccccccccgccccacagctgggtcagcctggaaaatccatctattagggactttttggcagccagatggcagcaatagcccattaggtctcatcccgagttccaagtcttggctgcaaatgagcctcagttcgccttactggagagcacccccagattcctgggcacagttcatttccagccctttctagatctgatcttttagggggaaagacagcttaaaatgttcttttcattttaaagaaaattattctgtctgcttaagttggaggctacttactctttcacctgacattttctttccttttattcttccagatcaggaatgaaatttccatgctgctcataaagataatattattgtactaattatttttattaccattgtaattatgatcattatgttgatattttagtcagggttttaaatgcacatttattccaagtatctttgtgttttctctttaatatttaaacttattctctctgtgagtatataagtagactggagggacatccagatgtccagttttgtcaggcaaaaaaaaaaaggaaagacttaggaagtaggaaaattgtttctgtcatctctatcccaacaagagacgtcaagaaagatccaccacagaacaaaagtttaaagaagaatcaaagccttgattgggcttctgacaacatggtcaccatcaaggttgtcattttctagatcccagaggcctgggatgcgacgtcaggtggcatctcatgggctcggggaatgtcgagtcactgactgtccagcccttagccagcttctctcccacatcctcagagctctcctgtgcttctgaaatctgttaactaaatctttggcttgcctctggtatttaagcaagaaaattccctcccagaggtgaccccatccgcttccccacaatccatccttttgccatcggcgcacctggggcgtggcttaggttcttcaatgcagggacatttgccccctcccagaagctgctgggcacagtgaggtggcgtaagagtgactggcaggtggtaccttccccaggaaatttcaccacaccacccagttcctcagcctgccccctccccctgtgatgcatgcccccagcacccaattctagccagctggaagtgggtggagggacagcaggaggccagagaaaccctgaacaaagctgggcggctgctcaggcatcacaggctgcaccccctctgaaagcatccccactgggctccggccacatcttcagtgcactgtgctgtgtgcgctgggtgctcacacgctgtccccagacccacaaagtgctaggccccagttgaagaaaggggtgaaatagccagcttcaccgaagggaagggaagggaagtattgggcgatgccagccccacagacgctcagcaaacattagtgcacattctcctagtcctcacccaatggcctcctctacccccatgcatggagctgccacatcagaagccccaagagaagctccctgcaggagaggccagctccctggatgcccaattgcatacctggccgaatctgccattgagtctgtattaactgcttgggatcctctaga

SEQ ID NO: 417322 - DNA, 1207 bp, Homo sapiens
ttttcttttttaaaataaaaaccatagatttcccaccctctttaatcccttctttttaaaaatgttctcttctctgctctacgtcctccctttacttcctcactgtgcagtctccctcaaggatctactgtgaaaggtgtgtttgtagtgatatccaacctaactcagtaacgaagtcgttacttagctcttagctgtgaaataactctggaaacttccccaccccaaccataaattcttacttataaagaaacaggtccccaaactggaaacagcttagtccaggcctcagcgagaaggaaggacaccatgactgctccatgctgggcacagccgggcagtcttgccaagtgcctgctggaggctgtgccggcaagaggcctgcagcaaggagattcccttccctcgggccattatcaatactgtctttatctggaggtggggaagcgcagccctctgagacagcaggacaatggtcagttcagagagggtgagggcagcaaacgcttcagaggacacagaagccagaggacccccccccgccccacagctgggtcagcctggaaaatccatctattagggactttttggcagccagatggcagcaatagcccattaggtctcatcccgagttccaagtcttggctgcaaatgagcctcagttcgccttactggagagcacccccagattcctgggcacagttcatttccagccctttctagatctgatcttttagggggaaagacagcttaaaatgttcttttcattttaaagaaaattattctgtctgcttaagttggaggctacttactctttcacctgacattttctttccttttattcttccagatcaggaatgaaatttccatgctgctcataaagataatattattgtactaattatttttattaccattgtaattatgatcattatgttgatattttagtcagggttttaaatgcacatttattccaagtatctttgtgttttctctttaatatttaaacttattctctctgtgagtatataagtagactggagggacatccagatgtccagttttgtcaggcaaaaaaaaaaaaaaaaactcaaggggggcccgtacccaattcgccctatgggagtcggatacaataactggccgcggtttacacgccgggatgggaaaacccggcgttcccacttaatgcctggagacaaccctt

SEQ ID NO: 417323 - DNA, 5066 bp, Homo sapiens
ttttcttttttaaaataaaaaccatagatttcccaccctctttaatcccttctttttaaaaatgttctcttctctgctctacgtcctccctttacttcctcactgtgcagtctccctcaaggatctactgtgaaaggtgtgtttgtagtgatatccaacctaactcagtaacgaagtcgttacttagctcttagctgtgaaataactctggaaacttccccaccccaaccataaattcttacttataaagaaacaggtccccaaactggaaacagcttagtccaggcctcagcgagaaggaaggacaccatgactgctccatgctgggcacagccgggcagtcttgccaagtgcctgctggaggctgtgccggcaagaggcctgcagcaaggagattcccttccctcgggccattatcaatactgtctttatctggaggtggggaagcgcagccctctgagacagcaggacaatggtcagttcagagagggtgagggcagcaaacgcttcagaggacacagaagccagaggacccccccccgccccacagctgggtcagcctggaaaatccatctattagggactttttggcagccagatggcagcaatagcccattaggtctcatcccgagttccaagtcttggctgcaaatgagcctcagttcgccttactggagagcacccccagattcctgggcacagttcatttccagccctttctagatctgatcttttagggggaaagacagcttaaaatgttcttttcattttaaagaaaattattctgtctgcttaagttggaggctacttactctttcacctgacattttctttccttttattcttccagatcaggaatgaaatttccatgctgctcataaagataatattattgtactaattatttttattaccattgtaattatgatcattatgttgatattttagtcagggttttaaatgcacatttattccaagtatctttgtgttttctctttaatatttaaacttattctctctgtgagtatataagtagactggagggacatccagatgtccagttttgtcaggcaaaaaaaaaaaggaaagacttaggaagtaggaaaattgtttctgtcatctctatcccaacaagagacgtcaagaaagatccaccacagaacaaaagtttaaagaagaatcaaagccttgattgggcttctgacaacatggtcaccatcaaggttgtcattttctagatcccagaggcctgggatgcgacgtcaggtggcatctcatgggctcggggaatgtcgagtcactgactgtccagcccttagccagcttctctcccacatcctcagagctctcctgtgcttctgaaatctgttaactaaatctttggcttgcctctggtatttaagcaagaaaattccctcccagaggtgaccccatccgcttccccacaatccatccttttgccatcggcgcacctggggcgtggcttaggttcttcaatgcagggacatttgccccctcccagaagctgctgggcacagtgaggtggcgtaagagtgactggcaggtggtaccttccccaggaaatttcaccacaccacccagttcctcagcctgccccctccccctgtgatgcatgcccccagcacccaattctagccagctggaagtgggtggagggacagcaggaggccagagaaaccctgaacaaagctgggcggctgctcaggcatcacaggctgcaccccctctgaaagcatccccactgggctccggccacatcttcagtgcactgtgctgtgtgcgctgggtgctcacacgctgtccccagacccacaaagtgctaggccccagttgaagaaaggggtgaaatagccagcttcaccgaagggaagggaagggaagtattgggcgatgccagccccacagacgctcagcaaacattagtgcacattctcctagtcctcacccaatggcctcctctacccccatgcatggagctgccacatcagaagccccaagagaagctccctgcaggagaggccagctccctggatgcccaattgcatacctggccgaatctgccattgagtcaccttagcaaataggctgctgtcactaggaccaagctctcaagcagagggatgccaacctagtccttacttagcccacgaatcatctagagcatcctctagtcttttgtgggctccctccttcccatttgaagagacattgttcagaggaagaggggaagatttgaaatgtcaggtcacggaggagtgtttaactggagcctggtgaaccgcagggcaatttgcttctgctcactgggttctgactggcccgtctggacgtgggcccccatgtctctgtgcttagggcctcttcatgatgttttggatgtttccaagggaagtgggtgagcagatcaaggggtgggagagtcgaggcttgatgccagttaatactgtgaagtggagcgtgcggtcagtggaattcagaggaatcttcctggtggctgaggtgttcacgggctgggggagccagctgacctttgtcctcttcaacctagaagactcagcccgcccagacaccaacgtgtgagacggatggacatcaggaagggaaggggagattagcccaactgctgacagaacgatttcccttggttggaccttgggaatggcaaacactcatattggaacaagcttggggtggaagatttaggccgtgtgagcgtgtgtgagtgagtggaacaaactttcttggaaactggagggaggagatgaggaggcttcgggaagtattactgatggctcatggttgagagagcgacgtggggacccagctcgccccagcttttgtcccaggttctctttgtctgatgctgagggcagggtggggtgtgggaccaccactcttgttggcctgtcaagtagaccctaggacagaaaatggaaagaaggaaatggctcggtgctctcaactagcagagagaattgaggagaggtaagggttccttctgcaggccagcctgggactccacagcgccagcaggagtgacttggccacaagacattccagccccagggactttgcaggcttcattccctgtctgtgtcttttccttctggtgtgttttacagacttctgatggggaagcttcaaacttgagcaggccagagatgtccttaccaaattggaaaggaaggtgaaactgttcctttctttagccaaagaacccttctcaaagacgcctccagaaatggacaaaatggccttcccttcgttcctttccaggcaataatgacatcattagtgatgcaattctatttgtctttctctttcctctctgtccttttttttaaaaaaaaaaaatgcatttatttcaaaactgtgctattcttttaagaggagtggaggtgaccccttcgatgctgctgctatcgggagacaaggtgccataccaatacgtgggcttgactaatcccaggccaccatgggagagagcaaagcagggctgccaggagttcagttgcatcaagggcgtagagcacgcgggggctgggctcggaatagcagtacttttccactttgatgccttagaactctcacttctcatctccacagaccagactcagtaaaatctcaggccactagagaatggaaggcggtgaaacaggatttaaatgcaaaaaaaacctattggaggcttttggcaccgtggctcactagagggacccagcatagtagaggtttctcttgttgcagcttctgaaaagttcaaaaaagaactccaggccgttcttccctcaaacccagtgagagtttgcagagaagtgccccctgcagggctcccgtcccagaacaccagcaccagagagggtcttcccgatgccccccgctggacttgcccaagcctctgggagcccctcatctcagatccctgtgttgaacatgacactgactgtcccttatttgttaaaatttgcaatatctctcaagtaaataatagccaacatttgttgaatgctttcatgactcccgggctaaggcctttatgagcgttgtctcaaggggccccaacagccatcccacagggagggggataacagcccccatttatagataagggagctgaccggatgctctgagaagtggcaggtgttgaaggaaggataaagcagtgatgggccagaatccccaaggttcccttttttgttcatcaggcccttcctgagatgtgatttttaatcttttaactttttttaattaatagcaatgcgtggcctcatatttctatgaaccatttagtgatactcccgcttcctgcatgccacacactgtgctgggaattgctcatgggttgtcctgtttcatcttctccgtagccctgtgagatcggcaatattagtccccctacagccaaggaaactgcccagagccacacaactcttgaggggcgaggagggcttgaacctgagtctgcccagctccagaactgagcttgcagccattagccacagctgtctcctgcatgtctgagcaaagaaaggcctttacacagcatcaccctgtgccatcccatgcaccgtgggactcagctaaaggactgtgcaaagagggggctcctgagttggatttaggcaaaaggggcagaattcgtttgatttttagagaaaatctctggagagtttcttttgattcatagaattccttttagatttctttccagcataccaactagctttagtagtgctgctacaaccagctcttataagtaagagtgaaaaagtattcttttcttctttaaaaaataagtttttcttgcttatagttaattctagaaaggcaatactaaaggtatatatttttttcaaaatgctattttttactgcacttgataattatcctgacagctctgatctctgtaatagattcactcttcagctctgggcagaaccagaggcagggttcacaccaaatttgtaaataccatatgtgggtctggtgtccaggaacttttttctttctgttaaaaaaaagaaaaaaaaaagaaaaaaaaaaag

SEQ ID NO: 417324 - DNA, 1889 bp, Homo sapiens
ttttcttttttaaaataaaaaccatagatttcccaccctctttaatcccttctttttaaaaatgttctcttctctgctctacgtcctccctttacttcctcactgtgcagtctccctcaaggatctactgtgaaaggtgtgtttgtagtgatatccaacctaactcagtaacgaagtcgttacttagctcttagctgtgaaataactctggaaacttccccaccccaaccataaattcttacttataaagaaacaggtccccaaactggaaacagcttagtccaggcctcagcgagaaggaaggacaccatgactgctccatgctgggcacagccgggcagtcttgccaagtgcctgctggaggctgtgccggcaagaggcctgcagcaaggagattcccttccctcgggccattatcaatactgtctttatctggaggtggggaagcgcagccctctgagacagcaggacaatggtcagttcagagagggtgagggcagcaaacgcttcagaggacacagaagccagaggacccccccccgccccacagctgggtcagcctggaaaatccatctattagggactttttggcagccagatggcagcaatagcccattaggtctcatcccgagttccaagtcttggctgcaaatgagcctcagttcgccttactggagagcacccccagattcctgggcacagttcatttccagccctttctagatctgatcttttagggggaaagacagcttaaaatgttcttttcattttaaagaaaattattctgtctgcttaagttggaggctacttactctttcacctgacattttctttccttttattcttccagatcaggaatgaaatttccatgctgctcataaagataatattattgtactaattatttttattaccattgtaattatgatcattatgttgatattttagtcagggttttaaatgcacatttattccaagtatctttgtgttttctctttaatatttaaacttattctctctgtgagtatataagtagactggagggacatccagatgtccagttttgtcaggcaaaaaaaaaaaggaaagacttaggaagtaggaaaattgtttctgtcatctctatcccaacaagagacgtcaagaaagatccaccacagaacaaaagtttaaagaagaatcaaagccttgattgggcttctgacaacatggtcaccatcaaggttgtcattttctagatcccagaggcctgggatgcgacgtcaggtggcatctcatgggctcggggaatgtcgagtcactgactgtccagcccttagccagcttctctcccacatcctcagagctctcctgtgcttctgaaatctgttaactaaatctttggcttgcctctggtatttaagcaagaaaattccctcccagaggtgaccccatccgcttccccacaatccatccttttgccatcggcgcacctggggcgtggcttaggttcttcaatgcagggacatttgccccctcccagaagctgctgggcacagtgaggtggcgtaagagtgactggcaggtggtaccttccccaggaaatttcaccacaccacccagttcctcagcctgccccctccccctgtgatgcatgcccccagcacccaattctagccagctggaagtgggtggagggacagcaggaggccagagaaaccctgaacaaagctgggcggggtcagcatcagggggaccccttaaaaatcccagggcccgccatctcggacgggctgctcgggggccaagggcccaaacaagggtgcccgaggggcacccacggggaggacctcgtgcccccagaccaacacggaactaccagagccaccgaggcgaccaaccgagccatg

SEQ ID NO: 417325 - DNA, 530 bp, Homo sapiens
gcggccccatcctcatcctccctccctttacttcctcactgtgcagtctccctcaaggatctactgtgaaaggtgtgtttgtagtgatatccaacctaactcagtaacgaagtcgttacttagctcttagctgtgaaataactctggaaacttccccaccccaaccataaattcttacttataaagaaacaggtccccaaactggaaacagcttagtccaggcctcagcgagaaggaaggacaccatgactgctccatgctgggcacagccgggcagtcttgccaagtgcctgctggaggctgtgccggcaagaggcctgcagcaaggagattcccttccctcgggccattatcaatactgtctttatctggaggtggggaagcgcagccctctgagacagcaggacaatggtcagttcagagagggtgagggcagcaaacgcttcagaggacacagaagccagaggacccccccccgccccacagctgggtcagcctggaaaatccatctattagggactttttggcag

SEQ ID NO: 417326 - DNA, 807 bp, Homo sapiens
attgaaatggaaatgaaaacagccagtaacttatgtttcagaatgtttgtaacacacttcatggtgttcccataggcttgtgtttgtattatctgtgcattaatggtcctcatctgactcctgcattgtgtcttatttttctgcatggattggcataagaccattactaaaatttggcacctgtgagatgtttgatattatgaacaggaaacataatttaatgtatgaatagatgtgaatttgggatttcaaaatagatgaataacaactattttatagtaaagttattgaaatggaaatgaaaacagccagtaacttatgtttcagaatgtttgtaacacacttcatggtgttcccataggctttgctgtctagtcttatagtttgaggtttttttggtctgcatttttctttttgattacaaaatttataatttaataaatactagagtttatcaaaaaaaaaaaaaaaaagaaaaaaaaaaaaaaaaaaaaaaaaaaaaaaaaaaaaaaaagaaaaaaaaaaaaaaaaaaaaaaggaggggggggggccccgatgaaaaactccccagggggagaccagtatgaacaccaccaccatctgccaggaaacgggcggcccaacaagcggccgtatataaccgagagacggggggccgccataaacacagtgggggagcagcaactctccggtgcaatcttgggagacacacccggcggggggaactaggcgcacaccccgcagaataccgcgaggaacaaaacacggcgtatgcagacccgcgtgtcgccaacagccagcttctga

SEQ ID NO: 417327 - DNA, 2417 bp, Homo sapiens
ttctgttggaactgcactctttcagagcctctgggccctaatacaaagcaagcacactctaaagaagccagaagaatgcaagcagcgaagtcgccgctccccacaggcaagagagtaccggcagacagcggcgcgagacaggggcagaacgatgaggcgccggagttagctcgccggtgcgggtgcgggtgcgcggcgcgtcgcggcccctcctccgcgacgcgccgggtggtcacgtgacggccgcgcgcgttcccggcagctgcgggctccgaggccagagagaaaagactgcgaggtggccgcagctgtggccggagagcacaaagaatgaaccagcagtggaagagaaaatactgtaagctggctgactgctggtgaagaaaatgctttatttttgtggcaggcatctgtgggatctgtaatagaaatatattggagtaattcaagattctgtggttggcccttttgactgctctctctacaggtttaatttgggcatttactcattttcatggctccaaggaccatgtatgtgttggggatcttcaatattcatgttattttctcctttggtcttatatgattgttacctttatgaagctttagtgattacaaagcactttttttgtccatttttacctgagctttgtaaactctgatttgcaggatggctggctgtggtgaaattgatcattcaataaacatgcttcctacaaacaggaaagcgaacgagtcctgttctaatactgcaccttctttaaccgtccctgaatgtgccatttgtctgcaaacatgtgttcatccagtcagtctgccctgtaagcacgttttctgctatctatgtgtaaaaggagcttcatggcttggaaagcggtgtgctctttgtcgacaagaaattcccgaggatttccttgacaagccaaccttgttgtcaccagaagaactcaaggcagcaagtagaggaaatggtgaatatgcatggtattatgaaggaagaaatgggtggtggcagtacgatgagcgcactagtagagagctggaagatgctttttccaaaggtaaaaagaacactgaaatgttaattgctggctttctgtatgtcgctgatcttgaaaacatggttcaatataggagaaatgaacatggacgtcgcaggaagattaagcgagatataatagatataccaaagaagggagtagctggacttaggctagactgtgatgctaataccgtaaacctagcaagagagagctctgctgacggagcggacagtgtatcagcacagagtggagcttctgttcagcccctagtgtcttctgtaaggcccctaacatcagtagatggtcagttaacaagccctgcaacaccatcccctgatgcaagcacttctctggaagactcttttgctcatttacaactcagtggagacaacacagctgaaaggagtcataggggagaaggagaagaagatcatgaatcaccatcttcaggcagggtaccagcaccagacacctccattgaagaaactgaatcagatgccagtagtgatagtgaggatgtatctgcagttgttgcacagcactccttgacccaacagagacttttggtttctaatgcaaaccagacagtacccgatcgatcagatcgatcgggaactgatcgatcagtagcagggggtggaacagtgagtgtcagtgtcagatctagaaggcctgatggacagtgcacagtaactgaagtttaaataaaaatgtcttcagctccatgctcaaggttgaaagggttacctgtaaatttctgcccacataacattatactcatccctagtagtgcattttgggagttggggtgggaaggggtatgggaaggatagactcataattaaaatgtctaacatgtctctgttgagaaatttatttaatgtaaggaacttgggtgttaatagttgagagctgtttagtaataacccagttttcttgaggtctgtttactttatactttttaaaaacttctgtagttcttttggccagtgtgtttgtattatctgtgcattaatggtcctcatctgactcctgcattgtgtcttatttttctgcatggattggcataagaccattactaaaatttggcacctgtgagatgtttgatattatgaacaggaaacataatttaatgtatgaatagatgtgaatttgggatttcaaaatagatgaataacaactattttatagtaaagttattgaaatggaaatgaaaacagccagtaacttatgtttcagaatgtttgtaacacacttcatggtgttcccataggctttgctgtctagtcttatagtttgaggtttttttggtctgcatttttctttttgattacaaaatttataatttaataaatactagagtttatcaaaaaa

SEQ ID NO: 417328 - DNA, 2478 bp, Homo sapiens
ttctgttggaactgcactctttcagagcctctgggccctaatacaaagcaagcacactctaaagaagccagaagaatgcaagcagcgaagtcgccgctccccacaggcaagagagtaccggcagacagcggcgcgagacaggggcagaacgatgaggcgccggagttagctcgccggtgcgggtgcgggtgcgcggcgcgtcgcggcccctcctccgcgacgcgccgggtggtcacgtgacggccgcgcgcgttcccggcagctgcgggctccgaggccagagagaaaagactgcgaggtggccgcagctgtggccggagaggtgggagtcggagcgaggccctctcgggggagcagggtgaacgccggccactctaggatcctcactcggggagaggaggcatagctcgcggtgtcacctccagccgcaacgtactccgggtcggccttgcgctcggggcctgagaggggcggcggcggggtcaggggccgcacaaagaatgaaccagcagtggaagagaaaatactgtaagctggctgactgctggtgaagaaaatgctttatttttgtggcaggcatctgtgggatctgtaatagaaatgggatcttcaatattcatgttattttctcctttggtcttatatgattgttacctttatgaagctttagtgattacaaagcactttttttgtccatttttacctgagctttgtaaactctgatttgcaggatggctggctgtggtgaaattgatcattcaataaacatgcttcctacaaacaggaaagcgaacgagtcctgttctaatactgcaccttctttaaccgtccctgaatgtgccatttgtctgcaaacatgtgttcatccagtcagtctgccctgtaagcacgttttctgctatctatgtgtaaaaggagcttcatggcttggaaagcggtgtgctctttgtcgacaagaaattcccgaggatttccttgacaagccaaccttgttgtcaccagaagaactcaaggcagcaagtagaggaaatggtgaatatgcatggtattatgaaggaagaaatgggtggtggcagtacgatgagcgcactagtagagagctggaagatgctttttccaaaggtaaaaagaacactgaaatgttaattgctggctttctgtatgtcgctgatcttgaaaacatggttcaatataggagaaatgaacatggacgtcgcaggaagattaagcgagatataatagatataccaaagaagggagtagctggacttaggctagactgtgatgctaataccgtaaacctagcaagagagagctctgctgacggagcggacagtgtatcagcacagagtggagcttctgttcagcccctagtgtcttctgtaaggcccctaacatcagtagatggtcagttaacaagccctgcaacaccatcccctgatgcaagcacttctctggaagactcttttgctcatttacaactcagtggagacaacacagctgaaaggagtcataggggagaaggagaagaagatcatgaatcaccatcttcaggcagggtaccagcaccagacacctccattgaagaaactgaatcagatgccagtagtgatagtgaggatgtatctgcagttgttgcacagcactccttgacccaacagagacttttggtttctaatgcaaaccagacagtacccgatcgatcagatcgatcgggaactgatcgatcagtagcagggggtggaacagtgagtgtcagtgtcagatctagaaggcctgatggacagtgcacagtaactgaagtttaaataaaaatgtcttcagctccatgctcaaggttgaaagggttacctgtaaatttctgcccacataacattatactcatccctagtagtgcattttgggagttggggtgggaaggggtatgggaaggatagactcataattaaaatgtctaacatgtctctgttgagaaatttatttaatgtaaggaacttgggtgttaatagttgagagctgtttagtaataacccagttttcttgaggtctgtttactttatactttttaaaaacttctgtagttcttttggccagtgtgtttgtattatctgtgcattaatggtcctcatctgactcctgcattgtgtcttatttttctgcatggattggcataagaccattactaaaatttggcacctgtgagatgtttgatattatgaacaggaaacataatttaatgtatgaatagatgtgaatttgggatttcaaaatagatgaataacaactattttatagtaaagttattgaaatggaaatgaaaacagccagtaacttatgtttcagaatgtttgtaacacacttcatggtgttcccataggctttgctgtctagtcttatagtttgaggtttttttggtctgcatttttctttttgattacaaaatttataatttaataaatactagagtttatcaaaaaa

SEQ ID NO: 417329 - DNA, 2308 bp, Homo sapiens
ttctgttggaactgcactctttcagagcctctgggccctaatacaaagcaagcacactctaaagaagccagaagaatgcaagcagcgaagtcgccgctccccacaggcaagagagtaccggcagacagcggcgcgagacaggggcagaacgatgaggcgccggagttagctcgccggtgcgggtgcgggtgcgcggcgcgtcgcggcccctcctccgcgacgcgccgggtggtcacgtgacggccgcgcgcgttcccggcagctgcgggctccgaggccagagagaaaagactgcgaggtggccgcagctgtggccggagagcacaaagaatgaaccagcagtggaagagaaaatactgtaagctggctgactgctggtgaagaaaatgctttatttttgtggcaggcatctgtgggatctgtaatagaaatgggatcttcaatattcatgttattttctcctttggtcttatatgattgttacctttatgaagctttagtgattacaaagcactttttttgtccatttttacctgagctttgtaaactctgatttgcaggatggctggctgtggtgaaattgatcattcaataaacatgcttcctacaaacaggaaagcgaacgagtcctgttctaatactgcaccttctttaaccgtccctgaatgtgccatttgtctgcaaacatgtgttcatccagtcagtctgccctgtaagcacgttttctgctatctatgtgtaaaaggagcttcatggcttggaaagcggtgtgctctttgtcgacaagaaattcccgaggatttccttgacaagccaaccttgttgtcaccagaagaactcaaggcagcaagtagaggaaatggtgaatatgcatggtattatgaaggaagaaatgggtggtggcagtacgatgagcgcactagtagagagctggaagatgctttttccaaaggtaaaaagaacactgaaatgttaattgctggctttctgtatgtcgctgatcttgaaaacatggttcaatataggagaaatgaacatggacgtcgcaggaagattaagcgagatataatagatataccaaagaagggagtagctggacttaggctagactgtgatgctaataccgtaaacctagcaagagagagctctgctgacggagcggacagtgtatcagcacagagtggagcttctgttcagcccctagtgtcttctgtaaggcccctaacatcagtagatggtcagttaacaagccctgcaacaccatcccctgatgcaagcacttctctggaagactcttttgctcatttacaactcagtggagacaacacagctgaaaggagtcataggggagaaggagaagaagatcatgaatcaccatcttcaggcagggtaccagcaccagacacctccattgaagaaactgaatcagatgccagtagtgatagtgaggatgtatctgcagttgttgcacagcactccttgacccaacagagacttttggtttctaatgcaaaccagacagtacccgatcgatcagatcgatcgggaactgatcgatcagtagcagggggtggaacagtgagtgtcagtgtcagatctagaaggcctgatggacagtgcacagtaactgaagtttaaataaaaatgtcttcagctccatgctcaaggttgaaagggttacctgtaaatttctgcccacataacattatactcatccctagtagtgcattttgggagttggggtgggaaggggtatgggaaggatagactcataattaaaatgtctaacatgtctctgttgagaaatttatttaatgtaaggaacttgggtgttaatagttgagagctgtttagtaataacccagttttcttgaggtctgtttactttatactttttaaaaacttctgtagttcttttggccagtgtgtttgtattatctgtgcattaatggtcctcatctgactcctgcattgtgtcttatttttctgcatggattggcataagaccattactaaaatttggcacctgtgagatgtttgatattatgaacaggaaacataatttaatgtatgaatagatgtgaatttgggatttcaaaatagatgaataacaactattttatagtaaagttattgaaatggaaatgaaaacagccagtaacttatgtttcagaatgtttgtaacacacttcatggtgttcccataggctttgctgtctagtcttatagtttgaggtttttttggtctgcatttttctttttgattacaaaatttataatttaataaatactagagtttatcaaaaaa

SEQ ID NO: 417330 - DNA, 2180 bp, Homo sapiens
ttctgttggaactgcactctttcagagcctctgggccctaatacaaagcaagcacactctaaagaagccagaagaatgcaagcagcgaagtcgccgctccccacaggcaagagagtaccggcagacagcggcgcgagacaggggcagaacgatgaggcgccggagttagctcgccggtgcgggtgcgggtgcgcggcgcgtcgcggcccctcctccgcgacgcgccgggtggtcacgtgacggccgcgcgcgttcccggcagctgcgggctccgaggccagagagaaaagactgcgaggtggccgcagctgtggccggagagcacaaagaatgaaccagcagtggaagagaaaatactgtaagctggctgactgctggtgaagaaaatgctttatttttgtggcaggcatctgtgggatctgtaatagaaatgatggctggctgtggtgaaattgatcattcaataaacatgcttcctacaaacaggaaagcgaacgagtcctgttctaatactgcaccttctttaaccgtccctgaatgtgccatttgtctgcaaacatgtgttcatccagtcagtctgccctgtaagcacgttttctgctatctatgtgtaaaaggagcttcatggcttggaaagcggtgtgctctttgtcgacaagaaattcccgaggatttccttgacaagccaaccttgttgtcaccagaagaactcaaggcagcaagtagaggaaatggtgaatatgcatggtattatgaaggaagaaatgggtggtggcagtacgatgagcgcactagtagagagctggaagatgctttttccaaaggtaaaaagaacactgaaatgttaattgctggctttctgtatgtcgctgatcttgaaaacatggttcaatataggagaaatgaacatggacgtcgcaggaagattaagcgagatataatagatataccaaagaagggagtagctggacttaggctagactgtgatgctaataccgtaaacctagcaagagagagctctgctgacggagcggacagtgtatcagcacagagtggagcttctgttcagcccctagtgtcttctgtaaggcccctaacatcagtagatggtcagttaacaagccctgcaacaccatcccctgatgcaagcacttctctggaagactcttttgctcatttacaactcagtggagacaacacagctgaaaggagtcataggggagaaggagaagaagatcatgaatcaccatcttcaggcagggtaccagcaccagacacctccattgaagaaactgaatcagatgccagtagtgatagtgaggatgtatctgcagttgttgcacagcactccttgacccaacagagacttttggtttctaatgcaaaccagacagtacccgatcgatcagatcgatcgggaactgatcgatcagtagcagggggtggaacagtgagtgtcagtgtcagatctagaaggcctgatggacagtgcacagtaactgaagtttaaataaaaatgtcttcagctccatgctcaaggttgaaagggttacctgtaaatttctgcccacataacattatactcatccctagtagtgcattttgggagttggggtgggaaggggtatgggaaggatagactcataattaaaatgtctaacatgtctctgttgagaaatttatttaatgtaaggaacttgggtgttaatagttgagagctgtttagtaataacccagttttcttgaggtctgtttactttatactttttaaaaacttctgtagttcttttggccagtgtgtttgtattatctgtgcattaatggtcctcatctgactcctgcattgtgtcttatttttctgcatggattggcataagaccattactaaaatttggcacctgtgagatgtttgatattatgaacaggaaacataatttaatgtatgaatagatgtgaatttgggatttcaaaatagatgaataacaactattttatagtaaagttattgaaatggaaatgaaaacagccagtaacttatgtttcagaatgtttgtaacacacttcatggtgttcccataggctttgctgtctagtcttatagtttgaggtttttttggtctgcatttttctttttgattacaaaatttataatttaataaatactagagtttatcaaaaaa

SEQ ID NO: 417331 - DNA, 2350 bp, Homo sapiens
ttctgttggaactgcactctttcagagcctctgggccctaatacaaagcaagcacactctaaagaagccagaagaatgcaagcagcgaagtcgccgctccccacaggcaagagagtaccggcagacagcggcgcgagacaggggcagaacgatgaggcgccggagttagctcgccggtgcgggtgcgggtgcgcggcgcgtcgcggcccctcctccgcgacgcgccgggtggtcacgtgacggccgcgcgcgttcccggcagctgcgggctccgaggccagagagaaaagactgcgaggtggccgcagctgtggccggagaggtgggagtcggagcgaggccctctcgggggagcagggtgaacgccggccactctaggatcctcactcggggagaggaggcatagctcgcggtgtcacctccagccgcaacgtactccgggtcggccttgcgctcggggcctgagaggggcggcggcggggtcaggggccgcacaaagaatgaaccagcagtggaagagaaaatactgtaagctggctgactgctggtgaagaaaatgctttatttttgtggcaggcatctgtgggatctgtaatagaaatgatggctggctgtggtgaaattgatcattcaataaacatgcttcctacaaacaggaaagcgaacgagtcctgttctaatactgcaccttctttaaccgtccctgaatgtgccatttgtctgcaaacatgtgttcatccagtcagtctgccctgtaagcacgttttctgctatctatgtgtaaaaggagcttcatggcttggaaagcggtgtgctctttgtcgacaagaaattcccgaggatttccttgacaagccaaccttgttgtcaccagaagaactcaaggcagcaagtagaggaaatggtgaatatgcatggtattatgaaggaagaaatgggtggtggcagtacgatgagcgcactagtagagagctggaagatgctttttccaaaggtaaaaagaacactgaaatgttaattgctggctttctgtatgtcgctgatcttgaaaacatggttcaatataggagaaatgaacatggacgtcgcaggaagattaagcgagatataatagatataccaaagaagggagtagctggacttaggctagactgtgatgctaataccgtaaacctagcaagagagagctctgctgacggagcggacagtgtatcagcacagagtggagcttctgttcagcccctagtgtcttctgtaaggcccctaacatcagtagatggtcagttaacaagccctgcaacaccatcccctgatgcaagcacttctctggaagactcttttgctcatttacaactcagtggagacaacacagctgaaaggagtcataggggagaaggagaagaagatcatgaatcaccatcttcaggcagggtaccagcaccagacacctccattgaagaaactgaatcagatgccagtagtgatagtgaggatgtatctgcagttgttgcacagcactccttgacccaacagagacttttggtttctaatgcaaaccagacagtacccgatcgatcagatcgatcgggaactgatcgatcagtagcagggggtggaacagtgagtgtcagtgtcagatctagaaggcctgatggacagtgcacagtaactgaagtttaaataaaaatgtcttcagctccatgctcaaggttgaaagggttacctgtaaatttctgcccacataacattatactcatccctagtagtgcattttgggagttggggtgggaaggggtatgggaaggatagactcataattaaaatgtctaacatgtctctgttgagaaatttatttaatgtaaggaacttgggtgttaatagttgagagctgtttagtaataacccagttttcttgaggtctgtttactttatactttttaaaaacttctgtagttcttttggccagtgtgtttgtattatctgtgcattaatggtcctcatctgactcctgcattgtgtcttatttttctgcatggattggcataagaccattactaaaatttggcacctgtgagatgtttgatattatgaacaggaaacataatttaatgtatgaatagatgtgaatttgggatttcaaaatagatgaataacaactattttatagtaaagttattgaaatggaaatgaaaacagccagtaacttatgtttcagaatgtttgtaacacacttcatggtgttcccataggctttgctgtctagtcttatagtttgaggtttttttggtctgcatttttctttttgattacaaaatttataatttaataaatactagagtttatcaaaaaa

SEQ ID NO: 417332 - DNA, 1964 bp, Homo sapiens
ttctgttggaactgcactctttcagagcctctgggccctaatacaaagcaagcacactctaaagaagccagaagaatgcaagcagcgaagtcgccgctccccacagcacaaagaatgaaccagcagtggaagagaaaatactgtaagctggctgactgctggtgaagaaaatgctttatttttgtggcaggcatctgtgggatctgtaatagaaatgatggctggctgtggtgaaattgatcattcaataaacatgcttcctacaaacaggaaagcgaacgagtcctgttctaatactgcaccttctttaaccgtccctgaatgtgccatttgtctgcaaacatgtgttcatccagtcagtctgccctgtaagcacgttttctgctatctatgtgtaaaaggagcttcatggcttggaaagcggtgtgctctttgtcgacaagaaattcccgaggatttccttgacaagccaaccttgttgtcaccagaagaactcaaggcagcaagtagaggaaatggtgaatatgcatggtattatgaaggaagaaatgggtggtggcagtacgatgagcgcactagtagagagctggaagatgctttttccaaaggtaaaaagaacactgaaatgttaattgctggctttctgtatgtcgctgatcttgaaaacatggttcaatataggagaaatgaacatggacgtcgcaggaagattaagcgagatataatagatataccaaagaagggagtagctggacttaggctagactgtgatgctaataccgtaaacctagcaagagagagctctgctgacggagcggacagtgtatcagcacagagtggagcttctgttcagcccctagtgtcttctgtaaggcccctaacatcagtagatggtcagttaacaagccctgcaacaccatcccctgatgcaagcacttctctggaagactcttttgctcatttacaactcagtggagacaacacagctgaaaggagtcataggggagaaggagaagaagatcatgaatcaccatcttcaggcagggtaccagcaccagacacctccattgaagaaactgaatcagatgccagtagtgatagtgaggatgtatctgcagttgttgcacagcactccttgacccaacagagacttttggtttctaatgcaaaccagacagtacccgatcgatcagatcgatcgggaactgatcgatcagtagcagggggtggaacagtgagtgtcagtgtcagatctagaaggcctgatggacagtgcacagtaactgaagtttaaataaaaatgtcttcagctccatgctcaaggttgaaagggttacctgtaaatttctgcccacataacattatactcatccctagtagtgcattttgggagttggggtgggaaggggtatgggaaggatagactcataattaaaatgtctaacatgtctctgttgagaaatttatttaatgtaaggaacttgggtgttaatagttgagagctgtttagtaataacccagttttcttgaggtctgtttactttatactttttaaaaacttctgtagttcttttggccagtgtgtttgtattatctgtgcattaatggtcctcatctgactcctgcattgtgtcttatttttctgcatggattggcataagaccattactaaaatttggcacctgtgagatgtttgatattatgaacaggaaacataatttaatgtatgaatagatgtgaatttgggatttcaaaatagatgaataacaactattttatagtaaagttattgaaatggaaatgaaaacagccagtaacttatgtttcagaatgtttgtaacacacttcatggtgttcccataggctttgctgtctagtcttatagtttgaggtttttttggtctgcatttttctttttgattacaaaatttataatttaataaatactagagtttatcaaaaaa

SEQ ID NO: 417333 - DNA, 2533 bp, Homo sapiens
ttctgttggaactgcactctttcagagcctctgggccctaatacaaagcaagcacactctaaagaagccagaagaatgcaagcagcgaagtcgccgctccccacaggcaagagagtaccggcagacagcggcgcgagacaggggcagaacgatgaggcgccggagttagctcgccggtgcgggtgcgggtgcgcggcgcgtcgcggcccctcctccgcgacgcgccgggtggtcacgtgacggccgcgcgcgttcccggcagctgcgggctccgaggccagagagaaaagactgcgaggtggccgcagctgtggccggagaggtgggagtcggagcgaggccctctcgggggagcagggtgaacgccggccactctaggatcctcactcggggagaggaggcatagctcgcggtgtcacctccagccgcaacgtactccgggtcggccttgcgctcggggcctgagaggggcggcggcggggtcaggggccgcacaaagaatgaaccagcagtggaagagaaaatactgtaagctggctgactgctggtgaagaaaatgctttatttttgtggcaggcatctgtgggatctgtaatagaaatatattggagtaattcaagattctgtggttggcccttttgactgctctctctacaggtttaatttgggcatttactcattttcatggctccaaggaccatgtatgtgttggggatcttcaatattcatgttattttctcctttggtcttatatgattgttacctttatgaagctttagtgattacaaagcactttttttgtccatttttacctgagctttgtaaactctgatttgcaggatggctggctgtggtgaaattgatcattcaataaacatgcttcctacaaacaggaaagcgaacgagtcctgttctaatactgcaccttctttaaccgtccctgaatgtgccatttgtctgcaaacatgtgttcatccagtcagtctgccctgtaagcacgttttctgctatctatgtgtaaaaggagcttcatggcttggaaagcggtgtgctctttgtcgacaagaaattcccgaggatttccttgacaagccaaccttgttgtcaccagaagaactcaaggcagcaagtagaggaaatggtgaatatgcatggtattatgaaggaagaaatgggtggtggcagtacgatgagcgcactagtagagagctggaagatgctttttccaaaggtaaaaagaacactgaaatgttaattgctggctttctgtatgtcgctgatcttggagatataatagatataccaaagaagggagtagctggacttaggctagactgtgatgctaataccgtaaacctagcaagagagagctctgctgacggagcggacagtgtatcagcacagagtggagcttctgttcagcccctagtgtcttctgtaaggcccctaacatcagtagatggtcagttaacaagccctgcaacaccatcccctgatgcaagcacttctctggaagactcttttgctcatttacaactcagtggagacaacacagctgaaaggagtcataggggagaaggagaagaagatcatgaatcaccatcttcaggcagggtaccagcaccagacacctccattgaagaaactgaatcagatgccagtagtgatagtgaggatgtatctgcagttgttgcacagcactccttgacccaacagagacttttggtttctaatgcaaaccagacagtacccgatcgatcagatcgatcgggaactgatcgatcagtagcagggggtggaacagtgagtgtcagtgtcagatctagaaggcctgatggacagtgcacagtaactgaagtttaaataaaaatgtcttcagctccatgctcaaggttgaaagggttacctgtaaatttctgcccacataacattatactcatccctagtagtgcattttgggagttggggtgggaaggggtatgggaaggatagactcataattaaaatgtctaacatgtctctgttgagaaatttatttaatgtaaggaacttgggtgttaatagttgagagctgtttagtaataacccagttttcttgaggtctgtttactttatactttttaaaaacttctgtagttcttttggccagtgtgtttgtattatctgtgcattaatggtcctcatctgactcctgcattgtgtcttatttttctgcatggattggcataagaccattactaaaatttggcacctgtgagatgtttgatattatgaacaggaaacataatttaatgtatgaatagatgtgaatttgggatttcaaaatagatgaataacaactattttatagtaaagttattgaaatggaaatgaaaacagccagtaacttatgtttcagaatgtttgtaacacacttcatggtgttcccataggctttgctgtctagtcttatagtttgaggtttttttggtctgcatttttctttttgattacaaaatttataatttaataaatactagagtttatcaaaaaa

SEQ ID NO: 417334 - DNA, 772 bp, Homo sapiens
ttctgttggaactgcactctttcagagcctctgggccctaatacaaagcaagcacactctaaagaagccagaagaatgcaagcagcgaagtcgccgctccccacaggcaagagagtaccggcagacagcggcgcgagacaggggcagaacgatgaggcgccggagttagctcgccggtgcgggtgcgggtgcgcggcgcgtcgcggcccctcctccgcgacgcgccgggtggtcacgtgacggccgcgcgcgttcccggcagctgcgggctccgaggccagagagaaaagactgcgaggtggccgcagctgtggccggagagcacaaagaatgaaccagcagtggaagagaaaatactgtaagctggctgactgctggtgaagaaaatgctttatttttgtggcaggcatctgtgggatctgtaatagaaatgtaagtgtagcatcatggtttttttcagtgctgcagtaaattaaatggattggtttaacgtgtggtaaattgagtatctgtcatatgtagttttaattatattaaatgagcattttcttttgacttataggtgctttattaacaatttatttacattaagttatcgttaatgtagatttccaagtctcctcaaaaggaaaagtctctataagaaaaactgaagacacaggagtttgctcaaagaatgctgaaatagatctccaggtcctctgggttctaccttctttttacataataattttcttaaataactaagctaggcaagtagtactagcttttg

SEQ ID NO: 417335 - DNA, 203 bp, Homo sapiens
ccaaggtatgtacaagtagatgcttacaaaaaattttcatcggttggagagtttttcctctactttcatcttcatatccccattgtctagtatgtggcttgcatataatgcacatcataggtggttagtgttttcataattgttaaattaagatattgcaagaattaaaacatgactttaatattatatgtattttttcttag

SEQ ID NO: 417336 - DNA, 403 bp, Homo sapiens
tagacatagttttacttcctccttacccgtctgtatgcctttatctcttttccctaatttgctctgctagaacttacagtcatgttgaatagcagtggtaaaagcatgcatcttgtctttaatttttcccacttttaagataaagttttccactgaattttttgaaaggattatacataattaactgattctcttgatcttaattactctttttttcttttgcagcacaaagaatgaaccagcagtggaagagaaaatactgtaagctggctgactgctggtgaagaaaatgctttatttttgtggcaggcatctgtgggatctgtaatagaaatgtaagtgtagcatcatggtttttttcagtgctgcagtaaattaaatggattggtttaacgtgtggtaa

SEQ ID NO: 417337 - DNA, 2587 bp, Homo sapiens
ttctgttggaactgcactctttcagagcctctgggccctaatacaaagcaagcacactctaaagaagccagaagaatgcaagcagcgaagtcgccgctccccacaggcaagagagtaccggcagacagcggcgcgagacaggggcagaacgatgaggcgccggagttagctcgccggtgcgggtgcgggtgcgcggcgcgtcgcggcccctcctccgcgacgcgccgggtggtcacgtgacggccgcgcgcgttcccggcagctgcgggctccgaggccagagagaaaagactgcgaggtggccgcagctgtggccggagaggtgggagtcggagcgaggccctctcgggggagcagggtgaacgccggccactctaggatcctcactcggggagaggaggcatagctcgcggtgtcacctccagccgcaacgtactccgggtcggccttgcgctcggggcctgagaggggcggcggcggggtcaggggccgcacaaagaatgaaccagcagtggaagagaaaatactgtaagctggctgactgctggtgaagaaaatgctttatttttgtggcaggcatctgtgggatctgtaatagaaatatattggagtaattcaagattctgtggttggcccttttgactgctctctctacaggtttaatttgggcatttactcattttcatggctccaaggaccatgtatgtgttggggatcttcaatattcatgttattttctcctttggtcttatatgattgttacctttatgaagctttagtgattacaaagcactttttttgtccatttttacctgagctttgtaaactctgatttgcaggatggctggctgtggtgaaattgatcattcaataaacatgcttcctacaaacaggaaagcgaacgagtcctgttctaatactgcaccttctttaaccgtccctgaatgtgccatttgtctgcaaacatgtgttcatccagtcagtctgccctgtaagcacgttttctgctatctatgtgtaaaaggagcttcatggcttggaaagcggtgtgctctttgtcgacaagaaattcccgaggatttccttgacaagccaaccttgttgtcaccagaagaactcaaggcagcaagtagaggaaatggtgaatatgcatggtattatgaaggaagaaatgggtggtggcagtacgatgagcgcactagtagagagctggaagatgctttttccaaaggtaaaaagaacactgaaatgttaattgctggctttctgtatgtcgctgatcttgaaaacatggttcaatataggagaaatgaacatggacgtcgcaggaagattaagcgagatataatagatataccaaagaagggagtagctggacttaggctagactgtgatgctaataccgtaaacctagcaagagagagctctgctgacggagcggacagtgtatcagcacagagtggagcttctgttcagcccctagtgtcttctgtaaggcccctaacatcagtagatggtcagttaacaagccctgcaacaccatcccctgatgcaagcacttctctggaagactcttttgctcatttacaactcagtggagacaacacagctgaaaggagtcataggggagaaggagaagaagatcatgaatcaccatcttcaggcagggtaccagcaccagacacctccattgaagaaactgaatcagatgccagtagtgatagtgaggatgtatctgcagttgttgcacagcactccttgacccaacagagacttttggtttctaatgcaaaccagacagtacccgatcgatcagatcgatcgggaactgatcgatcagtagcagggggtggaacagtgagtgtcagtgtcagatctagaaggcctgatggacagtgcacagtaactgaagtttaaataaaaatgtcttcagctccatgctcaaggttgaaagggttacctgtaaatttctgcccacataacattatactcatccctagtagtgcattttgggagttggggtgggaaggggtatgggaaggatagactcataattaaaatgtctaacatgtctctgttgagaaatttatttaatgtaaggaacttgggtgttaatagttgagagctgtttagtaataacccagttttcttgaggtctgtttactttatactttttaaaaacttctgtagttcttttggccagtgtgtttgtattatctgtgcattaatggtcctcatctgactcctgcattgtgtcttatttttctgcatggattggcataagaccattactaaaatttggcacctgtgagatgtttgatattatgaacaggaaacataatttaatgtatgaatagatgtgaatttgggatttcaaaatagatgaataacaactattttatagtaaagttattgaaatggaaatgaaaacagccagtaacttatgtttcagaatgtttgtaacacacttcatggtgttcccataggctttgctgtctagtcttatagtttgaggtttttttggtctgcatttttctttttgattacaaaatttataatttaataaatactagagtttatcaaaaaa

SEQ ID NO: 417338 - DNA, 2536 bp, Homo sapiens
ttctgttggaactgcactctttcagagcctctgggccctaatacaaagcaagcacactctaaagaagccagaagaatgcaagcagcgaagtcgccgctccccacaggcaagagagtaccggcagacagcggcgcgagacaggggcagaacgatgaggcgccggagttagctcgccggtgcgggtgcgggtgcgcggcgcgtcgcggcccctcctccgcgacgcgccgggtggtcacgtgacggccgcgcgcgttcccggcagctgcgggctccgaggccagagagaaaagactgcgaggtggccgcagctgtggccggagaggtgggagtcggagcgaggccctctcgggggagcagggtgaacgccggccactctaggatcctcactcggggagaggaggcatagctcgcggtgtcacctccagccgcaacgtactccggcacaaagaatgaaccagcagtggaagagaaaatactgtaagctggctgactgctggtgaagaaaatgctttatttttgtggcaggcatctgtgggatctgtaatagaaatatattggagtaattcaagattctgtggttggcccttttgactgctctctctacaggtttaatttgggcatttactcattttcatggctccaaggaccatgtatgtgttggggatcttcaatattcatgttattttctcctttggtcttatatgattgttacctttatgaagctttagtgattacaaagcactttttttgtccatttttacctgagctttgtaaactctgatttgcaggatggctggctgtggtgaaattgatcattcaataaacatgcttcctacaaacaggaaagcgaacgagtcctgttctaatactgcaccttctttaaccgtccctgaatgtgccatttgtctgcaaacatgtgttcatccagtcagtctgccctgtaagcacgttttctgctatctatgtgtaaaaggagcttcatggcttggaaagcggtgtgctctttgtcgacaagaaattcccgaggatttccttgacaagccaaccttgttgtcaccagaagaactcaaggcagcaagtagaggaaatggtgaatatgcatggtattatgaaggaagaaatgggtggtggcagtacgatgagcgcactagtagagagctggaagatgctttttccaaaggtaaaaagaacactgaaatgttaattgctggctttctgtatgtcgctgatcttgaaaacatggttcaatataggagaaatgaacatggacgtcgcaggaagattaagcgagatataatagatataccaaagaagggagtagctggacttaggctagactgtgatgctaataccgtaaacctagcaagagagagctctgctgacggagcggacagtgtatcagcacagagtggagcttctgttcagcccctagtgtcttctgtaaggcccctaacatcagtagatggtcagttaacaagccctgcaacaccatcccctgatgcaagcacttctctggaagactcttttgctcatttacaactcagtggagacaacacagctgaaaggagtcataggggagaaggagaagaagatcatgaatcaccatcttcaggcagggtaccagcaccagacacctccattgaagaaactgaatcagatgccagtagtgatagtgaggatgtatctgcagttgttgcacagcactccttgacccaacagagacttttggtttctaatgcaaaccagacagtacccgatcgatcagatcgatcgggaactgatcgatcagtagcagggggtggaacagtgagtgtcagtgtcagatctagaaggcctgatggacagtgcacagtaactgaagtttaaataaaaatgtcttcagctccatgctcaaggttgaaagggttacctgtaaatttctgcccacataacattatactcatccctagtagtgcattttgggagttggggtgggaaggggtatgggaaggatagactcataattaaaatgtctaacatgtctctgttgagaaatttatttaatgtaaggaacttgggtgttaatagttgagagctgtttagtaataacccagttttcttgaggtctgtttactttatactttttaaaaacttctgtagttcttttggccagtgtgtttgtattatctgtgcattaatggtcctcatctgactcctgcattgtgtcttatttttctgcatggattggcataagaccattactaaaatttggcacctgtgagatgtttgatattatgaacaggaaacataatttaatgtatgaatagatgtgaatttgggatttcaaaatagatgaataacaactattttatagtaaagttattgaaatggaaatgaaaacagccagtaacttatgtttcagaatgtttgtaacacacttcatggtgttcccataggctttgctgtctagtcttatagtttgaggtttttttggtctgcatttttctttttgattacaaaatttataatttaataaatactagagtttatcaaaaaa

SEQ ID NO: 417339 - DNA, 2299 bp, Homo sapiens
ttctgttggaactgcactctttcagagcctctgggccctaatacaaagcaagcacactctaaagaagccagaagaatgcaagcagcgaagtcgccgctccccacaggcaagagagtaccggcagacagcggcgcgagacaggggcagaacgatgaggcgccggagttagctcgccggtgcgggtgcgggtgcgcggcgcgtcgcggcccctcctccgcgacgcgccgggtggtcacgtgacggccgcgcgcgttcccggcagctgcgggctccgaggccagagagaaaagactgcgaggtggccgcagctgtggccggagaggtgggagtcggagcgaggccctctcgggggagcagggtgaacgccggccactctaggatcctcactcggggagaggaggcatagctcgcggtgtcacctccagccgcaacgtactccggcacaaagaatgaaccagcagtggaagagaaaatactgtaagctggctgactgctggtgaagaaaatgctttatttttgtggcaggcatctgtgggatctgtaatagaaatgatggctggctgtggtgaaattgatcattcaataaacatgcttcctacaaacaggaaagcgaacgagtcctgttctaatactgcaccttctttaaccgtccctgaatgtgccatttgtctgcaaacatgtgttcatccagtcagtctgccctgtaagcacgttttctgctatctatgtgtaaaaggagcttcatggcttggaaagcggtgtgctctttgtcgacaagaaattcccgaggatttccttgacaagccaaccttgttgtcaccagaagaactcaaggcagcaagtagaggaaatggtgaatatgcatggtattatgaaggaagaaatgggtggtggcagtacgatgagcgcactagtagagagctggaagatgctttttccaaaggtaaaaagaacactgaaatgttaattgctggctttctgtatgtcgctgatcttgaaaacatggttcaatataggagaaatgaacatggacgtcgcaggaagattaagcgagatataatagatataccaaagaagggagtagctggacttaggctagactgtgatgctaataccgtaaacctagcaagagagagctctgctgacggagcggacagtgtatcagcacagagtggagcttctgttcagcccctagtgtcttctgtaaggcccctaacatcagtagatggtcagttaacaagccctgcaacaccatcccctgatgcaagcacttctctggaagactcttttgctcatttacaactcagtggagacaacacagctgaaaggagtcataggggagaaggagaagaagatcatgaatcaccatcttcaggcagggtaccagcaccagacacctccattgaagaaactgaatcagatgccagtagtgatagtgaggatgtatctgcagttgttgcacagcactccttgacccaacagagacttttggtttctaatgcaaaccagacagtacccgatcgatcagatcgatcgggaactgatcgatcagtagcagggggtggaacagtgagtgtcagtgtcagatctagaaggcctgatggacagtgcacagtaactgaagtttaaataaaaatgtcttcagctccatgctcaaggttgaaagggttacctgtaaatttctgcccacataacattatactcatccctagtagtgcattttgggagttggggtgggaaggggtatgggaaggatagactcataattaaaatgtctaacatgtctctgttgagaaatttatttaatgtaaggaacttgggtgttaatagttgagagctgtttagtaataacccagttttcttgaggtctgtttactttatactttttaaaaacttctgtagttcttttggccagtgtgtttgtattatctgtgcattaatggtcctcatctgactcctgcattgtgtcttatttttctgcatggattggcataagaccattactaaaatttggcacctgtgagatgtttgatattatgaacaggaaacataatttaatgtatgaatagatgtgaatttgggatttcaaaatagatgaataacaactattttatagtaaagttattgaaatggaaatgaaaacagccagtaacttatgtttcagaatgtttgtaacacacttcatggtgttcccataggctttgctgtctagtcttatagtttgaggtttttttggtctgcatttttctttttgattacaaaatttataatttaataaatactagagtttatcaaaaaa

SEQ ID NO: 417340 - DNA, 1797 bp, Homo sapiens
tgaggatccccgttctctcctacctgactttgtaaactctgatttgcaggatggctggctgtggtgaaattgatcattcaataaacatgcttcctacaaacaggaaagcgaacgagtcctgttctaatactgcaccttctttaaccgtccctgaatgtgccatttgtctgcaaacatgtgttcatccagtcagtctgccctgtaagcacgttttctgctatctatgtgtaaaaggagcttcatggcttggaaagcggtgtgctctttgtcgacaagaaattcccgaggatttccttgacaagccaaccttgttgtcaccagaagaactcaaggcagcaagtagaggaaatggtgaatatgcatggtattatgaaggaagaaatgggtggtggcagtacgatgagcgcactagtagagagctggaagatgctttttccaaaggtaaaaagaacactgaaatgttaattgctggctttctgtatgtcgctgatcttgaaaacatggttcaatataggagaaatgaacatggacgtcgcaggaagattaagcgagatataatagatataccaaagaagggagtagctggacttaggctagactgtgatgctaataccgtaaacctagcaagagagagctctgctgacggagcggacagtgtatcagcacagagtggagcttctgttcagcccctagtgtcttctgtaaggcccctaacatcagtagatggtcagttaacaagccctgcaacaccatcccctgatgcaagcacttctctggaagactcttttgctcatttacaactcagtggagacaacacagctgaaaggagtcataggggagaaggagaagaagatcatgaatcaccatcttcaggcagggtaccagcaccagacacctccattgaagaaactgaatcagatgccagtagtgatagtgaggatgtatctgcagttgttgcacagcactccttgacccaacagagacttttggtttctaatgcaaaccagacagtacccgatcgatcagatcgatcgggaactgatcgatcagtagcagggggtggaacagtgagtgtcagtgtcagatctagaaggcctgatggacagtgcacagtaactgaagtttaaataaaaatgtcttcagctccatgctcaaggttgaaagggttacctgtaaatttctgcccacataacattatactcatccctagtagtgcattttgggagttggggtgggaaggggtatgggaaggatagactcataattaaaatgtctaacatgtctctgttgagaaatttatttaatgtaaggaacttgggtgttaatagttgagagctgtttagtaataacccagttttcttgaggtctgtttactttatactttttaaaaacttctgtagttcttttggccagtgtgtttgtattatctgtgcattaatggtcctcatctgactcctgcattgtgtcttatttttctgcatggattggcataagaccattactaaaatttggcacctgtgagatgtttgatattatgaacaggaaacataatttaatgtatgaatagatgtgaatttgggatttcaaaatagatgaataacaactattttatagtaaagttattgaaatggaaatgaaaacagccagtaacttatgtttcagaatgtttgtaacacacttcatggtgttcccataggctttgctgtctagtcttatagtttgaggtttttttggtctgcatttttctttttgattacaaaatttataatttaataaatactagagtttatcaaaaaa

SEQ ID NO: 417341 - DNA, 2386 bp, Homo sapiens
ttctgttggaactgcactctttcagagcctctgggccctaatacaaagcaagcacactctaaagaagccagaagaatgcaagcagcgaagtcgccgctccccacaggcaagagagtaccggcagacagcggcgcgagacaggggcagaacgatgaggcgccggagttagctcgccggtgcgggtgcgggtgcgcggcgcgtcgcggcccctcctccgcgacgcgccgggtggtcacgtgacggccgcgcgcgttcccggcagctgcgggctccgaggccagagagaaaagactgcgaggtggccgcagctgtggccggagagcacaaagaatgaaccagcagtggaagagaaaatactgtaagctggctgactgctggtgaagaaaatgctttatttttgtggcaggcatctgtgggatctgtaatagaaatgatggctggctgtggtgaaattgatcattcaataaacatgcttcctacaaacaggaaagcgaacgagtcctgttctaatactgcaccttctttaaccgtccctgaatgtgccatttgtctgcaaacatgtgttcatccagtcagtctgccctgtaagcacgttttctgctatctatgtgtaaaaggagcttcatggcttggaaagcggtgtgctctttgtcgacaagaaattcccgaggatttccttgacaagccaaccttgttgtcaccagaagaactcaaggcagcaagtagaggaaatggtgaatatgcatggtattatgaaggaagaaatgggtggtggcagtacgatgagcgcactagtagagagctggaagatgctttttccaaaggtaaaaagaacactgaaatgttaattgctggctttctgtatgtcgctgatcttgaaaacatggttcaatataggagaaatgaacatggacgtcgcaggaagattaagcgagatataatagatataccaaagaagggagtagctggacttaggctagactgtgatgctaataccgtaaacctagcaagagagagctctgctgacggagcggacagtgtatcagcacagagtggagcttctgttcagcccctagtgtcttctgtaaggcccctaacatcagtagatggtcagttaacaagccctgcaacaccatcccctgatgcaagcacttctctggaagactcttttgctcatttacaactcagtggagacaacacagctgaaaggagtcataggggagaaggagaagaagatcatgaatcaccatcttcaggcagggtaccagcaccagacacctccattgaagaaactgaatcagatgccagtagtgatagtgaggatgtatctgcagttgttgcacagcactccttgacccaacagagacttttggtttctaatgcaaaccagacagtacccgatcgatcagatcgatcgggaactgatcgatcagtagcagggggtggaacagtgagtgtcagtgtcagatctagaaggcctgatggacagtgcacagtaactgaagtttaaataaaaatgtcttcagctccatgctcaaggttgaaagggttacctgtaaatttctgcccacataacattatactcatccctagtagtgcattttgggagttggggtgggaaggggtatgggaaggatagactcataattaaaatgtctaacatgtctctgttgagaaatttatttaatgtaaggaacttgggtgttaatagttgagagctgtttagtaataacccagttttcttgaggtctgtttactttatactttttaaaaacttctgtagttcttttggccagtgtgtttgtattatctgtgcattaatggtcctcatctgactcctgcattgtgtcttatttttctgcatggattggcataagaccattactaaaatttggcacctgtgagatgtttgatattatgaacaggaaacataatttaatgtatgaatagatgtgaatttgggatttcaaaatagatgaataacaactattttatagtaaagttattgaaatggaaatgaaaacagccagtaacttatgtttcagaatgtttgtaacacacttcatggtgttcccataggctttgctgtctagtcttatagtttgaggtttttttggtctgcatttttctttttgattacaaaatttataatttaataaatactagagtttatcaaaaaacagtttgtctcttgtttgagggtggaaagggtgtggaaacattttgacatttgtgaccaaaggtcacttaaaaagtggtggttttaattggttgttttcagcttaatcacctgctcagaaaagtttgatttttttcttagagattatttaaacagaatctataggcagtgtgtatataataaacatgtatggaaataaaactaaag

SEQ ID NO: 417342 - DNA, 863 bp, Homo sapiens
aatgcttgtttaagtattgggccggagctcggcaccagaacggaaggcttaaacgtgcgacggtatactgggctcgaagcgtatacttccatgtggtcagtagaacttagctgactctcgtgagttcatcaacgcaactatccatatatcgtcgcgcgcgggcgttacatgtggatacggtgtcatcgactctataatcccagatcgtctgttcgcgtagtttgcattatctggcatcctgatcaagtagcgagtcccaagcggaattctgatctgaaggggcaccttctgttcactcccacaaagtggtgtctggttctcactgagacgttttaagatttttccacaaatatttatatgtactaaatgtggaaccattagaaagttcttccaaaatctcattccagcatagttttggatttttcttttgtcttattttaaaataaggaagtcgagatgactttgatcattggtaacttgggcctgggccagacaaagtataaaacttacaaaagaatattctcatttggtcttaactaggtagatgtaatatatgactttttataaaaagggtatctatatgaacttgacacagtattttcagcttttgtattccatactaaagccatgaagaactacacgtaacatcatcatttgtattaattgcacaactccaatgctaaaggttggattgtgttagaggaatcggctctgtatttgcctctagagaaacacagtgttctctttgtatttatggattcctttttaccgtgtcacatttactttggtcctctatgtatttaaatgtttgaagtgccttagactcttgccatattttcaaaataaaattccattaagctctt

SEQ ID NO: 417343 - DNA, 5015 bp, Homo sapiens
tcaggttgaatgcctttgagaacttgatgcataaaatttgcatgactcctcactcctttctggatctctcattggactcaagccagcatggctcacaccacaaaggttaacggcagtgcctcaggaaaagcaggtgatattctcagtggagaccaggacaaggaacagaaagacccttactttgtggagaccccctatggttatcaactagacttagatttcctcaaatatgtggatgacatacagaagggaaataccatcaaaagactgaacatccagaagaggcggaagccgtccgtgccatgcccagaacccaggaccacatctggtcagcaaggtatatggacttccactgaatccctctcatcctccaacagtgatgacaacaagcagtgccccaacttcctcatagccagaagtcaagttacatcaactccaatctcaaagccacctccccctctggagacctcactcccttttcttaccatcccagaaaatcgacagctgccacctccctcaccacaactcccaaagcataaccttcatgtcaccaagacactgatggagacccggagaagactggaacaggagagagccaccatgcagatgacaccgggtgagttcagaaggcccaggctggccagttttggaggcatgggcaccacaagctccctcccttcttttgtgggttctggaaaccacaatcctgccaagcaccagcttcagaatggataccaaggtaatggggattatggtagctatgccccagctgctcccaccacttcctccatggggagctccatccgccacagccccctgagctcagggatctccaccccagtgaccaacgtgagccccatgcacctgcagcacatccgcgagcagatggccattgctctgaaacgcctgaaggagctggaggagcaggtgcgaaccatccctgtgctccaggtaaagatctctgtcttgcaagaagagaaaaggcagttggtctcacagctgaaaaaccaaagggctgcatcccagatcaatgtctgtggtgtgaggaagcggtcctatagtgcggggaacgcctcccagctggaacagctctcccgggcccgaagaagtggcggggaattatacattgactatgaggaggaagaaatggagaccgtagaacagagcacgcagaggataaaggagttccggcaacttacagcagacatgcaagccctggagcagaagatccaggacagcagctgtgaggcctcctcagagctcagggagaatggagagtgccggtctgtggctgtgggtgccgaggagaacatgaacgacatcgtcgtgtaccacagaggctccaggtcctgtaaggatgcagctgtagggacacttgttgagatgagaaattgtggggtcagcgtgacagaggccatgcttggagtgatgactgaagctgacaaagaaattgagctccaacagcagaccatagaagccttgaaggaaaagatctatcgcctagaagtacagcttagagaaaccacccatgaccgggagatgactaaactgaaacaagagctgcaggctgctggatcgaggaaaaaggttgacaaagccacgatggcccagccgcttgttttcagtaaggtggtggaggcagtggtgcagaccagagaccaaatggtcggcagtcacatggacctggtggacacgtgtgttgggacctccgtggaaacaaacagtgtaggcatctcctgccagcctgaatgtaagaataaagtcgtagggcctgagctgcctatgaattggtggattgttaaggagagggtggaaatgcatgaccgatgtgctgggaggtctgtggaaatgtgtgacaagagtgtgagtgtggaagtcagcgtctgcgaaacaggcagcaacacagaggagtctgtgaacgacctcacactcctcaagacaaacttgaatctcaaagaagtgcggtctatcggttgtggagattgttctgttgacgtgaccgtctgctctccaaaggagtgcgcctcccggggcgtgaacactgaggctgttagccaggtggaagctgccgtcatggcagtgcctcgtactgcagaccaggacactagcacagatttggaacaggtgcaccagttcaccaacaccgagacggccaccctcatagagtcctgcaccaacacttgtctaagcactttggacaagcagaccagcacccagactgtggagacgcggacagtagctgtaggagaaggccgtgtcaaggacatcaactcctccaccaagacgcggtccattggtgttggaacgttgctttctggccattctgggtttgacaggccatcagctgtgaagaccaaagagtcaggtgtggggcagataaatattaacgacaactatctggttggtctcaaaatgaggactatagcttgtgggccaccacagttgactgtggggctgacagccagcagaaggagcgtgggggttggggatgaccctgtaggggaatctctggagaacccccagcctcaagctccacttggaatgatgactggcctggatcactacattgagcgtatccagaagctgctggcagaacagcagacactgctggctgagaactacagtgaactggcagaagctttcggggaacctcactcacagatgggctccctcaactctcagctcatcagcaccctgtcgtctatcaactctgtcatgaaatctgcaagcactgaagagctgaggaaccctgacttccagaaaaccagtctgggtaaaatcacaggcaattatttgggatatacctgtaagtgtgggggccttcagtcaggaagtcccttaagctcccagacatcccagcctgagcaagaagtggggacctcagaaggaaagccaatcagcagcctggatgccttccccactcaggaaggtacgctgtctccagtgaacctgacagacgaccagatcgccgctggcctctatgcatgtacaaacaatgaaagtacactgaagtccatcatgaagaagaaagatggtaacaaagattcaaatggcgcaaaaaagaatcttcagtttgttggcattaatggagggtatgaaacaacttcaagtgatgattccagctcagatgaaagctcttcttccgagtcagatgacgagtgtgatgtcattgagtatcctcttgaagaagaggaggaggaggaggatgaagacactcggggaatggcagaagggcaccatgcagttaatattgaaggtttgaagtctgccagggtggaagatgaaatgcaggttcaagaatgtgaacctgagaaggtggaaatcagagagaggtatgaattaagtgaaaagatgttgtctgcatgcaacttactgaaaaatactataaatgaccccaaagctttgaccagcaaagatatgaggttctgtctgaacaccctccagcacgagtggttccgcgtgtccagtcagaagtcagccattccagccatggtgggggactacatagctgcttttgaggccatttccccagatgtcctccgctatgtcatcaacttggcagacggcaacggcaacacagccctccattacagcgtgtcccactccaacttcgagattgtgaagctgctgttagatgccgatgtgtgtaatgtggatcaccagaacaaggcaggctacacccccatcatgttggcggccctcgccgctgtggaagcagagaaggacatgcggattgtggaagaactcttcggctgtggggatgtgaatgccaaagctagtcaggcgggacagacggccctcatgctggcggtcagtcacggacggatagacatggtgaagggccttctggcctgtggggctgatgtcaacatccaggatgacgagggctccacggccctcatgtgtgccagcgagcacgggcacgtggagattgtcaagctgctgctggcccagcccggctgcaacggtcacctagaggacaacgatggcagcactgcgctctcaatcgccctggaagcaggacacaaggacatcgctgttcttctgtatgcccatgtcaactttgcaaaagcccagtctccgggcacccctaggcttggaaggaagacgtctcctggccccacccaccgaggttcatttgattgattgtatgcaaatagccctttatttacatgccactattaagctgctaattgttcctgttggggtgacagatactgaatgtatacgtattgtgcctgagctcaccagcaaacagaagcatcaagcccaggggtaaaggctgaagctttcacagtgcagagactgctagcctgggcacacacacctcctttctggccgtcttctgtgtagggcacactttaacccagtctctgttgctgttgagtctctgctccgttttgtacagtcacagggaattctgatctgaaggggcaccttctgttcactcccacaaagtggtgtctggttctcactgagacgttttaagatttttccacaaatatttatatgtactaaatgtggaaccattagaaagttcttccaaaatctcattccagcatagttttggatttttcttttgtcttattttaaaataaggaagtcgagatgactttgatcattggtaacttgggcctgggccagacaaagtataaaacttacaaaagaatattctcatttggtcttaactaggtagatgtaatatatgactttttataaaaagggtatctatatgaacttgacacagtattttcagcttttgtattccatactaaagccatgaagaactacacgtaacatcatcatttgtattaattgcacaactccaatgctaaaggttggattgtgttagaggaatcggctctgtatttgcctctagagaaacacagtgttctctttgtatttatggattcctttttaccgtgtcacatttactttggtcctctatgtatttaaatgtttgaagtgccttagactcttgccatattttcaaaataaaattccattaagctctt

SEQ ID NO: 417344 - DNA, 5196 bp, Homo sapiens
gaaaaacagagcctctctgtagagatgcttaaagtgctagctttatttaaaaatcagctggcaaagcgggagtgaagaacacacattttcagaagataccggtttcctgttttcattaagaaaacagggaatgcggaacagctgagtgcggcgggggtggtgtcactgcagccggagggagacctcgccggtgaaagctcagcctatggcatccgagcgtggccggccaagtttacacgaatgttgaaacttctcctcacggggtgaggatcgagggcgcccgaggccgggtccggctgagctggagcgagctgtgcggggcagcgcgggctggcggggagcgcggcgggcgccacgtggaaaagcaggtgatattctcagtggagaccaggacaaggaacagaaagacccttactttgtggagaccccctatggttatcaactagacttagatttcctcaaatatgtggatgacatacagaagggaaataccatcaaaagactgaacatccagaagaggcggaagccgtccgtgccatgcccagaacccaggaccacatctggtcagcaaggtatatggacttccactgaatccctctcatcctccaacagtgatgacaacaagcagtgccccaacttcctcatagccagaagtcaagttacatcaactccaatctcaaagccacctccccctctggagacctcactcccttttcttaccatcccagaaaatcgacagctgccacctccctcaccacaactcccaaagcataaccttcatgtcaccaagacactgatggagacccggagaagactggaacaggagagagccaccatgcagatgacaccgggtgagttcagaaggcccaggctggccagttttggaggcatgggcaccacaagctccctcccttcttttgtgggttctggaaaccacaatcctgccaagcaccagcttcagaatggataccaaggtaatggggattatggtagctatgccccagctgctcccaccacttcctccatggggagctccatccgccacagccccctgagctcagggatctccaccccagtgaccaacgtgagccccatgcacctgcagcacatccgcgagcagatggccattgctctgaaacgcctgaaggagctggaggagcaggtgcgaaccatccctgtgctccaggtaaagatctctgtcttgcaagaagagaaaaggcagttggtctcacagctgaaaaaccaaagggctgcatcccagatcaatgtctgtggtgtgaggaagcggtcctatagtgcggggaacgcctcccagctggaacagctctcccgggcccgaagaagtggcggggaattatacattgactatgaggaggaagaaatggagaccgtagaacagagcacgcagaggataaaggagttccggcaacttacagcagacatgcaagccctggagcagaagatccaggacagcagctgtgaggcctcctcagagctcagggagaatggagagtgccggtctgtggctgtgggtgccgaggagaacatgaacgacatcgtcgtgtaccacagaggctccaggtcctgtaaggatgcagctgtagggacacttgttgagatgagaaattgtggggtcagcgtgacagaggccatgcttggagtgatgactgaagctgacaaagaaattgagctccaacagcagaccatagaagccttgaaggaaaagatctatcgcctagaagtacagcttagagaaaccacccatgaccgggagatgactaaactgaaacaagagctgcaggctgctggatcgaggaaaaaggttgacaaagccacgatggcccagccgcttgttttcagtaaggtggtggaggcagtggtgcagaccagagaccaaatggtcggcagtcacatggacctggtggacacgtgtgttgggacctccgtggaaacaaacagtgtaggcatctcctgccagcctgaatgtaagaataaagtcgtagggcctgagctgcctatgaattggtggattgttaaggagagggtggaaatgcatgaccgatgtgctgggaggtctgtggaaatgtgtgacaagagtgtgagtgtggaagtcagcgtctgcgaaacaggcagcaacacagaggagtctgtgaacgacctcacactcctcaagacaaacttgaatctcaaagaagtgcggtctatcggttgtggagattgttctgttgacgtgaccgtctgctctccaaaggagtgcgcctcccggggcgtgaacactgaggctgttagccaggtggaagctgccgtcatggcagtgcctcgtactgcagaccaggacactagcacagatttggaacaggtgcaccagttcaccaacaccgagacggccaccctcatagagtcctgcaccaacacttgtctaagcactttggacaagcagaccagcacccagactgtggagacgcggacagtagctgtaggagaaggccgtgtcaaggacatcaactcctccaccaagacgcggtccattggtgttggaacgttgctttctggccattctgggtttgacaggccatcagctgtgaagaccaaagagtcaggtgtggggcagataaatattaacgacaactatctggttggtctcaaaatgaggactatagcttgtgggccaccacagttgactgtggggctgacagccagcagaaggagcgtgggggttggggatgaccctgtaggggaatctctggagaacccccagcctcaagctccacttggaatgatgactggcctggatcactacattgagcgtatccagaagctgctggcagaacagcagacactgctggctgagaactacagtgaactggcagaagctttcggggaacctcactcacagatgggctccctcaactctcagctcatcagcaccctgtcgtctatcaactctgtcatgaaatctgcaagcactgaagagctgaggaaccctgacttccagaaaaccagtctgggtaaaatcacaggcaattatttgggatatacctgtaagtgtgggggccttcagtcaggaagtcccttaagctcccagacatcccagcctgagcaagaagtggggacctcagaaggaaagccaatcagcagcctggatgccttccccactcaggaaggtacgctgtctccagtgaacctgacagacgaccagatcgccgctggcctctatgcatgtacaaacaatgaaagtacactgaagtccatcatgaagaagaaagatggtaacaaagattcaaatggcgcaaaaaagaatcttcagtttgttggcattaatggagggtatgaaacaacttcaagtgatgattccagctcagatgaaagctcttcttccgagtcagatgacgagtgtgatgtcattgagtatcctcttgaagaagaggaggaggaggaggatgaagacactcggggaatggcagaagggcaccatgcagttaatattgaaggtttgaagtctgccagggtggaagatgaaatgcaggttcaagaatgtgaacctgagaaggtggaaatcagagagaggtatgaattaagtgaaaagatgttgtctgcatgcaacttactgaaaaatactataaatgaccccaaagctttgaccagcaaagatatgaggttctgtctgaacaccctccagcacgagtggttccgcgtgtccagtcagaagtcagccattccagccatggtgggggactacatagctgcttttgaggccatttccccagatgtcctccgctatgtcatcaacttggcagacggcaacggcaacacagccctccattacagcgtgtcccactccaacttcgagattgtgaagctgctgttagatgccgatgtgtgtaatgtggatcaccagaacaaggcaggctacacccccatcatgttggcggccctcgccgctgtggaagcagagaaggacatgcggattgtggaagaactcttcggctgtggggatgtgaatgccaaagctagtcaggcgggacagacggccctcatgctggcggtcagtcacggacggatagacatggtgaagggccttctggcctgtggggctgatgtcaacatccaggatgacgagggctccacggccctcatgtgtgccagcgagcacgggcacgtggagattgtcaagctgctgctggcccagcccggctgcaacggtcacctagaggacaacgatggcagcactgcgctctcaatcgccctggaagcaggacacaaggacatcgctgttcttctgtatgcccatgtcaactttcccacccaccgaggttcatttgattgattgtatgcaaatagccctttatttacatgccactattaagctgctaattgttcctgttggggtgacagatactgaatgtatacgtattgtgcctgagctcaccagcaaacagaagcatcaagcccaggggtaaaggctgaagctttcacagtgcagagactgctagcctgggcacacacacctcctttctggccgtcttctgtgtagggcacactttaacccagtctctgttgctgttgagtctctgctccgttttgtacagtcacagggaattctgatctgaaggggcaccttctgttcactcccacaaagtggtgtctggttctcactgagacgttttaagatttttccacaaatatttatatgtactaaatgtggaaccattagaaagttcttccaaaatctcattccagcatagttttggatttttcttttgtcttattttaaaataaggaagtcgagatgactttgatcattggtaacttgggcctgggccagacaaagtataaaacttacaaaagaatattctcatttggtcttaactaggtagatgtaatatatgactttttataaaaagggtatctatatgaacttgacacagtattttcagcttttgtattccatactaaagccatgaagaactacacgtaacatcatcatttgtattaattgcacaactccaatgctaaaggttggattgtgttagaggaatcggctctgtatttgcctctagagaaacacagtgttctctttgtatttatggattcctttttaccgtgtcacatttactttggtcctctatgtatttaaatgtttgaagtgccttagactcttgccatattttcaaaataaaattccattaagctctt

SEQ ID NO: 417345 - DNA, 5250 bp, Homo sapiens
gaaaaacagagcctctctgtagagatgcttaaagtgctagctttatttaaaaatcagctggcaaagcgggagtgaagaacacacattttcagaagataccggtttcctgttttcattaagaaaacagggaatgcggaacagctgagtgcggcgggggtggtgtcactgcagccggagggagacctcgccggtgaaagctcagcctatggcatccgagcgtggccggccaagtttacacgaatgttgaaacttctcctcacggggtgaggatcgagggcgcccgaggccgggtccggctgagctggagcgagctgtgcggggcagcgcgggctggcggggagcgcggcgggcgccacgtggaaaagcaggtgatattctcagtggagaccaggacaaggaacagaaagacccttactttgtggagaccccctatggttatcaactagacttagatttcctcaaatatgtggatgacatacagaagggaaataccatcaaaagactgaacatccagaagaggcggaagccgtccgtgccatgcccagaacccaggaccacatctggtcagcaaggtatatggacttccactgaatccctctcatcctccaacagtgatgacaacaagcagtgccccaacttcctcatagccagaagtcaagttacatcaactccaatctcaaagccacctccccctctggagacctcactcccttttcttaccatcccagaaaatcgacagctgccacctccctcaccacaactcccaaagcataaccttcatgtcaccaagacactgatggagacccggagaagactggaacaggagagagccaccatgcagatgacaccgggtgagttcagaaggcccaggctggccagttttggaggcatgggcaccacaagctccctcccttcttttgtgggttctggaaaccacaatcctgccaagcaccagcttcagaatggataccaaggtaatggggattatggtagctatgccccagctgctcccaccacttcctccatggggagctccatccgccacagccccctgagctcagggatctccaccccagtgaccaacgtgagccccatgcacctgcagcacatccgcgagcagatggccattgctctgaaacgcctgaaggagctggaggagcaggtgcgaaccatccctgtgctccaggtaaagatctctgtcttgcaagaagagaaaaggcagttggtctcacagctgaaaaaccaaagggctgcatcccagatcaatgtctgtggtgtgaggaagcggtcctatagtgcggggaacgcctcccagctggaacagctctcccgggcccgaagaagtggcggggaattatacattgactatgaggaggaagaaatggagaccgtagaacagagcacgcagaggataaaggagttccggcaacttacagcagacatgcaagccctggagcagaagatccaggacagcagctgtgaggcctcctcagagctcagggagaatggagagtgccggtctgtggctgtgggtgccgaggagaacatgaacgacatcgtcgtgtaccacagaggctccaggtcctgtaaggatgcagctgtagggacacttgttgagatgagaaattgtggggtcagcgtgacagaggccatgcttggagtgatgactgaagctgacaaagaaattgagctccaacagcagaccatagaagccttgaaggaaaagatctatcgcctagaagtacagcttagagaaaccacccatgaccgggagatgactaaactgaaacaagagctgcaggctgctggatcgaggaaaaaggttgacaaagccacgatggcccagccgcttgttttcagtaaggtggtggaggcagtggtgcagaccagagaccaaatggtcggcagtcacatggacctggtggacacgtgtgttgggacctccgtggaaacaaacagtgtaggcatctcctgccagcctgaatgtaagaataaagtcgtagggcctgagctgcctatgaattggtggattgttaaggagagggtggaaatgcatgaccgatgtgctgggaggtctgtggaaatgtgtgacaagagtgtgagtgtggaagtcagcgtctgcgaaacaggcagcaacacagaggagtctgtgaacgacctcacactcctcaagacaaacttgaatctcaaagaagtgcggtctatcggttgtggagattgttctgttgacgtgaccgtctgctctccaaaggagtgcgcctcccggggcgtgaacactgaggctgttagccaggtggaagctgccgtcatggcagtgcctcgtactgcagaccaggacactagcacagatttggaacaggtgcaccagttcaccaacaccgagacggccaccctcatagagtcctgcaccaacacttgtctaagcactttggacaagcagaccagcacccagactgtggagacgcggacagtagctgtaggagaaggccgtgtcaaggacatcaactcctccaccaagacgcggtccattggtgttggaacgttgctttctggccattctgggtttgacaggccatcagctgtgaagaccaaagagtcaggtgtggggcagataaatattaacgacaactatctggttggtctcaaaatgaggactatagcttgtgggccaccacagttgactgtggggctgacagccagcagaaggagcgtgggggttggggatgaccctgtaggggaatctctggagaacccccagcctcaagctccacttggaatgatgactggcctggatcactacattgagcgtatccagaagctgctggcagaacagcagacactgctggctgagaactacagtgaactggcagaagctttcggggaacctcactcacagatgggctccctcaactctcagctcatcagcaccctgtcgtctatcaactctgtcatgaaatctgcaagcactgaagagctgaggaaccctgacttccagaaaaccagtctgggtaaaatcacaggcaattatttgggatatacctgtaagtgtgggggccttcagtcaggaagtcccttaagctcccagacatcccagcctgagcaagaagtggggacctcagaaggaaagccaatcagcagcctggatgccttccccactcaggaaggtacgctgtctccagtgaacctgacagacgaccagatcgccgctggcctctatgcatgtacaaacaatgaaagtacactgaagtccatcatgaagaagaaagatggtaacaaagattcaaatggcgcaaaaaagaatcttcagtttgttggcattaatggagggtatgaaacaacttcaagtgatgattccagctcagatgaaagctcttcttccgagtcagatgacgagtgtgatgtcattgagtatcctcttgaagaagaggaggaggaggaggatgaagacactcggggaatggcagaagggcaccatgcagttaatattgaaggtttgaagtctgccagggtggaagatgaaatgcaggttcaagaatgtgaacctgagaaggtggaaatcagagagaggtatgaattaagtgaaaagatgttgtctgcatgcaacttactgaaaaatactataaatgaccccaaagctttgaccagcaaagatatgaggttctgtctgaacaccctccagcacgagtggttccgcgtgtccagtcagaagtcagccattccagccatggtgggggactacatagctgcttttgaggccatttccccagatgtcctccgctatgtcatcaacttggcagacggcaacggcaacacagccctccattacagcgtgtcccactccaacttcgagattgtgaagctgctgttagatgccgatgtgtgtaatgtggatcaccagaacaaggcaggctacacccccatcatgttggcggccctcgccgctgtggaagcagagaaggacatgcggattgtggaagaactcttcggctgtggggatgtgaatgccaaagctagtcaggcgggacagacggccctcatgctggcggtcagtcacggacggatagacatggtgaagggccttctggcctgtggggctgatgtcaacatccaggatgacgagggctccacggccctcatgtgtgccagcgagcacgggcacgtggagattgtcaagctgctgctggcccagcccggctgcaacggtcacctagaggacaacgatggcagcactgcgctctcaatcgccctggaagcaggacacaaggacatcgctgttcttctgtatgcccatgtcaactttgcaaaagcccagtctccgggcacccctaggcttggaaggaagacgtctcctggccccacccaccgaggttcatttgattgattgtatgcaaatagccctttatttacatgccactattaagctgctaattgttcctgttggggtgacagatactgaatgtatacgtattgtgcctgagctcaccagcaaacagaagcatcaagcccaggggtaaaggctgaagctttcacagtgcagagactgctagcctgggcacacacacctcctttctggccgtcttctgtgtagggcacactttaacccagtctctgttgctgttgagtctctgctccgttttgtacagtcacagggaattctgatctgaaggggcaccttctgttcactcccacaaagtggtgtctggttctcactgagacgttttaagatttttccacaaatatttatatgtactaaatgtggaaccattagaaagttcttccaaaatctcattccagcatagttttggatttttcttttgtcttattttaaaataaggaagtcgagatgactttgatcattggtaacttgggcctgggccagacaaagtataaaacttacaaaagaatattctcatttggtcttaactaggtagatgtaatatatgactttttataaaaagggtatctatatgaacttgacacagtattttcagcttttgtattccatactaaagccatgaagaactacacgtaacatcatcatttgtattaattgcacaactccaatgctaaaggttggattgtgttagaggaatcggctctgtatttgcctctagagaaacacagtgttctctttgtatttatggattcctttttaccgtgtcacatttactttggtcctctatgtatttaaatgtttgaagtgccttagactcttgccatattttcaaaataaaattccattaagctctt

SEQ ID NO: 417346 - DNA, 5833 bp, Homo sapiens
gaaaaacagagcctctctgtagagatgcttaaagtgctagctttatttaaaaatcagctggcaaagcgggagtgaagaacacacattttcagaagataccggtttcctgttttcattaagaaaacagggaatgcggaacagctgagtgcggcgggggtggtgtcactgcagccggagggagacctcgccggtgaaagctcagcctatggcatccgagcgtggccggccaagtttacacgaatgttgaaacttctcctcacggggtgaggatcgagggcgcccgaggccgggtccggctgagctggagcgagctgtgcggggcagcgcgggctggcggggagcgcggcgggcgccacgtggaaaagcaggtgatattctcagtggagaccaggacaaggaacagaaagacccttactttgtggagaccccctatggttatcaactagacttagatttcctcaaatatgtggatgacatacagaagggaaataccatcaaaagactgaacatccagaagaggcggaagccgtccgtgccatgcccagaacccaggaccacatctggtcagcaaggtatatggacttccactgaatccctctcatcctccaacagtgatgacaacaagcagtgccccaacttcctcatagccagaagtcaagttacatcaactccaatctcaaagccacctccccctctggagacctcactcccttttcttaccatcccagaaaatcgacagctgccacctccctcaccacaactcccaaagcataaccttcatgtcaccaagacactgatggagacccggagaagactggaacaggagagagccaccatgcagatgacaccgggtgagttcagaaggcccaggctggccagttttggaggcatgggcaccacaagctccctcccttcttttgtgggttctggaaaccacaatcctgccaagcaccagcttcagaatggataccaaggtaatggggattatggtagctatgccccagctgctcccaccacttcctccatggggagctccatccgccacagccccctgagctcagggatctccaccccagtgaccaacgtgagccccatgcacctgcagcacatccgcgagcagatggccattgctctgaaacgcctgaaggagctggaggagcaggtgcgaaccatccctgtgctccaggtaaagatctctgtcttgcaagaagagaaaaggcagttggtctcacagctgaaaaaccaaagggctgcatcccagatcaatgtctgtggtgtgaggaagcggtcctatagtgcggggaacgcctcccagctggaacagctctcccgggcccgaagaagtggcggggaattatacattgactatgaggaggaagaaatggagaccgtagaacagagcacgcagaggataaaggagttccggcaacttacagcagacatgcaagccctggagcagaagatccaggacagcagctgtgaggcctcctcagagctcagggagaatggagagtgccggtctgtggctgtgggtgccgaggagaacatgaacgacatcgtcgtgtaccacagaggctccaggtcctgtaaggatgcagctgtagggacacttgttgagatgagaaattgtggggtcagcgtgacagaggccatgcttggagtgatgactgaagctgacaaagaaattgagctccaacagcagaccatagaagccttgaaggaaaagatctatcgcctagaagtacagcttagagaaaccacccatgaccgggagatgactaaactgaaacaagagctgcaggctgctggatcgaggaaaaaggttgacaaagccacgatggcccagccgcttgttttcagtaaggtggtggaggcagtggtgcagaccagagaccaaatggtcggcagtcacatggacctggtggacacgtgtgttgggacctccgtggaaacaaacagtgtaggcatctcctgccagcctgaatgtaagaataaagtcgtagggcctgagctgcctatgaattggtggattgttaaggagagggtggaaatgcatgaccgatgtgctgggaggtctgtggaaatgtgtgacaagagtgtgagtgtggaagtcagcgtctgcgaaacaggcagcaacacagaggagtctgtgaacgacctcacactcctcaagacaaacttgaatctcaaagaagtgcggtctatcggttgtggagattgttctgttgacgtgaccgtctgctctccaaaggagtgcgcctcccggggcgtgaacactgaggctgttagccaggtggaagctgccgtcatggcagtgcctcgtactgcagaccaggacactagcacagatttggaacaggtgcaccagttcaccaacaccgagacggccaccctcatagagtcctgcaccaacacttgtctaagcactttggacaagcagaccagcacccagactgtggagacgcggacagtagctgtaggagaaggccgtgtcaaggacatcaactcctccaccaagacgcggtccattggtgttggaacgttgctttctggccattctgggtttgacaggccatcagctgtgaagaccaaagagtcaggtgtggggcagataaatattaacgacaactatctggttggtctcaaaatgaggactatagcttgtgggccaccacagttgactgtggggctgacagccagcagaaggagcgtgggggttggggatgaccctgtaggggaatctctggagaacccccagcctcaagctccacttggaatgatgactggcctggatcactacattgagcgtatccagaagctgctggcagaacagcagacactgctggctgagaactacagtgaactggcagaagctttcggggaacctcactcacagatgggctccctcaactctcagctcatcagcaccctgtcgtctatcaactctgtcatgaaatctgcaagcactgaagagctgaggaaccctgacttccagaaaaccagtctgggtaaaatcacaggcaattatttgggatatacctgtaagtgtgggggccttcagtcaggaagtcccttaagctcccagacatcccagcctgagcaagaagtggggacctcagaaggaaagccaatcagcagcctggatgccttccccactcaggaaggtacgctgtctccagtgaacctgacagacgaccagatcgccgctggcctctatgcatgtacaaacaatgaaagtacactgaagtccatcatgaagaagaaagatggtaacaaagattcaaatggcgcaaaaaagaatcttcagtttgttggcattaatggagggtatgaaacaacttcaagtgatgattccagctcagatgaaagctcttcttccgagtcagatgacgagtgtgatgtcattgagtatcctcttgaagaagaggaggaggaggaggatgaagacactcggggaatggcagaagggcaccatgcagttaatattgaaggtttgaagtctgccagggtggaagatgaaatgcaggttcaagaatgtgaacctgagaaggtggaaatcagagagaggtatgaattaagtgaaaagatgttgtctgcatgcaacttactgaaaaatactataaatgaccccaaagctttgaccagcaaagatatgaggttctgtctgaacaccctccagcacgagtggttccgcgtgtccagtcagaagtcagccattccagccatggtgggggactacatagctgcttttgaggccatttccccagatgtcctccgctatgtcatcaacttggcagacggcaacggcaacacagccctccattacagcgtgtcccactccaacttcgagattgtgaagctgctgttagatgccgatgtgtgtaatgtggatcaccagaacaaggcaggctacacccccatcatgttggcggccctcgccgctgtggaagcagagaaggacatgcggattgtggaagaactcttcggctgtggggatgtgaatgccaaagctagtcaggcgggacagacggccctcatgctggcggtcagtcacggacggatagacatggtgaagggccttctggcctgtggggctgatgtcaacatccaggatgacgagggctccacggccctcatgtgtgccagcgagcacgggcacgtggagattgtcaagctgctgctggcccagcccggctgcaacggtcacctagaggacaacgatggcagcactgcgctctcaatcgccctggaagcaggacacaaggacatcgctgttcttctgtatgcccatgtcaactttgcaaaagcccagtctccggtcagtgttgtgcatttggcatttgtaaataggctgaaatccaccagactggtggacccccttcctccaggaattgacgggagacagattttatgttgattcagaaaatggaagttttagtctggagcttaagagttcatcctttccgcctccaccccgcaaaaagcaggagaactaatgttttagcagaggctggaccttgcttgtccttgcaagacatatgctcacagcttcccatagaggttttgattctgtgcagaattatccagatagcagcccctgagcccatggggatatttcgccatggttctggcattgttcctgaagcagatggcaggcagcctgtagtccacagttcactctgagtgggaaggtgacttcccaggacagccggacatagcactgctgagcccagctggccttggagctgtggacacctgttccctgttctcagccagagctctcctggctcgggctcacagctgcttgttgcctgtggtgggccaagatcctatgtcacagggtacacatctgcctgaggtcacttattaacccccagtttttttcctttcctggtctctagggcacccctaggcttggaaggaagacgtctcctggccccacccaccgaggttcatttgattgattgtatgcaaatagccctttatttacatgccactattaagctgctaattgttcctgttggggtgacagatactgaatgtatacgtattgtgcctgagctcaccagcaaacagaagcatcaagcccaggggtaaaggctgaagctttcacagtgcagagactgctagcctgggcacacacacctcctttctggccgtcttctgtgtagggcacactttaacccagtctctgttgctgttgagtctctgctccgttttgtacagtcacagggaattctgatctgaaggggcaccttctgttcactcccacaaagtggtgtctggttctcactgagacgttttaagatttttccacaaatatttatatgtactaaatgtggaaccattagaaagttcttccaaaatctcattccagcatagttttggatttttcttttgtcttattttaaaataaggaagtcgagatgactttgatcattggtaacttgggcctgggccagacaaagtataaaacttacaaaagaatattctcatttggtcttaactaggtagatgtaatatatgactttttataaaaagggtatctatatgaacttgacacagtattttcagcttttgtattccatactaaagccatgaagaactacacgtaacatcatcatttgtattaattgcacaactccaatgctaaaggttggattgtgttagaggaatcggctctgtatttgcctctagagaaacacagtgttctctttgtatttatggattcctttttaccgtgtcacatttactttggtcctctatgtatttaaatgtttgaagtgccttagactcttgccatattttcaaaataaaattccattaagctctt

SEQ ID NO: 417347 - DNA, 1460 bp, Homo sapiens
accgactacggcggactaatctgcaactcctacatacttcccccaattattcctagaaccaggcggcgttggataaagtctgccgatgtgtgtaatgtggatcaccagaacaaggcaggctacacccccatcatgttggcggccctcgccgctgtggaagcagagaaggacatgcggattgtggaagaactcttcggctgtggggatgtgaatgccaaagctagtcaggcgggacagacggccctcatgctggcggtcagtcacggacggatagacatggtgaagggccttctggcctgtggggctgatgtcaacatccaggatgacgagggctccacggccctcatgtgtgccagcgagcacgggcacgtggagattgtcaagctgctgctggcccagcccggctgcaacggtcacctagaggacaacgatggcagcactgcgctctcaatcgccctggaagcaggacacaaggacatcgctgttcttctgtatgcccatgtcaactttgcaaaagcccagtctccgggcacccctaggcttggaaggaagacgtctcctggccccacccaccgaggttcatttgattgattgtatgcaaatagccctttatttacatgccactattaagctgctaattgttcctgttggggtgacagatactgaatgtatacgtattgtgcctgagctcaccagcaaacagaagcatcaagcccaggggtaaaggctgaagctttcacagtgcagagactgctagcctgggcacacacacctcctttctggccgtcttctgtgtagggcacactttaacccagtctctgttgctgttgagtctctgctccgttttgtacagtcacagggaattctgatctgaaggggcaccttctgttcactcccacaaagtggtgtctggttctcactgagacgttttaagatttttccacaaatatttatatgtactaaatgtggaaccattagaaagttcttccaaaatctcattccagcatagttttggatttttcttttgtcttattttaaaataaggaagtcgagatgactttgatcattggtaacttgggcctgggccagacaaagtataaaacttacaaaagaatattctcatttggtcttaactaggtagatgtaatatatgactttttataaaaagggtatctatatgaacttgacacagtattttcagcttttgtattccatactaaagccatgaagaactacacgtaacatcatcatttgtattaattgcacaactccaatgctaaaggttggattgtgttagaggaatcggctctgtatttgcctctagagaaacacagtgttctctttgtatttatggattcctttttaccgtgtcacatttactttggtcctctatgtatttaaatgtttgaagtgccttagactcttgccatattttcaaaataaaattccattaagctctt

SEQ ID NO: 417348 - DNA, 358 bp, Homo sapiens
aattttgaggctaggagttctaggtctagactccctcccagggccattgtgagatttaaatgagatttaatgaatttgaaaacacattgtaagttttaaataacttcacagctataaggggttgctaatactatcagtgtctgagatatctagaataccaaggaattttcttctaatttgttagcaagattttattccttcaagtttccatttgtgagaggtccttttttgtaggctcgcctcttctgttccaacatttttaatcagcctttctgcatggctttttattgtgaactatcttcagtacctttttcttgccactacactccagcctggcaatagagcgagctccgtctca

SEQ ID NO: 417349 - DNA, 426 bp, Homo sapiens
gaataaaactgaaaatcaactccaaaaggaatattcaaaaccatgcaaatacatggaaattaaataacctgctcctgaatgagcattgggtgaaaaatgaaatcacgatggaaatgtaaaaaatttcttcgaactggatgacacaacctatcaagacctctgggatacagcaaaggcagtgctaagaggaaagtctgtagccctaaacacctacgtcaaaaagtctgaaagagcacagaccgaatctaagttcacatctcagggaactagagaagcaggaacaagccaaacccaatcccagcaaacaaaggaaataaccaagatcagagcagaactaaatgaaattgacacaagaacaacaacaacaaaaaacacaaaacataaataaaacaaaaattggctatttgaaaagataaataaaatcga

SEQ ID NO: 417350 - DNA, 381 bp, Homo sapiens
tgttactgttgccacatgcacttctagagtgaaatactttgggacaaacctgaagaatttttttctcttctagatgtcaactttcaaaattatggaaaaatgaactaaatatcataataaagattcactcattcataatttaaacaagcccctgaagccctctctccaaatgtaagaattgttccctgccagtttgttctcttctcaggttcattgtttggcccacacctcctcccctcaacactccccaaggctgtattccagttagtgatactctgcctgcaatgtagcttttctcagtcactagaaaatgtcaagaaagtatagtttgaactgtggaggttattaatctctacgacactgtcaaaggaaagagggaga

SEQ ID NO: 417351 - DNA, 671 bp, Homo sapiens
cagtgaattataatccctttttggaaatgagggaatgtaaattttaaaagttaagcaattatccaaggtgacacagctgtgaaagtggtagaggccaggctttctgacacccagtccagtactctccttggaattagcctccattttacccacagtgttaaaatggctgggtattgggaacctcaggaaattttccagcttcctgatctggtgcccctagtcacataggatgtgtgatcacgtgatagctacatctggaccagaatcccatggcaatatcccacggtttaagggcataatatctccgtggtggtagattgtcaagtcaaaaacgggacatgttctaacagcaaagctacccaatatgaaacacaaagctacttttagattttttaagacttactgatattcctgggccctaagagcttgtctatggtcctatctttgcaaactagtatttacacaaaatgagccacctggtttttttaaagtcagtattgtgtgtgtgtgtgtaaatatgacatggagaaagcttctgttacctagtaagatagtaaagtatgtaagacatggcccttcccccagtctacattgaggtatagtgtattaaaggatctcaggagacttgcagcaaattactactgcttctgtgcttaaattcagaagtctga

SEQ ID NO: 417352 - DNA, 2429 bp, Homo sapiens
  misc_feature (314)..(315): n is a, c, g, or t
ggaataggttagtttcagacaagcctgcttgccggagctcagcagacaccaggccttccgggcaggcctggcccaccgtgggcctcagagctgctgctggggcattcagaaccggctctccattggcattgggaccagagaccccgcaagtggcctgtttgcctggacatccacctgtacgtccccaggtttcgggaggcccaggggcgatgccagaccccgcggcgcacctgcccttcttctacggcagcatctcgcgtgccgaggccgaggagcacctgaagctggcgggcatggcggacgggctcttcctnntgcgccagtgcctgcgctcgctgggcggctatgtgtgtcgctcgtgcacgatgtgcgcttccaccactttcccatcgagcgccagctcaacggcacctacgccattgccggcggcaaagcgcactgtggaccggcagagctctgcgagttctactcgcgcgaccccgacgggctgccctgcaacctgcgcaagccgtgcaaccgccgtcgggcctcgagccgcagccgggggtcttcgactgcctgcgagacgccatggtgcgtgactacgtgcgccagacgtggaagctggagggcgaggccctggagcaggccatcatcagccaggccccgcaggtggagaagctcattgctacgacggcccacgagcggatgccctggtaccacagcagcctgacgcgtgaggaggccgagcgcaaactttactctggggcgcagaccgacggcaagttcctgctgaggccgcggaaggagcagggcacatacgccctgtccctcatctatgggaagacggtgtaccactacctcatcagccaagacaaggcgggcaagtactgcattcccgagggcaccaagtttgacacgctctggcagctggtggagtatctgaagctgaaggcggacgggctcatctactgcctgaaggaggcctgccccaacagcagtgccagcaacgcctcaggggctgctgctcccacactcccagcccacccatccacgttgactcatcctcagagacgaatcgacaccctcaactcagatggatacacccctgagccagcacgcataacgtccccagacaaaccgcggccgatgcccatggacacgagcgtgtatgagagcccctacagcgacccagaggagctcaaggacaagaagctcttcctgaagcgcgataacctcctcatagctgacattgaacttggctgcggcaactttggctcagtgcgccagggcgtgtaccgcatgcgcaagaagcagatcgacgtggccatcaaggtgctgaagcagggcacggagaaggcagacacggaagagatgatgcgcgaggcgcagatcatgcaccagctggacaacccctacatcgtgcggctcattggcgtctgccaggccgaggccctcatgctggtcatggagatggctgggggcgggccgctgcacaagttcctggtcggcaagagggaggagatccctgtgagcaatgtggccgagctgctgcaccaggtgtccatggggatgaagtacctggaggagaagaactttgtgcaccgtgacctggcggcccgcaacgtcctgctggttaaccggcactacgccaagatcagcgactttggcctctccaaagcactgggtgccgacgacagctactacactgcccgctcagcagggaagtggccgctcaagtggtacgcacccgaatgcatcaacttccgcaagttctccagccgcagcgatgtctggagctatggggtcaccatgtgggaggccttgtcctacggccagaagccctacaagaagatgaaagggccggaggtcatggccttcatcgagcagggcaagcggatggaatgcccaccagagtgtccacccgaactgtacgcactcatgagtgactgctggatctacaagtgggaggatcgccccgacttcctgaccgtggagcagcgcatgcgagcctgttactacagcctggccagcaaggtggaagggcccccaggcagcacacagaaggctgaggctgcctgtgcctgagctcccgctgcccaggggagccctccacgccggctcttccccaccctcagccccaccccaggtcctgcagtctggctgagccctgcttggttgtctccacacacagctgggctgtggtagggggtgtctcaggccacaccggccttgcattgcctgcctggccccctgtcctctctggctggggagcagggaggtccgggagggtgcggctgtgcagcctgtcctgggctggtggctcccggagggccctgagctgagggcattgcttacacggatgccttcccctgggccctgacattggagcctgggcatcctcaggtggtcaggcgtagatcaccagaataaacccagcttccctcttg
